United States Patent Application Publication US 2018/0305689 A1 - sequence listing, part 22

SEQ ID NO: 312323 - RNA, 19 nt, Artificial Sequence
  Description of Artificial Sequence: Synthetic oligonucleotide
  Antisense strand to SEQ ID NO: 312322
auacacagccuugauauuu

SEQ ID NO: 312324 - RNA, 19 nt, Artificial Sequence
  Description of Artificial Sequence: Synthetic oligonucleotide
  Sense strand starting at position 2924 of SEQ ID NO: 4009
uguguaucccuuugaauua

SEQ ID NO: 312325 - RNA, 19 nt, Artificial Sequence
  Description of Artificial Sequence: Synthetic oligonucleotide
  Antisense strand to SEQ ID NO: 312324
uaauucaaagggauacaca

SEQ ID NO: 312326 - RNA, 19 nt, Artificial Sequence
  Description of Artificial Sequence: Synthetic oligonucleotide
  Sense strand starting at position 3103 of SEQ ID NO: 4009
acaaauuagcuguaagacu

SEQ ID NO: 312327 - RNA, 19 nt, Artificial Sequence
  Description of Artificial Sequence: Synthetic oligonucleotide
  Antisense strand to SEQ ID NO: 312326
agucuuacagcuaauuugu

SEQ ID NO: 312328 - RNA, 19 nt, Artificial Sequence
  Description of Artificial Sequence: Synthetic oligonucleotide
  Sense strand starting at position 3147 of SEQ ID NO: 4009
agccucugucuccaagagu

SEQ ID NO: 312329 - RNA, 19 nt, Artificial Sequence
  Description of Artificial Sequence: Synthetic oligonucleotide
  Antisense strand to SEQ ID NO: 312328
acucuuggagacagaggcu

SEQ ID NO: 312330 - RNA, 19 nt, Artificial Sequence
  Description of Artificial Sequence: Synthetic oligonucleotide
  Sense strand starting at position 3212 of SEQ ID NO: 4009
accuaagaucugugcuuga

SEQ ID NO: 312331 - RNA, 19 nt, Artificial Sequence
  Description of Artificial Sequence: Synthetic oligonucleotide
  Antisense strand to SEQ ID NO: 312330
ucaagcacagaucuuaggu

SEQ ID NO: 312332 - RNA, 19 nt, Artificial Sequence
  Description of Artificial Sequence: Synthetic oligonucleotide
  Sense strand starting at position 3217 of SEQ ID NO: 4009
agaucugugcuugagauac

SEQ ID NO: 312333 - RNA, 19 nt, Artificial Sequence
  Description of Artificial Sequence: Synthetic oligonucleotide
  Antisense strand to SEQ ID NO: 312332
guaucucaagcacagaucu

SEQ ID NO: 312334 - RNA, 19 nt, Artificial Sequence
  Description of Artificial Sequence: Synthetic oligonucleotide
  Sense strand starting at position 3244 of SEQ ID NO: 4009
cccugaacucaguggauca

SEQ ID NO: 312335 - RNA, 19 nt, Artificial Sequence
  Description of Artificial Sequence: Synthetic oligonucleotide
  Antisense strand to SEQ ID NO: 312334
ugauccacugaguucaggg

SEQ ID NO: 312336 - RNA, 19 nt, Artificial Sequence
  Description of Artificial Sequence: Synthetic oligonucleotide
  Sense strand starting at position 3502 of SEQ ID NO: 4009
gcgugaauccgucuuucuc

SEQ ID NO: 312337 - RNA, 19 nt, Artificial Sequence
  Description of Artificial Sequence: Synthetic oligonucleotide
  Antisense strand to SEQ ID NO: 312336
gagaaagacggauucacgc

SEQ ID NO: 312338 - RNA, 19 nt, Artificial Sequence
  Description of Artificial Sequence: Synthetic oligonucleotide
  Sense strand starting at position 3596 of SEQ ID NO: 4009
auagaugcacuucggaauu

SEQ ID NO: 312339 - RNA, 19 nt, Artificial Sequence
  Description of Artificial Sequence: Synthetic oligonucleotide
  Antisense strand to SEQ ID NO: 312338
aauuccgaagugcaucuau

SEQ ID NO: 312340 - RNA, 19 nt, Artificial Sequence
  Description of Artificial Sequence: Synthetic oligonucleotide
  Sense strand starting at position 3729 of SEQ ID NO: 4009
gacauuuaguaacauggga

SEQ ID NO: 312341 - RNA, 19 nt, Artificial Sequence
  Description of Artificial Sequence: Synthetic oligonucleotide
  Antisense strand to SEQ ID NO: 312340
ucccauguuacuaaauguc

SEQ ID NO: 312342 - RNA, 19 nt, Artificial Sequence
  Description of Artificial Sequence: Synthetic oligonucleotide
  Sense strand starting at position 3742 of SEQ ID NO: 4009
augggaaacucuucccauu

SEQ ID NO: 312343 - RNA, 19 nt, Artificial Sequence
  Description of Artificial Sequence: Synthetic oligonucleotide
  Antisense strand to SEQ ID NO: 312342
aaugggaagaguuucccau

SEQ ID NO: 312344 - RNA, 19 nt, Artificial Sequence
  Description of Artificial Sequence: Synthetic oligonucleotide
  Sense strand starting at position 3772 of SEQ ID NO: 4009
gucuaaauguacccaucuu

SEQ ID NO: 312345 - RNA, 19 nt, Artificial Sequence
  Description of Artificial Sequence: Synthetic oligonucleotide
  Antisense strand to SEQ ID NO: 312344
aagauggguacauuuagac

SEQ ID NO: 312346 - RNA, 19 nt, Artificial Sequence
  Description of Artificial Sequence: Synthetic oligonucleotide
  Sense strand starting at position 3928 of SEQ ID NO: 4009
cacuaacugugguuagcaa

SEQ ID NO: 312347 - RNA, 19 nt, Artificial Sequence
  Description of Artificial Sequence: Synthetic oligonucleotide
  Antisense strand to SEQ ID NO: 312346
uugcuaaccacaguuagug

SEQ ID NO: 312348 - RNA, 19 nt, Artificial Sequence
  Description of Artificial Sequence: Synthetic oligonucleotide
  Sense strand starting at position 3935 of SEQ ID NO: 4009
ugugguuagcaaggaaauu

SEQ ID NO: 312349 - RNA, 19 nt, Artificial Sequence
  Description of Artificial Sequence: Synthetic oligonucleotide
  Antisense strand to SEQ ID NO: 312348
aauuuccuugcuaaccaca

SEQ ID NO: 312350 - RNA, 19 nt, Artificial Sequence
  Description of Artificial Sequence: Synthetic oligonucleotide
  Sense strand starting at position 3936 of SEQ ID NO: 4009
gugguuagcaaggaaauua

SEQ ID NO: 312351 - RNA, 19 nt, Artificial Sequence
  Description of Artificial Sequence: Synthetic oligonucleotide
  Antisense strand to SEQ ID NO: 312350
uaauuuccuugcuaaccac

SEQ ID NO: 312352 - RNA, 19 nt, Artificial Sequence
  Description of Artificial Sequence: Synthetic oligonucleotide
  Sense strand starting at position 23 of SEQ ID NO: 4011
gaggcaguggguuagaaau

SEQ ID NO: 312353 - RNA, 19 nt, Artificial Sequence
  Description of Artificial Sequence: Synthetic oligonucleotide
  Antisense strand to SEQ ID NO: 312352
auuucuaacccacugccuc

SEQ ID NO: 312354 - RNA, 19 nt, Artificial Sequence
  Description of Artificial Sequence: Synthetic oligonucleotide
  Sense strand starting at position 33 of SEQ ID NO: 4011
guuagaaauggcugggaau

SEQ ID NO: 312355 - RNA, 19 nt, Artificial Sequence
  Description of Artificial Sequence: Synthetic oligonucleotide
  Antisense strand to SEQ ID NO: 312354
auucccagccauuucuaac

SEQ ID NO: 312356 - RNA, 19 nt, Artificial Sequence
  Description of Artificial Sequence: Synthetic oligonucleotide
  Sense strand starting at position 36 of SEQ ID NO: 4011
agaaauggcugggaauaga

SEQ ID NO: 312357 - RNA, 19 nt, Artificial Sequence
  Description of Artificial Sequence: Synthetic oligonucleotide
  Antisense strand to SEQ ID NO: 312356
ucuauucccagccauuucu

SEQ ID NO: 312358 - RNA, 19 nt, Artificial Sequence
  Description of Artificial Sequence: Synthetic oligonucleotide
  Sense strand starting at position 46 of SEQ ID NO: 4011
gggaauagauucugaggug

SEQ ID NO: 312359 - RNA, 19 nt, Artificial Sequence
  Description of Artificial Sequence: Synthetic oligonucleotide
  Antisense strand to SEQ ID NO: 312358
caccucagaaucuauuccc

SEQ ID NO: 312360 - RNA, 19 nt, Artificial Sequence
  Description of Artificial Sequence: Synthetic oligonucleotide
  Sense strand starting at position 49 of SEQ ID NO: 4011
aauagauucugagguggag

SEQ ID NO: 312361 - RNA, 19 nt, Artificial Sequence
  Description of Artificial Sequence: Synthetic oligonucleotide
  Antisense strand to SEQ ID NO: 312360
cuccaccucagaaucuauu

SEQ ID NO: 312362 - RNA, 19 nt, Artificial Sequence
  Description of Artificial Sequence: Synthetic oligonucleotide
  Sense strand starting at position 51 of SEQ ID NO: 4011
uagauucugagguggagau

SEQ ID NO: 312363 - RNA, 19 nt, Artificial Sequence
  Description of Artificial Sequence: Synthetic oligonucleotide
  Antisense strand to SEQ ID NO: 312362
aucuccaccucagaaucua

SEQ ID NO: 312364 - RNA, 19 nt, Artificial Sequence
  Description of Artificial Sequence: Synthetic oligonucleotide
  Sense strand starting at position 105 of SEQ ID NO: 4011
agcuaccucugcugaagau

SEQ ID NO: 312365 - RNA, 19 nt, Artificial Sequence
  Description of Artificial Sequence: Synthetic oligonucleotide
  Antisense strand to SEQ ID NO: 312364
aucuucagcagagguagcu

SEQ ID NO: 312366 - RNA, 19 nt, Artificial Sequence
  Description of Artificial Sequence: Synthetic oligonucleotide
  Sense strand starting at position 365 of SEQ ID NO: 4011
ggugcugaccugcagacau

SEQ ID NO: 312367 - RNA, 19 nt, Artificial Sequence
  Description of Artificial Sequence: Synthetic oligonucleotide
  Antisense strand to SEQ ID NO: 312366
augucugcaggucagcacc

SEQ ID NO: 312368 - RNA, 19 nt, Artificial Sequence
  Description of Artificial Sequence: Synthetic oligonucleotide
  Sense strand starting at position 367 of SEQ ID NO: 4011
ugcugaccugcagacauau

SEQ ID NO: 312369 - RNA, 19 nt, Artificial Sequence
  Description of Artificial Sequence: Synthetic oligonucleotide
  Antisense strand to SEQ ID NO: 312368
auaugucugcaggucagca

SEQ ID NO: 312370 - RNA, 19 nt, Artificial Sequence
  Description of Artificial Sequence: Synthetic oligonucleotide
  Sense strand starting at position 491 of SEQ ID NO: 4011
gaagguugggcccaucagu

SEQ ID NO: 312371 - RNA, 19 nt, Artificial Sequence
  Description of Artificial Sequence: Synthetic oligonucleotide
  Antisense strand to SEQ ID NO: 312370
acugaugggcccaaccuuc

SEQ ID NO: 312372 - RNA, 19 nt, Artificial Sequence
  Description of Artificial Sequence: Synthetic oligonucleotide
  Sense strand starting at position 945 of SEQ ID NO: 4011
gauccugggcucgauugaa

SEQ ID NO: 312373 - RNA, 19 nt, Artificial Sequence
  Description of Artificial Sequence: Synthetic oligonucleotide
  Antisense strand to SEQ ID NO: 312372
uucaaucgagcccaggauc

SEQ ID NO: 312374 - RNA, 19 nt, Artificial Sequence
  Description of Artificial Sequence: Synthetic oligonucleotide
  Sense strand starting at position 1237 of SEQ ID NO: 4011
cccauauccugucaccagu

SEQ ID NO: 312375 - RNA, 19 nt, Artificial Sequence
  Description of Artificial Sequence: Synthetic oligonucleotide
  Antisense strand to SEQ ID NO: 312374
acuggugacaggauauggg

SEQ ID NO: 312376 - RNA, 19 nt, Artificial Sequence
  Description of Artificial Sequence: Synthetic oligonucleotide
  Sense strand starting at position 2212 of SEQ ID NO: 4011
caggaagaugccugugugu

SEQ ID NO: 312377 - RNA, 19 nt, Artificial Sequence
  Description of Artificial Sequence: Synthetic oligonucleotide
  Antisense strand to SEQ ID NO: 312376
acacacaggcaucuuccug

SEQ ID NO: 312378 - RNA, 19 nt, Artificial Sequence
  Description of Artificial Sequence: Synthetic oligonucleotide
  Sense strand starting at position 2255 of SEQ ID NO: 4011
auauguguuaccgcgaggu

SEQ ID NO: 312379 - RNA, 19 nt, Artificial Sequence
  Description of Artificial Sequence: Synthetic oligonucleotide
  Antisense strand to SEQ ID NO: 312378
accucgcgguaacacauau

SEQ ID NO: 312380 - RNA, 19 nt, Artificial Sequence
  Description of Artificial Sequence: Synthetic oligonucleotide
  Sense strand starting at position 2257 of SEQ ID NO: 4011
auguguuaccgcgaggugu

SEQ ID NO: 312381 - RNA, 19 nt, Artificial Sequence
  Description of Artificial Sequence: Synthetic oligonucleotide
  Antisense strand to SEQ ID NO: 312380
acaccucgcgguaacacau

SEQ ID NO: 312382 - RNA, 19 nt, Artificial Sequence
  Description of Artificial Sequence: Synthetic oligonucleotide
  Sense strand starting at position 2475 of SEQ ID NO: 4011
uuugcugugugaccuuaaa

SEQ ID NO: 312383 - RNA, 19 nt, Artificial Sequence
  Description of Artificial Sequence: Synthetic oligonucleotide
  Antisense strand to SEQ ID NO: 312382
uuuaaggucacacagcaaa

SEQ ID NO: 312384 - RNA, 19 nt, Artificial Sequence
  Description of Artificial Sequence: Synthetic oligonucleotide
  Sense strand starting at position 2680 of SEQ ID NO: 4011
agaaguggccguugagaua

SEQ ID NO: 312385 - RNA, 19 nt, Artificial Sequence
  Description of Artificial Sequence: Synthetic oligonucleotide
  Antisense strand to SEQ ID NO: 312384
uaucucaacggccacuucu

SEQ ID NO: 312386 - RNA, 19 nt, Artificial Sequence
  Description of Artificial Sequence: Synthetic oligonucleotide
  Sense strand starting at position 2850 of SEQ ID NO: 4011
cgcagauacucucagucuu

SEQ ID NO: 312387 - RNA, 19 nt, Artificial Sequence
  Description of Artificial Sequence: Synthetic oligonucleotide
  Antisense strand to SEQ ID NO: 312386
aagacugagaguaucugcg

SEQ ID NO: 312388 - RNA, 19 nt, Artificial Sequence
  Description of Artificial Sequence: Synthetic oligonucleotide
  Sense strand starting at position 2940 of SEQ ID NO: 4011
gucuacuucucgcugagau

SEQ ID NO: 312389 - RNA, 19 nt, Artificial Sequence
  Description of Artificial Sequence: Synthetic oligonucleotide
  Antisense strand to SEQ ID NO: 312388
aucucagcgagaaguagac

SEQ ID NO: 312390 - RNA, 19 nt, Artificial Sequence
  Description of Artificial Sequence: Synthetic oligonucleotide
  Sense strand starting at position 2941 of SEQ ID NO: 4011
ucuacuucucgcugagauc

SEQ ID NO: 312391 - RNA, 19 nt, Artificial Sequence
  Description of Artificial Sequence: Synthetic oligonucleotide
  Antisense strand to SEQ ID NO: 312390
gaucucagcgagaaguaga

SEQ ID NO: 312392 - RNA, 19 nt, Artificial Sequence
  Description of Artificial Sequence: Synthetic oligonucleotide
  Sense strand starting at position 2942 of SEQ ID NO: 4011
cuacuucucgcugagaucu

SEQ ID NO: 312393 - RNA, 19 nt, Artificial Sequence
  Description of Artificial Sequence: Synthetic oligonucleotide
  Antisense strand to SEQ ID NO: 312392
agaucucagcgagaaguag

SEQ ID NO: 312394 - RNA, 19 nt, Artificial Sequence
  Description of Artificial Sequence: Synthetic oligonucleotide
  Sense strand starting at position 2952 of SEQ ID NO: 4011
cugagaucuuccugucccu

SEQ ID NO: 312395 - RNA, 19 nt, Artificial Sequence
  Description of Artificial Sequence: Synthetic oligonucleotide
  Antisense strand to SEQ ID NO: 312394
agggacaggaagaucucag

SEQ ID NO: 312396 - RNA, 19 nt, Artificial Sequence
  Description of Artificial Sequence: Synthetic oligonucleotide
  Sense strand starting at position 3070 of SEQ ID NO: 4011
ccgucuguuucuggugcua

SEQ ID NO: 312397 - RNA, 19 nt, Artificial Sequence
  Description of Artificial Sequence: Synthetic oligonucleotide
  Antisense strand to SEQ ID NO: 312396
uagcaccagaaacagacgg

SEQ ID NO: 312398 - RNA, 19 nt, Artificial Sequence
  Description of Artificial Sequence: Synthetic oligonucleotide
  Sense strand starting at position 3130 of SEQ ID NO: 4011
ucggcauccuccucuguaa

SEQ ID NO: 312399 - RNA, 19 nt, Artificial Sequence
  Description of Artificial Sequence: Synthetic oligonucleotide
  Antisense strand to SEQ ID NO: 312398
uuacagaggaggaugccga

SEQ ID NO: 312400 - RNA, 19 nt, Artificial Sequence
  Description of Artificial Sequence: Synthetic oligonucleotide
  Sense strand starting at position 3153 of SEQ ID NO: 4011
ggcacaagccuuuacacaa

SEQ ID NO: 312401 - RNA, 19 nt, Artificial Sequence
  Description of Artificial Sequence: Synthetic oligonucleotide
  Antisense strand to SEQ ID NO: 312400
uuguguaaaggcuugugcc

SEQ ID NO: 312402 - RNA, 19 nt, Artificial Sequence
  Description of Artificial Sequence: Synthetic oligonucleotide
  Sense strand starting at position 3405 of SEQ ID NO: 4011
cgcagcugucaggaauuaa

SEQ ID NO: 312403 - RNA, 19 nt, Artificial Sequence
  Description of Artificial Sequence: Synthetic oligonucleotide
  Antisense strand to SEQ ID NO: 312402
uuaauuccugacagcugcg

SEQ ID NO: 312404 - RNA, 19 nt, Artificial Sequence
  Description of Artificial Sequence: Synthetic oligonucleotide
  Sense strand starting at position 3417 of SEQ ID NO: 4011
gaauuaagggcuugaggcu

SEQ ID NO: 312405 - RNA, 19 nt, Artificial Sequence
  Description of Artificial Sequence: Synthetic oligonucleotide
  Antisense strand to SEQ ID NO: 312404
agccucaagcccuuaauuc

SEQ ID NO: 312406 - RNA, 19 nt, Artificial Sequence
  Description of Artificial Sequence: Synthetic oligonucleotide
  Sense strand starting at position 3699 of SEQ ID NO: 4011
gcuggagagucauauucuu

SEQ ID NO: 312407 - RNA, 19 nt, Artificial Sequence
  Description of Artificial Sequence: Synthetic oligonucleotide
  Antisense strand to SEQ ID NO: 312406
aagaauaugacucuccagc

SEQ ID NO: 312408 - RNA, 19 nt, Artificial Sequence
  Description of Artificial Sequence: Synthetic oligonucleotide
  Sense strand starting at position 3787 of SEQ ID NO: 4011
gcuuacagauguccuuauu

SEQ ID NO: 312409 - RNA, 19 nt, Artificial Sequence
  Description of Artificial Sequence: Synthetic oligonucleotide
  Antisense strand to SEQ ID NO: 312408
aauaaggacaucuguaagc

SEQ ID NO: 312410 - RNA, 19 nt, Artificial Sequence
  Description of Artificial Sequence: Synthetic oligonucleotide
  Sense strand starting at position 3825 of SEQ ID NO: 4011
uagcauuucccacgcuuga

SEQ ID NO: 312411 - RNA, 19 nt, Artificial Sequence
  Description of Artificial Sequence: Synthetic oligonucleotide
  Antisense strand to SEQ ID NO: 312410
ucaagcgugggaaaugcua

SEQ ID NO: 312412 - RNA, 19 nt, Artificial Sequence
  Description of Artificial Sequence: Synthetic oligonucleotide
  Sense strand starting at position 3932 of SEQ ID NO: 4011
cugggugucugucuuucua

SEQ ID NO: 312413 - RNA, 19 nt, Artificial Sequence
  Description of Artificial Sequence: Synthetic oligonucleotide
  Antisense strand to SEQ ID NO: 312412
uagaaagacagacacccag

SEQ ID NO: 312414 - RNA, 19 nt, Artificial Sequence
  Description of Artificial Sequence: Synthetic oligonucleotide
  Sense strand starting at position 3936 of SEQ ID NO: 4011
gugucugucuuucuagcua

SEQ ID NO: 312415 - RNA, 19 nt, Artificial Sequence
  Description of Artificial Sequence: Synthetic oligonucleotide
  Antisense strand to SEQ ID NO: 312414
uagcuagaaagacagacac

SEQ ID NO: 312416 - RNA, 19 nt, Artificial Sequence
  Description of Artificial Sequence: Synthetic oligonucleotide
  Sense strand starting at position 3940 of SEQ ID NO: 4011
cugucuuucuagcuagcau

SEQ ID NO: 312417 - RNA, 19 nt, Artificial Sequence
  Description of Artificial Sequence: Synthetic oligonucleotide
  Antisense strand to SEQ ID NO: 312416
augcuagcuagaaagacag

SEQ ID NO: 312418 - RNA, 19 nt, Artificial Sequence
  Description of Artificial Sequence: Synthetic oligonucleotide
  Sense strand starting at position 61 of SEQ ID NO: 4012
ccguaaggauaagaaugau

SEQ ID NO: 312419 - RNA, 19 nt, Artificial Sequence
  Description of Artificial Sequence: Synthetic oligonucleotide
  Antisense strand to SEQ ID NO: 312418
aucauucuuauccuuacgg

SEQ ID NO: 312420 - RNA, 19 nt, Artificial Sequence
  Description of Artificial Sequence: Synthetic oligonucleotide
  Sense strand starting at position 154 of SEQ ID NO: 4012
gggcaaaguuaggcguuua

SEQ ID NO: 312421 - RNA, 19 nt, Artificial Sequence
  Description of Artificial Sequence: Synthetic oligonucleotide
  Antisense strand to SEQ ID NO: 312420
uaaacgccuaacuuugccc

SEQ ID NO: 312422 - RNA, 19 nt, Artificial Sequence
  Description of Artificial Sequence: Synthetic oligonucleotide
  Sense strand starting at position 372 of SEQ ID NO: 4012
gggagacuguuauccuauu

SEQ ID NO: 312423 - RNA, 19 nt, Artificial Sequence
  Description of Artificial Sequence: Synthetic oligonucleotide
  Antisense strand to SEQ ID NO: 312422
aauaggauaacagucuccc

SEQ ID NO: 312424 - RNA, 19 nt, Artificial Sequence
  Description of Artificial Sequence: Synthetic oligonucleotide
  Sense strand starting at position 378 of SEQ ID NO: 4012
cuguuauccuauuuccagu

SEQ ID NO: 312425 - RNA, 19 nt, Artificial Sequence
  Description of Artificial Sequence: Synthetic oligonucleotide
  Antisense strand to SEQ ID NO: 312424
acuggaaauaggauaacag

SEQ ID NO: 312426 - RNA, 19 nt, Artificial Sequence
  Description of Artificial Sequence: Synthetic oligonucleotide
  Sense strand starting at position 418 of SEQ ID NO: 4012
ggaagugacuagcccaaga

SEQ ID NO: 312427 - RNA, 19 nt, Artificial Sequence
  Description of Artificial Sequence: Synthetic oligonucleotide
  Antisense strand to SEQ ID NO: 312426
ucuugggcuagucacuucc

SEQ ID NO: 312428 - RNA, 19 nt, Artificial Sequence
  Description of Artificial Sequence: Synthetic oligonucleotide
  Sense strand starting at position 488 of SEQ ID NO: 4012
gcauuauacuaagccggau

SEQ ID NO: 312429 - RNA, 19 nt, Artificial Sequence
  Description of Artificial Sequence: Synthetic oligonucleotide
  Antisense strand to SEQ ID NO: 312428
auccggcuuaguauaaugc

SEQ ID NO: 312430 - RNA, 19 nt, Artificial Sequence
  Description of Artificial Sequence: Synthetic oligonucleotide
  Sense strand starting at position 511 of SEQ ID NO: 4012
gggcauauguucccuagau

SEQ ID NO: 312431 - RNA, 19 nt, Artificial Sequence
  Description of Artificial Sequence: Synthetic oligonucleotide
  Antisense strand to SEQ ID NO: 312430
aucuagggaacauaugccc

SEQ ID NO: 312432 - RNA, 19 nt, Artificial Sequence
  Description of Artificial Sequence: Synthetic oligonucleotide
  Sense strand starting at position 512 of SEQ ID NO: 4012
ggcauauguucccuagaua

SEQ ID NO: 312433 - RNA, 19 nt, Artificial Sequence
  Description of Artificial Sequence: Synthetic oligonucleotide
  Antisense strand to SEQ ID NO: 312432
uaucuagggaacauaugcc

SEQ ID NO: 312434 - RNA, 19 nt, Artificial Sequence
  Description of Artificial Sequence: Synthetic oligonucleotide
  Sense strand starting at position 513 of SEQ ID NO: 4012
gcauauguucccuagauag

SEQ ID NO: 312435 - RNA, 19 nt, Artificial Sequence
  Description of Artificial Sequence: Synthetic oligonucleotide
  Antisense strand to SEQ ID NO: 312434
cuaucuagggaacauaugc

SEQ ID NO: 312436 - RNA, 19 nt, Artificial Sequence
  Description of Artificial Sequence: Synthetic oligonucleotide
  Sense strand starting at position 552 of SEQ ID NO: 4012
cgcccuuuccgugacacua

SEQ ID NO: 312437 - RNA, 19 nt, Artificial Sequence
  Description of Artificial Sequence: Synthetic oligonucleotide
  Antisense strand to SEQ ID NO: 312436
uagugucacggaaagggcg

SEQ ID NO: 312438 - RNA, 19 nt, Artificial Sequence
  Description of Artificial Sequence: Synthetic oligonucleotide
  Sense strand starting at position 661 of SEQ ID NO: 4012
ggaucugccucucuuccaa

SEQ ID NO: 312439 - RNA, 19 nt, Artificial Sequence
  Description of Artificial Sequence: Synthetic oligonucleotide
  Antisense strand to SEQ ID NO: 312438
uuggaagagaggcagaucc

SEQ ID NO: 312440 - RNA, 19 nt, Artificial Sequence
  Description of Artificial Sequence: Synthetic oligonucleotide
  Sense strand starting at position 717 of SEQ ID NO: 4012
agccaaucacauggcaaua

SEQ ID NO: 312441 - RNA, 19 nt, Artificial Sequence
  Description of Artificial Sequence: Synthetic oligonucleotide
  Antisense strand to SEQ ID NO: 312440
uauugccaugugauuggcu

SEQ ID NO: 312442 - RNA, 19 nt, Artificial Sequence
  Description of Artificial Sequence: Synthetic oligonucleotide
  Sense strand starting at position 749 of SEQ ID NO: 4012
gacccugccuucuuaggau

SEQ ID NO: 312443 - RNA, 19 nt, Artificial Sequence
  Description of Artificial Sequence: Synthetic oligonucleotide
  Antisense strand to SEQ ID NO: 312442
auccuaagaaggcaggguc

SEQ ID NO: 312444 - RNA, 19 nt, Artificial Sequence
  Description of Artificial Sequence: Synthetic oligonucleotide
  Sense strand starting at position 756 of SEQ ID NO: 4012
ccuucuuaggauuggcuaa

SEQ ID NO: 312445 - RNA, 19 nt, Artificial Sequence
  Description of Artificial Sequence: Synthetic oligonucleotide
  Antisense strand to SEQ ID NO: 312444
uuagccaauccuaagaagg

SEQ ID NO: 312446 - RNA, 19 nt, Artificial Sequence
  Description of Artificial Sequence: Synthetic oligonucleotide
  Sense strand starting at position 781 of SEQ ID NO: 4012
agcguuauuguccaagucu

SEQ ID NO: 312447 - RNA, 19 nt, Artificial Sequence
  Description of Artificial Sequence: Synthetic oligonucleotide
  Antisense strand to SEQ ID NO: 312446
agacuuggacaauaacgcu

SEQ ID NO: 312448 - RNA, 19 nt, Artificial Sequence
  Description of Artificial Sequence: Synthetic oligonucleotide
  Sense strand starting at position 1221 of SEQ ID NO: 4012
uucccucugucgucacuaa

SEQ ID NO: 312449 - RNA, 19 nt, Artificial Sequence
  Description of Artificial Sequence: Synthetic oligonucleotide
  Antisense strand to SEQ ID NO: 312448
uuagugacgacagagggaa

SEQ ID NO: 312450 - RNA, 19 nt, Artificial Sequence
  Description of Artificial Sequence: Synthetic oligonucleotide
  Sense strand starting at position 1345 of SEQ ID NO: 4012
guuccugucuucuccaaau

SEQ ID NO: 312451 - RNA, 19 nt, Artificial Sequence
  Description of Artificial Sequence: Synthetic oligonucleotide
  Antisense strand to SEQ ID NO: 312450
auuuggagaagacaggaac

SEQ ID NO: 312452 - RNA, 19 nt, Artificial Sequence
  Description of Artificial Sequence: Synthetic oligonucleotide
  Sense strand starting at position 1413 of SEQ ID NO: 4012
ggauaugugucuucccgaa

SEQ ID NO: 312453 - RNA, 19 nt, Artificial Sequence
  Description of Artificial Sequence: Synthetic oligonucleotide
  Antisense strand to SEQ ID NO: 312452
uucgggaagacacauaucc

SEQ ID NO: 312454 - RNA, 19 nt, Artificial Sequence
  Description of Artificial Sequence: Synthetic oligonucleotide
  Sense strand starting at position 1415 of SEQ ID NO: 4012
auaugugucuucccgaaag

SEQ ID NO: 312455 - RNA, 19 nt, Artificial Sequence
  Description of Artificial Sequence: Synthetic oligonucleotide
  Antisense strand to SEQ ID NO: 312454
cuuucgggaagacacauau

SEQ ID NO: 312456 - RNA, 19 nt, Artificial Sequence
  Description of Artificial Sequence: Synthetic oligonucleotide
  Sense strand starting at position 1417 of SEQ ID NO: 4012
augugucuucccgaaagau

SEQ ID NO: 312457 - RNA, 19 nt, Artificial Sequence
  Description of Artificial Sequence: Synthetic oligonucleotide
  Antisense strand to SEQ ID NO: 312456
aucuuucgggaagacacau

SEQ ID NO: 312458 - RNA, 19 nt, Artificial Sequence
  Description of Artificial Sequence: Synthetic oligonucleotide
  Sense strand starting at position 1426 of SEQ ID NO: 4012
cccgaaagaucuuuccuac

SEQ ID NO: 312459 - RNA, 19 nt, Artificial Sequence
  Description of Artificial Sequence: Synthetic oligonucleotide
  Antisense strand to SEQ ID NO: 312458
guaggaaagaucuuucggg

SEQ ID NO: 312460 - RNA, 19 nt, Artificial Sequence
  Description of Artificial Sequence: Synthetic oligonucleotide
  Sense strand starting at position 1526 of SEQ ID NO: 4012
uagaauguucccgaggguu

SEQ ID NO: 312461 - RNA, 19 nt, Artificial Sequence
  Description of Artificial Sequence: Synthetic oligonucleotide
  Antisense strand to SEQ ID NO: 312460
aacccucgggaacauucua

SEQ ID NO: 312462 - RNA, 19 nt, Artificial Sequence
  Description of Artificial Sequence: Synthetic oligonucleotide
  Sense strand starting at position 2386 of SEQ ID NO: 4012
agacguuugacagguuugu

SEQ ID NO: 312463 - RNA, 19 nt, Artificial Sequence
  Description of Artificial Sequence: Synthetic oligonucleotide
  Antisense strand to SEQ ID NO: 312462
acaaaccugucaaacgucu

SEQ ID NO: 312464 - RNA, 19 nt, Artificial Sequence
  Description of Artificial Sequence: Synthetic oligonucleotide
  Sense strand starting at position 2396 of SEQ ID NO: 4012
cagguuuguugacuguaaa

SEQ ID NO: 312465 - RNA, 19 nt, Artificial Sequence
  Description of Artificial Sequence: Synthetic oligonucleotide
  Antisense strand to SEQ ID NO: 312464
uuuacagucaacaaaccug

SEQ ID NO: 312466 - RNA, 19 nt, Artificial Sequence
  Description of Artificial Sequence: Synthetic oligonucleotide
  Sense strand starting at position 2397 of SEQ ID NO: 4012
agguuuguugacuguaaag

SEQ ID NO: 312467 - RNA, 19 nt, Artificial Sequence
  Description of Artificial Sequence: Synthetic oligonucleotide
  Antisense strand to SEQ ID NO: 312466
cuuuacagucaacaaaccu

SEQ ID NO: 312468 - RNA, 19 nt, Artificial Sequence
  Description of Artificial Sequence: Synthetic oligonucleotide
  Sense strand starting at position 2399 of SEQ ID NO: 4012
guuuguugacuguaaagag

SEQ ID NO: 312469 - RNA, 19 nt, Artificial Sequence
  Description of Artificial Sequence: Synthetic oligonucleotide
  Antisense strand to SEQ ID NO: 312468
cucuuuacagucaacaaac

SEQ ID NO: 312470 - RNA, 19 nt, Artificial Sequence
  Description of Artificial Sequence: Synthetic oligonucleotide
  Sense strand starting at position 2521 of SEQ ID NO: 4012
cggcgaggguugucaaacu

SEQ ID NO: 312471 - RNA, 19 nt, Artificial Sequence
  Description of Artificial Sequence: Synthetic oligonucleotide
  Antisense strand to SEQ ID NO: 312470
aguuugacaacccucgccg

SEQ ID NO: 312472 - RNA, 19 nt, Artificial Sequence
  Description of Artificial Sequence: Synthetic oligonucleotide
  Sense strand starting at position 2612 of SEQ ID NO: 4012
gucagccucuccuugaaga

SEQ ID NO: 312473 - RNA, 19 nt, Artificial Sequence
  Description of Artificial Sequence: Synthetic oligonucleotide
  Antisense strand to SEQ ID NO: 312472
ucuucaaggagaggcugac

SEQ ID NO: 312474 - RNA, 19 nt, Artificial Sequence
  Description of Artificial Sequence: Synthetic oligonucleotide
  Sense strand starting at position 2613 of SEQ ID NO: 4012
ucagccucuccuugaagaa

SEQ ID NO: 312475 - RNA, 19 nt, Artificial Sequence
  Description of Artificial Sequence: Synthetic oligonucleotide
  Antisense strand to SEQ ID NO: 312474
uucuucaaggagaggcuga

SEQ ID NO: 312476 - RNA, 19 nt, Artificial Sequence
  Description of Artificial Sequence: Synthetic oligonucleotide
  Sense strand starting at position 2814 of SEQ ID NO: 4012
gggucagaauucgcuuuag

SEQ ID NO: 312477 - RNA, 19 nt, Artificial Sequence
  Description of Artificial Sequence: Synthetic oligonucleotide
  Antisense strand to SEQ ID NO: 312476
cuaaagcgaauucugaccc

SEQ ID NO: 312478 - RNA, 19 nt, Artificial Sequence
  Description of Artificial Sequence: Synthetic oligonucleotide
  Sense strand starting at position 2919 of SEQ ID NO: 4012
ugagauggcguuuaucaga

SEQ ID NO: 312479 - RNA, 19 nt, Artificial Sequence
  Description of Artificial Sequence: Synthetic oligonucleotide
  Antisense strand to SEQ ID NO: 312478
ucugauaaacgccaucuca

SEQ ID NO: 312480 - RNA, 19 nt, Artificial Sequence
  Description of Artificial Sequence: Synthetic oligonucleotide
  Sense strand starting at position 2922 of SEQ ID NO: 4012
gauggcguuuaucagauuu

SEQ ID NO: 312481 - RNA, 19 nt, Artificial Sequence
  Description of Artificial Sequence: Synthetic oligonucleotide
  Antisense strand to SEQ ID NO: 312480
aaaucugauaaacgccauc

SEQ ID NO: 312482 - RNA, 19 nt, Artificial Sequence
  Description of Artificial Sequence: Synthetic oligonucleotide
  Sense strand starting at position 3118 of SEQ ID NO: 4012
gggacauucucccugccau

SEQ ID NO: 312483 - RNA, 19 nt, Artificial Sequence
  Description of Artificial Sequence: Synthetic oligonucleotide
  Antisense strand to SEQ ID NO: 312482
auggcagggagaauguccc

SEQ ID NO: 312484 - RNA, 19 nt, Artificial Sequence
  Description of Artificial Sequence: Synthetic oligonucleotide
  Sense strand starting at position 3119 of SEQ ID NO: 4012
ggacauucucccugccaua

SEQ ID NO: 312485 - RNA, 19 nt, Artificial Sequence
  Description of Artificial Sequence: Synthetic oligonucleotide
  Antisense strand to SEQ ID NO: 312484
uauggcagggagaaugucc

SEQ ID NO: 312486 - RNA, 19 nt, Artificial Sequence
  Description of Artificial Sequence: Synthetic oligonucleotide
  Sense strand starting at position 3225 of SEQ ID NO: 4012
aagaaagcuccugguuguu

SEQ ID NO: 312487 - RNA, 19 nt, Artificial Sequence
  Description of Artificial Sequence: Synthetic oligonucleotide
  Antisense strand to SEQ ID NO: 312486
aacaaccaggagcuuucuu

SEQ ID NO: 312488 - RNA, 19 nt, Artificial Sequence
  Description of Artificial Sequence: Synthetic oligonucleotide
  Sense strand starting at position 3300 of SEQ ID NO: 4012
ugaggucacuuccaaacaa

SEQ ID NO: 312489 - RNA, 19 nt, Artificial Sequence
  Description of Artificial Sequence: Synthetic oligonucleotide
  Antisense strand to SEQ ID NO: 312488
uuguuuggaagugaccuca

SEQ ID NO: 312490 - RNA, 19 nt, Artificial Sequence
  Description of Artificial Sequence: Synthetic oligonucleotide
  Sense strand starting at position 3613 of SEQ ID NO: 4012
uggcaagagucauagagag

SEQ ID NO: 312491 - RNA, 19 nt, Artificial Sequence
  Description of Artificial Sequence: Synthetic oligonucleotide
  Antisense strand to SEQ ID NO: 312490
cucucuaugacucuugcca

SEQ ID NO: 312492 - RNA, 19 nt, Artificial Sequence
  Description of Artificial Sequence: Synthetic oligonucleotide
  Sense strand starting at position 3957 of SEQ ID NO: 4012
cugcuacuguuauugcaga

SEQ ID NO: 312493 - RNA, 19 nt, Artificial Sequence
  Description of Artificial Sequence: Synthetic oligonucleotide
  Antisense strand to SEQ ID NO: 312492
ucugcaauaacaguagcag

SEQ ID NO: 312494 - RNA, 19 nt, Artificial Sequence
  Description of Artificial Sequence: Synthetic oligonucleotide
  Sense strand starting at position 3962 of SEQ ID NO: 4012
acuguuauugcagauuaug

SEQ ID NO: 312495 - RNA, 19 nt, Artificial Sequence
  Description of Artificial Sequence: Synthetic oligonucleotide
  Antisense strand to SEQ ID NO: 312494
cauaaucugcaauaacagu

SEQ ID NO: 312496 - RNA, 19 nt, Artificial Sequence
  Description of Artificial Sequence: Synthetic oligonucleotide
  Sense strand starting at position 3965 of SEQ ID NO: 4012
guuauugcagauuaugaaa

SEQ ID NO: 312497 - RNA, 19 nt, Artificial Sequence
  Description of Artificial Sequence: Synthetic oligonucleotide
  Antisense strand to SEQ ID NO: 312496
uuucauaaucugcaauaac

SEQ ID NO: 312498 - RNA, 19 nt, Artificial Sequence
  Description of Artificial Sequence: Synthetic oligonucleotide
  Sense strand starting at position 99 of SEQ ID NO: 4013
ucauuagaacgucauuauc

SEQ ID NO: 312499 - RNA, 19 nt, Artificial Sequence
  Description of Artificial Sequence: Synthetic oligonucleotide
  Antisense strand to SEQ ID NO: 312498
gauaaugacguucuaauga

SEQ ID NO: 312500 - RNA, 19 nt, Artificial Sequence
  Description of Artificial Sequence: Synthetic oligonucleotide
  Sense strand starting at position 101 of SEQ ID NO: 4013
auuagaacgucauuaucuu

SEQ ID NO: 312501 - RNA, 19 nt, Artificial Sequence
  Description of Artificial Sequence: Synthetic oligonucleotide
  Antisense strand to SEQ ID NO: 312500
aagauaaugacguucuaau

SEQ ID NO: 312502 - RNA, 19 nt, Artificial Sequence
  Description of Artificial Sequence: Synthetic oligonucleotide
  Sense strand starting at position 102 of SEQ ID NO: 4013
uuagaacgucauuaucuua

SEQ ID NO: 312503 - RNA, 19 nt, Artificial Sequence
  Description of Artificial Sequence: Synthetic oligonucleotide
  Antisense strand to SEQ ID NO: 312502
uaagauaaugacguucuaa

SEQ ID NO: 312504 - RNA, 19 nt, Artificial Sequence
  Description of Artificial Sequence: Synthetic oligonucleotide
  Sense strand starting at position 245 of SEQ ID NO: 4013
acuuauaaguacucaguau

SEQ ID NO: 312505 - RNA, 19 nt, Artificial Sequence
  Description of Artificial Sequence: Synthetic oligonucleotide
  Antisense strand to SEQ ID NO: 312504
auacugaguacuuauaagu

SEQ ID NO: 312506 - RNA, 19 nt, Artificial Sequence
  Description of Artificial Sequence: Synthetic oligonucleotide
  Sense strand starting at position 249 of SEQ ID NO: 4013
auaaguacucaguauguuc

SEQ ID NO: 312507 - RNA, 19 nt, Artificial Sequence
  Description of Artificial Sequence: Synthetic oligonucleotide
  Antisense strand to SEQ ID NO: 312506
gaacauacugaguacuuau

SEQ ID NO: 312508 - RNA, 19 nt, Artificial Sequence
  Description of Artificial Sequence: Synthetic oligonucleotide
  Sense strand starting at position 322 of SEQ ID NO: 4013
uaccgugaucgcugaauuc

SEQ ID NO: 312509 - RNA, 19 nt, Artificial Sequence
  Description of Artificial Sequence: Synthetic oligonucleotide
  Antisense strand to SEQ ID NO: 312508
gaauucagcgaucacggua

SEQ ID NO: 312510 - RNA, 19 nt, Artificial Sequence
  Description of Artificial Sequence: Synthetic oligonucleotide
  Sense strand starting at position 376 of SEQ ID NO: 4013
gcucaagaauaauucugga

SEQ ID NO: 312511 - RNA, 19 nt, Artificial Sequence
  Description of Artificial Sequence: Synthetic oligonucleotide
  Antisense strand to SEQ ID NO: 312510
uccagaauuauucuugagc

SEQ ID NO: 312512 - RNA, 19 nt, Artificial Sequence
  Description of Artificial Sequence: Synthetic oligonucleotide
  Sense strand starting at position 712 of SEQ ID NO: 4013
acuggaauacgcugaaaua

SEQ ID NO: 312513 - RNA, 19 nt, Artificial Sequence
  Description of Artificial Sequence: Synthetic oligonucleotide
  Antisense strand to SEQ ID NO: 312512
uauuucagcguauuccagu

SEQ ID NO: 312514 - RNA, 19 nt, Artificial Sequence
  Description of Artificial Sequence: Synthetic oligonucleotide
  Sense strand starting at position 722 of SEQ ID NO: 4013
gcugaaauaguuuggcuuu

SEQ ID NO: 312515 - RNA, 19 nt, Artificial Sequence
  Description of Artificial Sequence: Synthetic oligonucleotide
  Antisense strand to SEQ ID NO: 312514
aaagccaaacuauuucagc

SEQ ID NO: 312516 - RNA, 19 nt, Artificial Sequence
  Description of Artificial Sequence: Synthetic oligonucleotide
  Sense strand starting at position 755 of SEQ ID NO: 4013
uaaugaagacgcugacuuu

SEQ ID NO: 312517 - RNA, 19 nt, Artificial Sequence
  Description of Artificial Sequence: Synthetic oligonucleotide
  Antisense strand to SEQ ID NO: 312516
aaagucagcgucuucauua

SEQ ID NO: 312518 - RNA, 19 nt, Artificial Sequence
  Description of Artificial Sequence: Synthetic oligonucleotide
  Sense strand starting at position 962 of SEQ ID NO: 4013
cuguuugcuccugaggcuu

SEQ ID NO: 312519 - RNA, 19 nt, Artificial Sequence
  Description of Artificial Sequence: Synthetic oligonucleotide
  Antisense strand to SEQ ID NO: 312518
aagccucaggagcaaacag

SEQ ID NO: 312520 - RNA, 19 nt, Artificial Sequence
  Description of Artificial Sequence: Synthetic oligonucleotide
  Sense strand starting at position 1159 of SEQ ID NO: 4013
ugccucuugucagcaagau

SEQ ID NO: 312521 - RNA, 19 nt, Artificial Sequence
  Description of Artificial Sequence: Synthetic oligonucleotide
  Antisense strand to SEQ ID NO: 312520
aucuugcugacaagaggca

SEQ ID NO: 312522 - RNA, 19 nt, Artificial Sequence
  Description of Artificial Sequence: Synthetic oligonucleotide
  Sense strand starting at position 1160 of SEQ ID NO: 4013
gccucuugucagcaagauc

SEQ ID NO: 312523 - RNA, 19 nt, Artificial Sequence
  Description of Artificial Sequence: Synthetic oligonucleotide
  Antisense strand to SEQ ID NO: 312522
gaucuugcugacaagaggc

SEQ ID NO: 312524 - RNA, 19 nt, Artificial Sequence
  Description of Artificial Sequence: Synthetic oligonucleotide
  Sense strand starting at position 1187 of SEQ ID NO: 4013
uuccuacuagcgugaugau

SEQ ID NO: 312525 - RNA, 19 nt, Artificial Sequence
  Description of Artificial Sequence: Synthetic oligonucleotide
  Antisense strand to SEQ ID NO: 312524
aucaucacgcuaguaggaa

SEQ ID NO: 312526 - RNA, 19 nt, Artificial Sequence
  Description of Artificial Sequence: Synthetic oligonucleotide
  Sense strand starting at position 1188 of SEQ ID NO: 4013
uccuacuagcgugaugaua

SEQ ID NO: 312527 - RNA, 19 nt, Artificial Sequence
  Description of Artificial Sequence: Synthetic oligonucleotide
  Antisense strand to SEQ ID NO: 312526
uaucaucacgcuaguagga

SEQ ID NO: 312528 - RNA, 19 nt, Artificial Sequence
  Description of Artificial Sequence: Synthetic oligonucleotide
  Sense strand starting at position 1421 of SEQ ID NO: 4013
ugccaauuauugccugaua

SEQ ID NO: 312529 - RNA, 19 nt, Artificial Sequence
  Description of Artificial Sequence: Synthetic oligonucleotide
  Antisense strand to SEQ ID NO: 312528
uaucaggcaauaauuggca

SEQ ID NO: 312530 - RNA, 19 nt, Artificial Sequence
  Description of Artificial Sequence: Synthetic oligonucleotide
  Sense strand starting at position 1422 of SEQ ID NO: 4013
gccaauuauugccugauag

SEQ ID NO: 312531 - RNA, 19 nt, Artificial Sequence
  Description of Artificial Sequence: Synthetic oligonucleotide
  Antisense strand to SEQ ID NO: 312530
cuaucaggcaauaauuggc

SEQ ID NO: 312532 - RNA, 19 nt, Artificial Sequence
  Description of Artificial Sequence: Synthetic oligonucleotide
  Sense strand starting at position 1423 of SEQ ID NO: 4013
ccaauuauugccugauagg

SEQ ID NO: 312533 - RNA, 19 nt, Artificial Sequence
  Description of Artificial Sequence: Synthetic oligonucleotide
  Antisense strand to SEQ ID NO: 312532
ccuaucaggcaauaauugg

SEQ ID NO: 312534 - RNA, 19 nt, Artificial Sequence
  Description of Artificial Sequence: Synthetic oligonucleotide
  Sense strand starting at position 1424 of SEQ ID NO: 4013
caauuauugccugauaggu

SEQ ID NO: 312535 - RNA, 19 nt, Artificial Sequence
  Description of Artificial Sequence: Synthetic oligonucleotide
  Antisense strand to SEQ ID NO: 312534
accuaucaggcaauaauug

SEQ ID NO: 312536 - RNA, 19 nt, Artificial Sequence
  Description of Artificial Sequence: Synthetic oligonucleotide
  Sense strand starting at position 1473 of SEQ ID NO: 4013
gaucaaagaugucuuugca

SEQ ID NO: 312537 - RNA, 19 nt, Artificial Sequence
  Description of Artificial Sequence: Synthetic oligonucleotide
  Antisense strand to SEQ ID NO: 312536
ugcaaagacaucuuugauc

SEQ ID NO: 312538 - RNA, 19 nt, Artificial Sequence
  Description of Artificial Sequence: Synthetic oligonucleotide
  Sense strand starting at position 1476 of SEQ ID NO: 4013
caaagaugucuuugcaacg

SEQ ID NO: 312539 - RNA, 19 nt, Artificial Sequence
  Description of Artificial Sequence: Synthetic oligonucleotide
  Antisense strand to SEQ ID NO: 312538
cguugcaaagacaucuuug

SEQ ID NO: 312540 - RNA, 19 nt, Artificial Sequence
  Description of Artificial Sequence: Synthetic oligonucleotide
  Sense strand starting at position 1826 of SEQ ID NO: 4013
gugugcuuuggcuucccaa

SEQ ID NO: 312541 - RNA, 19 nt, Artificial Sequence
  Description of Artificial Sequence: Synthetic oligonucleotide
  Antisense strand to SEQ ID NO: 312540
uugggaagccaaagcacac

SEQ ID NO: 312542 - RNA, 19 nt, Artificial Sequence
  Description of Artificial Sequence: Synthetic oligonucleotide
  Sense strand starting at position 2206 of SEQ ID NO: 4013
guuucugugagaggucaga

SEQ ID NO: 312543 - RNA, 19 nt, Artificial Sequence
  Description of Artificial Sequence: Synthetic oligonucleotide
  Antisense strand to SEQ ID NO: 312542
ucugaccucucacagaaac

SEQ ID NO: 312544 - RNA, 19 nt, Artificial Sequence
  Description of Artificial Sequence: Synthetic oligonucleotide
  Sense strand starting at position 2277 of SEQ ID NO: 4013
ggaccaaccugucuccuaa

SEQ ID NO: 312545 - RNA, 19 nt, Artificial Sequence
  Description of Artificial Sequence: Synthetic oligonucleotide
  Antisense strand to SEQ ID NO: 312544
uuaggagacagguuggucc

SEQ ID NO: 312546 - RNA, 19 nt, Artificial Sequence
  Description of Artificial Sequence: Synthetic oligonucleotide
  Sense strand starting at position 2336 of SEQ ID NO: 4013
cgccuugcauuugaacaga

SEQ ID NO: 312547 - RNA, 19 nt, Artificial Sequence
  Description of Artificial Sequence: Synthetic oligonucleotide
  Antisense strand to SEQ ID NO: 312546
ucuguucaaaugcaaggcg

SEQ ID NO: 312548 - RNA, 19 nt, Artificial Sequence
  Description of Artificial Sequence: Synthetic oligonucleotide
  Sense strand starting at position 2374 of SEQ ID NO: 4013
acacaagaauuguaucaag

SEQ ID NO: 312549 - RNA, 19 nt, Artificial Sequence
  Description of Artificial Sequence: Synthetic oligonucleotide
  Antisense strand to SEQ ID NO: 312548
cuugauacaauucuugugu

SEQ ID NO: 312550 - RNA, 19 nt, Artificial Sequence
  Description of Artificial Sequence: Synthetic oligonucleotide
  Sense strand starting at position 2478 of SEQ ID NO: 4013
cuaugaagugaauagcuua

SEQ ID NO: 312551 - RNA, 19 nt, Artificial Sequence
  Description of Artificial Sequence: Synthetic oligonucleotide
  Antisense strand to SEQ ID NO: 312550
uaagcuauucacuucauag

SEQ ID NO: 312552 - RNA, 19 nt, Artificial Sequence
  Description of Artificial Sequence: Synthetic oligonucleotide
  Sense strand starting at position 2481 of SEQ ID NO: 4013
ugaagugaauagcuuagaa

SEQ ID NO: 312553 - RNA, 19 nt, Artificial Sequence
  Description of Artificial Sequence: Synthetic oligonucleotide
  Antisense strand to SEQ ID NO: 312552
uucuaagcuauucacuuca

SEQ ID NO: 312554 - RNA, 19 nt, Artificial Sequence
  Description of Artificial Sequence: Synthetic oligonucleotide
  Sense strand starting at position 2498 of SEQ ID NO: 4013
aaauguaugucguccaugu

SEQ ID NO: 312555 - RNA, 19 nt, Artificial Sequence
  Description of Artificial Sequence: Synthetic oligonucleotide
  Antisense strand to SEQ ID NO: 312554
acauggacgacauacauuu

SEQ ID NO: 312556 - RNA, 19 nt, Artificial Sequence
  Description of Artificial Sequence: Synthetic oligonucleotide
  Sense strand starting at position 2500 of SEQ ID NO: 4013
auguaugucguccauguau

SEQ ID NO: 312557 - RNA, 19 nt, Artificial Sequence
  Description of Artificial Sequence: Synthetic oligonucleotide
  Antisense strand to SEQ ID NO: 312556
auacauggacgacauacau

SEQ ID NO: 312558 - RNA, 19 nt, Artificial Sequence
  Description of Artificial Sequence: Synthetic oligonucleotide
  Sense strand starting at position 2521 of SEQ ID NO: 4013
uaguguaaguuauuguagu

SEQ ID NO: 312559 - RNA, 19 nt, Artificial Sequence
  Description of Artificial Sequence: Synthetic oligonucleotide
  Antisense strand to SEQ ID NO: 312558
acuacaauaacuuacacua

SEQ ID NO: 312560 - RNA, 19 nt, Artificial Sequence
  Description of Artificial Sequence: Synthetic oligonucleotide
  Sense strand starting at position 2766 of SEQ ID NO: 4013
augaaacuaagguguugau

SEQ ID NO: 312561 - RNA, 19 nt, Artificial Sequence
  Description of Artificial Sequence: Synthetic oligonucleotide
  Antisense strand to SEQ ID NO: 312560
aucaacaccuuaguuucau

SEQ ID NO: 312562 - RNA, 19 nt, Artificial Sequence
  Description of Artificial Sequence: Synthetic oligonucleotide
  Sense strand starting at position 2825 of SEQ ID NO: 4013
gucaaauuguguucuggag

SEQ ID NO: 312563 - RNA, 19 nt, Artificial Sequence
  Description of Artificial Sequence: Synthetic oligonucleotide
  Antisense strand to SEQ ID NO: 312562
cuccagaacacaauuugac

SEQ ID NO: 312564 - RNA, 19 nt, Artificial Sequence
  Description of Artificial Sequence: Synthetic oligonucleotide
  Sense strand starting at position 2857 of SEQ ID NO: 4013
augaauguuugacaucaau

SEQ ID NO: 312565 - RNA, 19 nt, Artificial Sequence
  Description of Artificial Sequence: Synthetic oligonucleotide
  Antisense strand to SEQ ID NO: 312564
auugaugucaaacauucau

SEQ ID NO: 312566 - RNA, 19 nt, Artificial Sequence
  Description of Artificial Sequence: Synthetic oligonucleotide
  Sense strand starting at position 2863 of SEQ ID NO: 4013
guuugacaucaauguacau

SEQ ID NO: 312567 - RNA, 19 nt, Artificial Sequence
  Description of Artificial Sequence: Synthetic oligonucleotide
  Antisense strand to SEQ ID NO: 312566
auguacauugaugucaaac

SEQ ID NO: 312568 - RNA, 19 nt, Artificial Sequence
  Description of Artificial Sequence: Synthetic oligonucleotide
  Sense strand starting at position 3061 of SEQ ID NO: 4013
cugaaaucuuaaguacugu

SEQ ID NO: 312569 - RNA, 19 nt, Artificial Sequence
  Description of Artificial Sequence: Synthetic oligonucleotide
  Antisense strand to SEQ ID NO: 312568
acaguacuuaagauuucag

SEQ ID NO: 312570 - RNA, 19 nt, Artificial Sequence
  Description of Artificial Sequence: Synthetic oligonucleotide
  Sense strand starting at position 3320 of SEQ ID NO: 4013
ggagcaggcauguagaaau

SEQ ID NO: 312571 - RNA, 19 nt, Artificial Sequence
  Description of Artificial Sequence: Synthetic oligonucleotide
  Antisense strand to SEQ ID NO: 312570
auuucuacaugccugcucc

SEQ ID NO: 312572 - RNA, 19 nt, Artificial Sequence
  Description of Artificial Sequence: Synthetic oligonucleotide
  Sense strand starting at position 3330 of SEQ ID NO: 4013
uguagaaauguuuacaggu

SEQ ID NO: 312573 - RNA, 19 nt, Artificial Sequence
  Description of Artificial Sequence: Synthetic oligonucleotide
  Antisense strand to SEQ ID NO: 312572
accuguaaacauuucuaca

SEQ ID NO: 312574 - RNA, 19 nt, Artificial Sequence
  Description of Artificial Sequence: Synthetic oligonucleotide
  Sense strand starting at position 3346 of SEQ ID NO: 4013
gguuuaugguccucacucu

SEQ ID NO: 312575 - RNA, 19 nt, Artificial Sequence
  Description of Artificial Sequence: Synthetic oligonucleotide
  Antisense strand to SEQ ID NO: 312574
agagugaggaccauaaacc

SEQ ID NO: 312576 - RNA, 19 nt, Artificial Sequence
  Description of Artificial Sequence: Synthetic oligonucleotide
  Sense strand starting at position 3608 of SEQ ID NO: 4013
gcgagagaugcuugaaucu

SEQ ID NO: 312577 - RNA, 19 nt, Artificial Sequence
  Description of Artificial Sequence: Synthetic oligonucleotide
  Antisense strand to SEQ ID NO: 312576
agauucaagcaucucucgc

SEQ ID NO: 312578 - RNA, 19 nt, Artificial Sequence
  Description of Artificial Sequence: Synthetic oligonucleotide
  Sense strand starting at position 9 of SEQ ID NO: 4014
auuguuuacccaggaauuc

SEQ ID NO: 312579 - RNA, 19 nt, Artificial Sequence
  Description of Artificial Sequence: Synthetic oligonucleotide
  Antisense strand to SEQ ID NO: 312578
gaauuccuggguaaacaau

SEQ ID NO: 312580 - RNA, 19 nt, Artificial Sequence
  Description of Artificial Sequence: Synthetic oligonucleotide
  Sense strand starting at position 183 of SEQ ID NO: 4014
auaauaggauuugauguga

SEQ ID NO: 312581 - RNA, 19 nt, Artificial Sequence
  Description of Artificial Sequence: Synthetic oligonucleotide
  Antisense strand to SEQ ID NO: 312580
ucacaucaaauccuauuau

SEQ ID NO: 312582 - RNA, 19 nt, Artificial Sequence
  Description of Artificial Sequence: Synthetic oligonucleotide
  Sense strand starting at position 321 of SEQ ID NO: 4014
gcaagccaucccugaagaa

SEQ ID NO: 312583 - RNA, 19 nt, Artificial Sequence
  Description of Artificial Sequence: Synthetic oligonucleotide
  Antisense strand to SEQ ID NO: 312582
uucuucagggauggcuugc

SEQ ID NO: 312584 - RNA, 19 nt, Artificial Sequence
  Description of Artificial Sequence: Synthetic oligonucleotide
  Sense strand starting at position 368 of SEQ ID NO: 4014
accaaugguuugguuuaau

SEQ ID NO: 312585 - RNA, 19 nt, Artificial Sequence
  Description of Artificial Sequence: Synthetic oligonucleotide
  Antisense strand to SEQ ID NO: 312584
auuaaaccaaaccauuggu

SEQ ID NO: 312586 - RNA, 19 nt, Artificial Sequence
  Description of Artificial Sequence: Synthetic oligonucleotide
  Sense strand starting at position 414 of SEQ ID NO: 4014
gaccuuggacgucauugaa

SEQ ID NO: 312587 - RNA, 19 nt, Artificial Sequence
  Description of Artificial Sequence: Synthetic oligonucleotide
  Antisense strand to SEQ ID NO: 312586
uucaaugacguccaagguc

SEQ ID NO: 312588 - RNA, 19 nt, Artificial Sequence
  Description of Artificial Sequence: Synthetic oligonucleotide
  Sense strand starting at position 418 of SEQ ID NO: 4014
uuggacgucauugaaucua

SEQ ID NO: 312589 - RNA, 19 nt, Artificial Sequence
  Description of Artificial Sequence: Synthetic oligonucleotide
  Antisense strand to SEQ ID NO: 312588
uagauucaaugacguccaa

SEQ ID NO: 312590 - RNA, 19 nt, Artificial Sequence
  Description of Artificial Sequence: Synthetic oligonucleotide
  Sense strand starting at position 544 of SEQ ID NO: 4014
guaauugcugaaggaaaga

SEQ ID NO: 312591 - RNA, 19 nt, Artificial Sequence
  Description of Artificial Sequence: Synthetic oligonucleotide
  Antisense strand to SEQ ID NO: 312590
ucuuuccuucagcaauuac

SEQ ID NO: 312592 - RNA, 19 nt, Artificial Sequence
  Description of Artificial Sequence: Synthetic oligonucleotide
  Sense strand starting at position 557 of SEQ ID NO: 4014
gaaagaaguuguuugaaau

SEQ ID NO: 312593 - RNA, 19 nt, Artificial Sequence
  Description of Artificial Sequence: Synthetic oligonucleotide
  Antisense strand to SEQ ID NO: 312592
auuucaaacaacuucuuuc

SEQ ID NO: 312594 - RNA, 19 nt, Artificial Sequence
  Description of Artificial Sequence: Synthetic oligonucleotide
  Sense strand starting at position 558 of SEQ ID NO: 4014
aaagaaguuguuugaaaug

SEQ ID NO: 312595 - RNA, 19 nt, Artificial Sequence
  Description of Artificial Sequence: Synthetic oligonucleotide
  Antisense strand to SEQ ID NO: 312594
cauuucaaacaacuucuuu

SEQ ID NO: 312596 - RNA, 19 nt, Artificial Sequence
  Description of Artificial Sequence: Synthetic oligonucleotide
  Sense strand starting at position 568 of SEQ ID NO: 4014
uuugaaaugcuggaugcaa

SEQ ID NO: 312597 - RNA, 19 nt, Artificial Sequence
  Description of Artificial Sequence: Synthetic oligonucleotide
  Antisense strand to SEQ ID NO: 312596
uugcauccagcauuucaaa

SEQ ID NO: 312598 - RNA, 19 nt, Artificial Sequence
  Description of Artificial Sequence: Synthetic oligonucleotide
  Sense strand starting at position 830 of SEQ ID NO: 4014
uccagugaagcacauuauu

SEQ ID NO: 312599 - RNA, 19 nt, Artificial Sequence
  Description of Artificial Sequence: Synthetic oligonucleotide
  Antisense strand to SEQ ID NO: 312598
aauaaugugcuucacugga

SEQ ID NO: 312600 - RNA, 19 nt, Artificial Sequence
  Description of Artificial Sequence: Synthetic oligonucleotide
  Sense strand starting at position 833 of SEQ ID NO: 4014
agugaagcacauuauuguu

SEQ ID NO: 312601 - RNA, 19 nt, Artificial Sequence
  Description of Artificial Sequence: Synthetic oligonucleotide
  Antisense strand to SEQ ID NO: 312600
aacaauaaugugcuucacu

SEQ ID NO: 312602 - RNA, 19 nt, Artificial Sequence
  Description of Artificial Sequence: Synthetic oligonucleotide
  Sense strand starting at position 1049 of SEQ ID NO: 4014
ggaaguugaacagguauga

SEQ ID NO: 312603 - RNA, 19 nt, Artificial Sequence
  Description of Artificial Sequence: Synthetic oligonucleotide
  Antisense strand to SEQ ID NO: 312602
ucauaccuguucaacuucc

SEQ ID NO: 312604 - RNA, 19 nt, Artificial Sequence
  Description of Artificial Sequence: Synthetic oligonucleotide
  Sense strand starting at position 1099 of SEQ ID NO: 4014
gaggcuagugaccauguaa

SEQ ID NO: 312605 - RNA, 19 nt, Artificial Sequence
  Description of Artificial Sequence: Synthetic oligonucleotide
  Antisense strand to SEQ ID NO: 312604
uuacauggucacuagccuc

SEQ ID NO: 312606 - RNA, 19 nt, Artificial Sequence
  Description of Artificial Sequence: Synthetic oligonucleotide
  Sense strand starting at position 1359 of SEQ ID NO: 4014
gucaccucacagugaauca

SEQ ID NO: 312607 - RNA, 19 nt, Artificial Sequence
  Description of Artificial Sequence: Synthetic oligonucleotide
  Antisense strand to SEQ ID NO: 312606
ugauucacugugaggugac

SEQ ID NO: 312608 - RNA, 19 nt, Artificial Sequence
  Description of Artificial Sequence: Synthetic oligonucleotide
  Sense strand starting at position 1482 of SEQ ID NO: 4014
uaaagagagcaacguaaau

SEQ ID NO: 312609 - RNA, 19 nt, Artificial Sequence
  Description of Artificial Sequence: Synthetic oligonucleotide
  Antisense strand to SEQ ID NO: 312608
auuuacguugcucucuuua

SEQ ID NO: 312610 - RNA, 19 nt, Artificial Sequence
  Description of Artificial Sequence: Synthetic oligonucleotide
  Sense strand starting at position 1526 of SEQ ID NO: 4014
gaaauagaaguguggugau

SEQ ID NO: 312611 - RNA, 19 nt, Artificial Sequence
  Description of Artificial Sequence: Synthetic oligonucleotide
  Antisense strand to SEQ ID NO: 312610
aucaccacacuucuauuuc

SEQ ID NO: 312612 - RNA, 19 nt, Artificial Sequence
  Description of Artificial Sequence: Synthetic oligonucleotide
  Sense strand starting at position 1739 of SEQ ID NO: 4014
acaccuuuaaagcgagaga

SEQ ID NO: 312613 - RNA, 19 nt, Artificial Sequence
  Description of Artificial Sequence: Synthetic oligonucleotide
  Antisense strand to SEQ ID NO: 312612
ucucucgcuuuaaaggugu

SEQ ID NO: 312614 - RNA, 19 nt, Artificial Sequence
  Description of Artificial Sequence: Synthetic oligonucleotide
  Sense strand starting at position 1802 of SEQ ID NO: 4014
aagauauggcucugccaga

SEQ ID NO: 312615 - RNA, 19 nt, Artificial Sequence
  Description of Artificial Sequence: Synthetic oligonucleotide
  Antisense strand to SEQ ID NO: 312614
ucuggcagagccauaucuu

SEQ ID NO: 312616 - RNA, 19 nt, Artificial Sequence
  Description of Artificial Sequence: Synthetic oligonucleotide
  Sense strand starting at position 1902 of SEQ ID NO: 4014
accaauuugucugcuguca

SEQ ID NO: 312617 - RNA, 19 nt, Artificial Sequence
  Description of Artificial Sequence: Synthetic oligonucleotide
  Antisense strand to SEQ ID NO: 312616
ugacagcagacaaauuggu

SEQ ID NO: 312618 - RNA, 19 nt, Artificial Sequence
  Description of Artificial Sequence: Synthetic oligonucleotide
  Sense strand starting at position 2073 of SEQ ID NO: 4014
caugaagaguucuuggcaa

SEQ ID NO: 312619 - RNA, 19 nt, Artificial Sequence
  Description of Artificial Sequence: Synthetic oligonucleotide
  Antisense strand to SEQ ID NO: 312618
uugccaagaacucuucaug

SEQ ID NO: 312620 - RNA, 19 nt, Artificial Sequence
  Description of Artificial Sequence: Synthetic oligonucleotide
  Sense strand starting at position 2099 of SEQ ID NO: 4014
ugguuuacauaaucaagga

SEQ ID NO: 312621 - RNA, 19 nt, Artificial Sequence
  Description of Artificial Sequence: Synthetic oligonucleotide
  Antisense strand to SEQ ID NO: 312620
uccuugauuauguaaacca

SEQ ID NO: 312622 - RNA, 19 nt, Artificial Sequence
  Description of Artificial Sequence: Synthetic oligonucleotide
  Sense strand starting at position 2185 of SEQ ID NO: 4014
uccagauaucaguaagguu

SEQ ID NO: 312623 - RNA, 19 nt, Artificial Sequence
  Description of Artificial Sequence: Synthetic oligonucleotide
  Antisense strand to SEQ ID NO: 312622
aaccuuacugauaucugga

SEQ ID NO: 312624 - RNA, 19 nt, Artificial Sequence
  Description of Artificial Sequence: Synthetic oligonucleotide
  Sense strand starting at position 2308 of SEQ ID NO: 4014
aaaggacuauucucagagu

SEQ ID NO: 312625 - RNA, 19 nt, Artificial Sequence
  Description of Artificial Sequence: Synthetic oligonucleotide
  Antisense strand to SEQ ID NO: 312624
acucugagaauaguccuuu

SEQ ID NO: 312626 - RNA, 19 nt, Artificial Sequence
  Description of Artificial Sequence: Synthetic oligonucleotide
  Sense strand starting at position 2409 of SEQ ID NO: 4014
gcaugaaugcaagagucau

SEQ ID NO: 312627 - RNA, 19 nt, Artificial Sequence
  Description of Artificial Sequence: Synthetic oligonucleotide
  Antisense strand to SEQ ID NO: 312626
augacucuugcauucaugc

SEQ ID NO: 312628 - RNA, 19 nt, Artificial Sequence
  Description of Artificial Sequence: Synthetic oligonucleotide
  Sense strand starting at position 2755 of SEQ ID NO: 4014
uugucagaguaacucauaa

SEQ ID NO: 312629 - RNA, 19 nt, Artificial Sequence
  Description of Artificial Sequence: Synthetic oligonucleotide
  Antisense strand to SEQ ID NO: 312628
uuaugaguuacucugacaa

SEQ ID NO: 312630 - RNA, 19 nt, Artificial Sequence
  Description of Artificial Sequence: Synthetic oligonucleotide
  Sense strand starting at position 2816 of SEQ ID NO: 4014
auagucauaggcuacagua

SEQ ID NO: 312631 - RNA, 19 nt, Artificial Sequence
  Description of Artificial Sequence: Synthetic oligonucleotide
  Antisense strand to SEQ ID NO: 312630
uacuguagccuaugacuau

SEQ ID NO: 312632 - RNA, 19 nt, Artificial Sequence
  Description of Artificial Sequence: Synthetic oligonucleotide
  Sense strand starting at position 2870 of SEQ ID NO: 4014
auuaacucucaguggaaac

SEQ ID NO: 312633 - RNA, 19 nt, Artificial Sequence
  Description of Artificial Sequence: Synthetic oligonucleotide
  Antisense strand to SEQ ID NO: 312632
guuuccacugagaguuaau

SEQ ID NO: 312634 - RNA, 19 nt, Artificial Sequence
  Description of Artificial Sequence: Synthetic oligonucleotide
  Sense strand starting at position 3060 of SEQ ID NO: 4014
uguaaugacccauacagug

SEQ ID NO: 312635 - RNA, 19 nt, Artificial Sequence
  Description of Artificial Sequence: Synthetic oligonucleotide
  Antisense strand to SEQ ID NO: 312634
cacuguaugggucauuaca

SEQ ID NO: 312636 - RNA, 19 nt, Artificial Sequence
  Description of Artificial Sequence: Synthetic oligonucleotide
  Sense strand starting at position 3147 of SEQ ID NO: 4014
aggaguauuaggcagaugu

SEQ ID NO: 312637 - RNA, 19 nt, Artificial Sequence
  Description of Artificial Sequence: Synthetic oligonucleotide
  Antisense strand to SEQ ID NO: 312636
acaucugccuaauacuccu

SEQ ID NO: 312638 - RNA, 19 nt, Artificial Sequence
  Description of Artificial Sequence: Synthetic oligonucleotide
  Sense strand starting at position 3149 of SEQ ID NO: 4014
gaguauuaggcagauguac

SEQ ID NO: 312639 - RNA, 19 nt, Artificial Sequence
  Description of Artificial Sequence: Synthetic oligonucleotide
  Antisense strand to SEQ ID NO: 312638
guacaucugccuaauacuc

SEQ ID NO: 312640 - RNA, 19 nt, Artificial Sequence
  Description of Artificial Sequence: Synthetic oligonucleotide
  Sense strand starting at position 3157 of SEQ ID NO: 4014
ggcagauguacuugauaua

SEQ ID NO: 312641 - RNA, 19 nt, Artificial Sequence
  Description of Artificial Sequence: Synthetic oligonucleotide
  Antisense strand to SEQ ID NO: 312640
uauaucaaguacaucugcc

SEQ ID NO: 312642 - RNA, 19 nt, Artificial Sequence
  Description of Artificial Sequence: Synthetic oligonucleotide
  Sense strand starting at position 3158 of SEQ ID NO: 4014
gcagauguacuugauauag

SEQ ID NO: 312643 - RNA, 19 nt, Artificial Sequence
  Description of Artificial Sequence: Synthetic oligonucleotide
  Antisense strand to SEQ ID NO: 312642
cuauaucaaguacaucugc

SEQ ID NO: 312644 - RNA, 19 nt, Artificial Sequence
  Description of Artificial Sequence: Synthetic oligonucleotide
  Sense strand starting at position 3168 of SEQ ID NO: 4014
uugauauagcaacagcuua

SEQ ID NO: 312645 - RNA, 19 nt, Artificial Sequence
  Description of Artificial Sequence: Synthetic oligonucleotide
  Antisense strand to SEQ ID NO: 312644
uaagcuguugcuauaucaa

SEQ ID NO: 312646 - RNA, 19 nt, Artificial Sequence
  Description of Artificial Sequence: Synthetic oligonucleotide
  Sense strand starting at position 3276 of SEQ ID NO: 4014
cuuguugguugaccaaaua

SEQ ID NO: 312647 - RNA, 19 nt, Artificial Sequence
  Description of Artificial Sequence: Synthetic oligonucleotide
  Antisense strand to SEQ ID NO: 312646
uauuuggucaaccaacaag

SEQ ID NO: 312648 - RNA, 19 nt, Artificial Sequence
  Description of Artificial Sequence: Synthetic oligonucleotide
  Sense strand starting at position 3325 of SEQ ID NO: 4014
agccuugaaucccugacaa

SEQ ID NO: 312649 - RNA, 19 nt, Artificial Sequence
  Description of Artificial Sequence: Synthetic oligonucleotide
  Antisense strand to SEQ ID NO: 312648
uugucagggauucaaggcu

SEQ ID NO: 312650 - RNA, 19 nt, Artificial Sequence
  Description of Artificial Sequence: Synthetic oligonucleotide
  Sense strand starting at position 3385 of SEQ ID NO: 4014
cugggaugguuggucacua

SEQ ID NO: 312651 - RNA, 19 nt, Artificial Sequence
  Description of Artificial Sequence: Synthetic oligonucleotide
  Antisense strand to SEQ ID NO: 312650
uagugaccaaccaucccag

SEQ ID NO: 312652 - RNA, 19 nt, Artificial Sequence
  Description of Artificial Sequence: Synthetic oligonucleotide
  Sense strand starting at position 3386 of SEQ ID NO: 4014
ugggaugguuggucacuau

SEQ ID NO: 312653 - RNA, 19 nt, Artificial Sequence
  Description of Artificial Sequence: Synthetic oligonucleotide
  Antisense strand to SEQ ID NO: 312652
auagugaccaaccauccca

SEQ ID NO: 312654 - RNA, 19 nt, Artificial Sequence
  Description of Artificial Sequence: Synthetic oligonucleotide
  Sense strand starting at position 3389 of SEQ ID NO: 4014
gaugguuggucacuauaaa

SEQ ID NO: 312655 - RNA, 19 nt, Artificial Sequence
  Description of Artificial Sequence: Synthetic oligonucleotide
  Antisense strand to SEQ ID NO: 312654
uuuauagugaccaaccauc

SEQ ID NO: 312656 - RNA, 19 nt, Artificial Sequence
  Description of Artificial Sequence: Synthetic oligonucleotide
  Sense strand starting at position 3919 of SEQ ID NO: 4014
uggagaaauucugcccuga

SEQ ID NO: 312657 - RNA, 19 nt, Artificial Sequence
  Description of Artificial Sequence: Synthetic oligonucleotide
  Antisense strand to SEQ ID NO: 312656
ucagggcagaauuucucca

SEQ ID NO: 312658 - RNA, 19 nt, Artificial Sequence
  Description of Artificial Sequence: Synthetic oligonucleotide
  Sense strand starting at position 19 of SEQ ID NO: 4015
gcaccaacaucaucugaga

SEQ ID NO: 312659 - RNA, 19 nt, Artificial Sequence
  Description of Artificial Sequence: Synthetic oligonucleotide
  Antisense strand to SEQ ID NO: 312658
ucucagaugauguuggugc

SEQ ID NO: 312660 - RNA, 19 nt, Artificial Sequence
  Description of Artificial Sequence: Synthetic oligonucleotide
  Sense strand starting at position 32 of SEQ ID NO: 4015
cugagauguccuuagcacu

SEQ ID NO: 312661 - RNA, 19 nt, Artificial Sequence
  Description of Artificial Sequence: Synthetic oligonucleotide
  Antisense strand to SEQ ID NO: 312660
agugcuaaggacaucucag

SEQ ID NO: 312662 - RNA, 19 nt, Artificial Sequence
  Description of Artificial Sequence: Synthetic oligonucleotide
  Sense strand starting at position 574 of SEQ ID NO: 4015
ucaauaccugcuugaggau

SEQ ID NO: 312663 - RNA, 19 nt, Artificial Sequence
  Description of Artificial Sequence: Synthetic oligonucleotide
  Antisense strand to SEQ ID NO: 312662
auccucaagcagguauuga

SEQ ID NO: 312664 - RNA, 19 nt, Artificial Sequence
  Description of Artificial Sequence: Synthetic oligonucleotide
  Sense strand starting at position 594 of SEQ ID NO: 4015
gcuugcuauggagaagaau

SEQ ID NO: 312665 - RNA, 19 nt, Artificial Sequence
  Description of Artificial Sequence: Synthetic oligonucleotide
  Antisense strand to SEQ ID NO: 312664
auucuucuccauagcaagc

SEQ ID NO: 312666 - RNA, 19 nt, Artificial Sequence
  Description of Artificial Sequence: Synthetic oligonucleotide
  Sense strand starting at position 1310 of SEQ ID NO: 4015
cuuccauuugucugcuaga

SEQ ID NO: 312667 - RNA, 19 nt, Artificial Sequence
  Description of Artificial Sequence: Synthetic oligonucleotide
  Antisense strand to SEQ ID NO: 312666
ucuagcagacaaauggaag

SEQ ID NO: 312668 - RNA, 19 nt, Artificial Sequence
  Description of Artificial Sequence: Synthetic oligonucleotide
  Sense strand starting at position 1311 of SEQ ID NO: 4015
uuccauuugucugcuagau

SEQ ID NO: 312669 - RNA, 19 nt, Artificial Sequence
  Description of Artificial Sequence: Synthetic oligonucleotide
  Antisense strand to SEQ ID NO: 312668
aucuagcagacaaauggaa

SEQ ID NO: 312670 - RNA, 19 nt, Artificial Sequence
  Description of Artificial Sequence: Synthetic oligonucleotide
  Sense strand starting at position 1523 of SEQ ID NO: 4015
gagaauugcccagaugcuu

SEQ ID NO: 312671 - RNA, 19 nt, Artificial Sequence
  Description of Artificial Sequence: Synthetic oligonucleotide
  Antisense strand to SEQ ID NO: 312670
aagcaucugggcaauucuc

SEQ ID NO: 312672 - RNA, 19 nt, Artificial Sequence
  Description of Artificial Sequence: Synthetic oligonucleotide
  Sense strand starting at position 1576 of SEQ ID NO: 4015
cccagaagucccugacuau

SEQ ID NO: 312673 - RNA, 19 nt, Artificial Sequence
  Description of Artificial Sequence: Synthetic oligonucleotide
  Antisense strand to SEQ ID NO: 312672
auagucagggacuucuggg

SEQ ID NO: 312674 - RNA, 19 nt, Artificial Sequence
  Description of Artificial Sequence: Synthetic oligonucleotide
  Sense strand starting at position 1577 of SEQ ID NO: 4015
ccagaagucccugacuauc

SEQ ID NO: 312675 - RNA, 19 nt, Artificial Sequence
  Description of Artificial Sequence: Synthetic oligonucleotide
  Antisense strand to SEQ ID NO: 312674
gauagucagggacuucugg

SEQ ID NO: 312676 - RNA, 19 nt, Artificial Sequence
  Description of Artificial Sequence: Synthetic oligonucleotide
  Sense strand starting at position 1579 of SEQ ID NO: 4015
agaagucccugacuaucuu

SEQ ID NO: 312677 - RNA, 19 nt, Artificial Sequence
  Description of Artificial Sequence: Synthetic oligonucleotide
  Antisense strand to SEQ ID NO: 312676
aagauagucagggacuucu

SEQ ID NO: 312678 - RNA, 19 nt, Artificial Sequence
  Description of Artificial Sequence: Synthetic oligonucleotide
  Sense strand starting at position 1866 of SEQ ID NO: 4015
caaagagaagcauguaugu

SEQ ID NO: 312679 - RNA, 19 nt, Artificial Sequence
  Description of Artificial Sequence: Synthetic oligonucleotide
  Antisense strand to SEQ ID NO: 312678
acauacaugcuucucuuug

SEQ ID NO: 312680 - RNA, 19 nt, Artificial Sequence
  Description of Artificial Sequence: Synthetic oligonucleotide
  Sense strand starting at position 1868 of SEQ ID NO: 4015
aagagaagcauguaugugu

SEQ ID NO: 312681 - RNA, 19 nt, Artificial Sequence
  Description of Artificial Sequence: Synthetic oligonucleotide
  Antisense strand to SEQ ID NO: 312680
acacauacaugcuucucuu

SEQ ID NO: 312682 - RNA, 19 nt, Artificial Sequence
  Description of Artificial Sequence: Synthetic oligonucleotide
  Sense strand starting at position 2008 of SEQ ID NO: 4015
uccugacuuccuggauaca

SEQ ID NO: 312683 - RNA, 19 nt, Artificial Sequence
  Description of Artificial Sequence: Synthetic oligonucleotide
  Antisense strand to SEQ ID NO: 312682
uguauccaggaagucagga

SEQ ID NO: 312684 - RNA, 19 nt, Artificial Sequence
  Description of Artificial Sequence: Synthetic oligonucleotide
  Sense strand starting at position 2056 of SEQ ID NO: 4015
gaauuugucugcuccaugu

SEQ ID NO: 312685 - RNA, 19 nt, Artificial Sequence
  Description of Artificial Sequence: Synthetic oligonucleotide
  Antisense strand to SEQ ID NO: 312684
acauggagcagacaaauuc

SEQ ID NO: 312686 - RNA, 19 nt, Artificial Sequence
  Description of Artificial Sequence: Synthetic oligonucleotide
  Sense strand starting at position 2213 of SEQ ID NO: 4015
ugaccaauggcucacucua

SEQ ID NO: 312687 - RNA, 19 nt, Artificial Sequence
  Description of Artificial Sequence: Synthetic oligonucleotide
  Antisense strand to SEQ ID NO: 312686
uagagugagccauugguca

SEQ ID NO: 312688 - RNA, 19 nt, Artificial Sequence
  Description of Artificial Sequence: Synthetic oligonucleotide
  Sense strand starting at position 2257 of SEQ ID NO: 4015
cugugcgucagguuccaua

SEQ ID NO: 312689 - RNA, 19 nt, Artificial Sequence
  Description of Artificial Sequence: Synthetic oligonucleotide
  Antisense strand to SEQ ID NO: 312688
uauggaaccugacgcacag

SEQ ID NO: 312690 - RNA, 19 nt, Artificial Sequence
  Description of Artificial Sequence: Synthetic oligonucleotide
  Sense strand starting at position 2498 of SEQ ID NO: 4015
acuguugugagaugaacaa

SEQ ID NO: 312691 - RNA, 19 nt, Artificial Sequence
  Description of Artificial Sequence: Synthetic oligonucleotide
  Antisense strand to SEQ ID NO: 312690
uuguucaucucacaacagu

SEQ ID NO: 312692 - RNA, 19 nt, Artificial Sequence
  Description of Artificial Sequence: Synthetic oligonucleotide
  Sense strand starting at position 2523 of SEQ ID NO: 4015
ugaaaucacgcucauaaag

SEQ ID NO: 312693 - RNA, 19 nt, Artificial Sequence
  Description of Artificial Sequence: Synthetic oligonucleotide
  Antisense strand to SEQ ID NO: 312692
cuuuaugagcgugauuuca

SEQ ID NO: 312694 - RNA, 19 nt, Artificial Sequence
  Description of Artificial Sequence: Synthetic oligonucleotide
  Sense strand starting at position 2560 of SEQ ID NO: 4015
guaugaagcaagugaucag

SEQ ID NO: 312695 - RNA, 19 nt, Artificial Sequence
  Description of Artificial Sequence: Synthetic oligonucleotide
  Antisense strand to SEQ ID NO: 312694
cugaucacuugcuucauac

SEQ ID NO: 312696 - RNA, 19 nt, Artificial Sequence
  Description of Artificial Sequence: Synthetic oligonucleotide
  Sense strand starting at position 2597 of SEQ ID NO: 4015
agcaguauuuaaguauagu

SEQ ID NO: 312697 - RNA, 19 nt, Artificial Sequence
  Description of Artificial Sequence: Synthetic oligonucleotide
  Antisense strand to SEQ ID NO: 312696
acuauacuuaaauacugcu

SEQ ID NO: 312698 - RNA, 19 nt, Artificial Sequence
  Description of Artificial Sequence: Synthetic oligonucleotide
  Sense strand starting at position 2761 of SEQ ID NO: 4015
acucuaauugcagagucua

SEQ ID NO: 312699 - RNA, 19 nt, Artificial Sequence
  Description of Artificial Sequence: Synthetic oligonucleotide
  Antisense strand to SEQ ID NO: 312698
uagacucugcaauuagagu

SEQ ID NO: 312700 - RNA, 19 nt, Artificial Sequence
  Description of Artificial Sequence: Synthetic oligonucleotide
  Sense strand starting at position 3026 of SEQ ID NO: 4015
ucagaaaucuuguuugaaa

SEQ ID NO: 312701 - RNA, 19 nt, Artificial Sequence
  Description of Artificial Sequence: Synthetic oligonucleotide
  Antisense strand to SEQ ID NO: 312700
uuucaaacaagauuucuga

SEQ ID NO: 312702 - RNA, 19 nt, Artificial Sequence
  Description of Artificial Sequence: Synthetic oligonucleotide
  Sense strand starting at position 3027 of SEQ ID NO: 4015
cagaaaucuuguuugaaag

SEQ ID NO: 312703 - RNA, 19 nt, Artificial Sequence
  Description of Artificial Sequence: Synthetic oligonucleotide
  Antisense strand to SEQ ID NO: 312702
cuuucaaacaagauuucug

SEQ ID NO: 312704 - RNA, 19 nt, Artificial Sequence
  Description of Artificial Sequence: Synthetic oligonucleotide
  Sense strand starting at position 3028 of SEQ ID NO: 4015
agaaaucuuguuugaaagc

SEQ ID NO: 312705 - RNA, 19 nt, Artificial Sequence
  Description of Artificial Sequence: Synthetic oligonucleotide
  Antisense strand to SEQ ID NO: 312704
gcuuucaaacaagauuucu

SEQ ID NO: 312706 - RNA, 19 nt, Artificial Sequence
  Description of Artificial Sequence: Synthetic oligonucleotide
  Sense strand starting at position 3082 of SEQ ID NO: 4015
gacgauacagggugugaua

SEQ ID NO: 312707 - RNA, 19 nt, Artificial Sequence
  Description of Artificial Sequence: Synthetic oligonucleotide
  Antisense strand to SEQ ID NO: 312706
uaucacacccuguaucguc

SEQ ID NO: 312708 - RNA, 19 nt, Artificial Sequence
  Description of Artificial Sequence: Synthetic oligonucleotide
  Sense strand starting at position 3089 of SEQ ID NO: 4015
cagggugugauauaaaggu

SEQ ID NO: 312709 - RNA, 19 nt, Artificial Sequence
  Description of Artificial Sequence: Synthetic oligonucleotide
  Antisense strand to SEQ ID NO: 312708
accuuuauaucacacccug

SEQ ID NO: 312710 - RNA, 19 nt, Artificial Sequence
  Description of Artificial Sequence: Synthetic oligonucleotide
  Sense strand starting at position 3097 of SEQ ID NO: 4015
gauauaaagguucgacuac

SEQ ID NO: 312711 - RNA, 19 nt, Artificial Sequence
  Description of Artificial Sequence: Synthetic oligonucleotide
  Antisense strand to SEQ ID NO: 312710
guagucgaaccuuuauauc

SEQ ID NO: 312712 - RNA, 19 nt, Artificial Sequence
  Description of Artificial Sequence: Synthetic oligonucleotide
  Sense strand starting at position 3125 of SEQ ID NO: 4015
guuauaaacuggucacauu

SEQ ID NO: 312713 - RNA, 19 nt, Artificial Sequence
  Description of Artificial Sequence: Synthetic oligonucleotide
  Antisense strand to SEQ ID NO: 312712
aaugugaccaguuuauaac

SEQ ID NO: 312714 - RNA, 19 nt, Artificial Sequence
  Description of Artificial Sequence: Synthetic oligonucleotide
  Sense strand starting at position 3151 of SEQ ID NO: 4015
gcaaauucuggugacuuaa

SEQ ID NO: 312715 - RNA, 19 nt, Artificial Sequence
  Description of Artificial Sequence: Synthetic oligonucleotide
  Antisense strand to SEQ ID NO: 312714
uuaagucaccagaauuugc

SEQ ID NO: 312716 - RNA, 19 nt, Artificial Sequence
  Description of Artificial Sequence: Synthetic oligonucleotide
  Sense strand starting at position 3296 of SEQ ID NO: 4015
uuguuucuacucugggaag

SEQ ID NO: 312717 - RNA, 19 nt, Artificial Sequence
  Description of Artificial Sequence: Synthetic oligonucleotide
  Antisense strand to SEQ ID NO: 312716
cuucccagaguagaaacaa

SEQ ID NO: 312718 - RNA, 19 nt, Artificial Sequence
  Description of Artificial Sequence: Synthetic oligonucleotide
  Sense strand starting at position 3298 of SEQ ID NO: 4015
guuucuacucugggaagau

SEQ ID NO: 312719 - RNA, 19 nt, Artificial Sequence
  Description of Artificial Sequence: Synthetic oligonucleotide
  Antisense strand to SEQ ID NO: 312718
aucuucccagaguagaaac

SEQ ID NO: 312720 - RNA, 19 nt, Artificial Sequence
  Description of Artificial Sequence: Synthetic oligonucleotide
  Sense strand starting at position 3348 of SEQ ID NO: 4015
cugucagcaucaguauuua

SEQ ID NO: 312721 - RNA, 19 nt, Artificial Sequence
  Description of Artificial Sequence: Synthetic oligonucleotide
  Antisense strand to SEQ ID NO: 312720
uaaauacugaugcugacag

SEQ ID NO: 312722 - RNA, 19 nt, Artificial Sequence
  Description of Artificial Sequence: Synthetic oligonucleotide
  Sense strand starting at position 3590 of SEQ ID NO: 4015
aauacaguuugggugacau

SEQ ID NO: 312723 - RNA, 19 nt, Artificial Sequence
  Description of Artificial Sequence: Synthetic oligonucleotide
  Antisense strand to SEQ ID NO: 312722
augucacccaaacuguauu

SEQ ID NO: 312724 - RNA, 19 nt, Artificial Sequence
  Description of Artificial Sequence: Synthetic oligonucleotide
  Sense strand starting at position 3631 of SEQ ID NO: 4015
auugaauaacuaugcugaa

SEQ ID NO: 312725 - RNA, 19 nt, Artificial Sequence
  Description of Artificial Sequence: Synthetic oligonucleotide
  Antisense strand to SEQ ID NO: 312724
uucagcauaguuauucaau

SEQ ID NO: 312726 - RNA, 19 nt, Artificial Sequence
  Description of Artificial Sequence: Synthetic oligonucleotide
  Sense strand starting at position 3644 of SEQ ID NO: 4015
gcugaacauaucuggaagu

SEQ ID NO: 312727 - RNA, 19 nt, Artificial Sequence
  Description of Artificial Sequence: Synthetic oligonucleotide
  Antisense strand to SEQ ID NO: 312726
acuuccagauauguucagc

SEQ ID NO: 312728 - RNA, 19 nt, Artificial Sequence
  Description of Artificial Sequence: Synthetic oligonucleotide
  Sense strand starting at position 3659 of SEQ ID NO: 4015
aagugauacucagcuggaa

SEQ ID NO: 312729 - RNA, 19 nt, Artificial Sequence
  Description of Artificial Sequence: Synthetic oligonucleotide
  Antisense strand to SEQ ID NO: 312728
uuccagcugaguaucacuu

SEQ ID NO: 312730 - RNA, 19 nt, Artificial Sequence
  Description of Artificial Sequence: Synthetic oligonucleotide
  Sense strand starting at position 3661 of SEQ ID NO: 4015
gugauacucagcuggaaua

SEQ ID NO: 312731 - RNA, 19 nt, Artificial Sequence
  Description of Artificial Sequence: Synthetic oligonucleotide
  Antisense strand to SEQ ID NO: 312730
uauuccagcugaguaucac

SEQ ID NO: 312732 - RNA, 19 nt, Artificial Sequence
  Description of Artificial Sequence: Synthetic oligonucleotide
  Sense strand starting at position 3662 of SEQ ID NO: 4015
ugauacucagcuggaauau

SEQ ID NO: 312733 - RNA, 19 nt, Artificial Sequence
  Description of Artificial Sequence: Synthetic oligonucleotide
  Antisense strand to SEQ ID NO: 312732
auauuccagcugaguauca

SEQ ID NO: 312734 - RNA, 19 nt, Artificial Sequence
  Description of Artificial Sequence: Synthetic oligonucleotide
  Sense strand starting at position 3689 of SEQ ID NO: 4015
uaaggugacugguuagaua

SEQ ID NO: 312735 - RNA, 19 nt, Artificial Sequence
  Description of Artificial Sequence: Synthetic oligonucleotide
  Antisense strand to SEQ ID NO: 312734
uaucuaaccagucaccuua

SEQ ID NO: 312736 - RNA, 19 nt, Artificial Sequence
  Description of Artificial Sequence: Synthetic oligonucleotide
  Sense strand starting at position 3871 of SEQ ID NO: 4015
cuguaaugcccacauaaug

SEQ ID NO: 312737 - RNA, 19 nt, Artificial Sequence
  Description of Artificial Sequence: Synthetic oligonucleotide
  Antisense strand to SEQ ID NO: 312736
cauuaugugggcauuacag

SEQ ID NO: 312738 - RNA, 19 nt, Artificial Sequence
  Description of Artificial Sequence: Synthetic oligonucleotide
  Sense strand starting at position 50 of SEQ ID NO: 4016
agaaauauaucgguuccca

SEQ ID NO: 312739 - RNA, 19 nt, Artificial Sequence
  Description of Artificial Sequence: Synthetic oligonucleotide
  Antisense strand to SEQ ID NO: 312738
ugggaaccgauauauuucu

SEQ ID NO: 312740 - RNA, 19 nt, Artificial Sequence
  Description of Artificial Sequence: Synthetic oligonucleotide
  Sense strand starting at position 58 of SEQ ID NO: 4016
aucgguucccaguauugaa

SEQ ID NO: 312741 - RNA, 19 nt, Artificial Sequence
  Description of Artificial Sequence: Synthetic oligonucleotide
  Antisense strand to SEQ ID NO: 312740
uucaauacugggaaccgau

SEQ ID NO: 312742 - RNA, 19 nt, Artificial Sequence
  Description of Artificial Sequence: Synthetic oligonucleotide
  Sense strand starting at position 62 of SEQ ID NO: 4016
guucccaguauugaaguua

SEQ ID NO: 312743 - RNA, 19 nt, Artificial Sequence
  Description of Artificial Sequence: Synthetic oligonucleotide
  Antisense strand to SEQ ID NO: 312742
uaacuucaauacugggaac

SEQ ID NO: 312744 - RNA, 19 nt, Artificial Sequence
  Description of Artificial Sequence: Synthetic oligonucleotide
  Sense strand starting at position 214 of SEQ ID NO: 4016
agcuaucaacugugaacaa

SEQ ID NO: 312745 - RNA, 19 nt, Artificial Sequence
  Description of Artificial Sequence: Synthetic oligonucleotide
  Antisense strand to SEQ ID NO: 312744
uuguucacaguugauagcu

SEQ ID NO: 312746 - RNA, 19 nt, Artificial Sequence
  Description of Artificial Sequence: Synthetic oligonucleotide
  Sense strand starting at position 365 of SEQ ID NO: 4016
aagugaagccucugagauc

SEQ ID NO: 312747 - RNA, 19 nt, Artificial Sequence
  Description of Artificial Sequence: Synthetic oligonucleotide
  Antisense strand to SEQ ID NO: 312746
gaucucagaggcuucacuu

SEQ ID NO: 312748 - RNA, 19 nt, Artificial Sequence
  Description of Artificial Sequence: Synthetic oligonucleotide
  Sense strand starting at position 580 of SEQ ID NO: 4016
uguugcuagcaagaagaaa

SEQ ID NO: 312749 - RNA, 19 nt, Artificial Sequence
  Description of Artificial Sequence: Synthetic oligonucleotide
  Antisense strand to SEQ ID NO: 312748
uuucuucuugcuagcaaca

SEQ ID NO: 312750 - RNA, 19 nt, Artificial Sequence
  Description of Artificial Sequence: Synthetic oligonucleotide
  Sense strand starting at position 839 of SEQ ID NO: 4016
caaauagagcacugguaaa

SEQ ID NO: 312751 - RNA, 19 nt, Artificial Sequence
  Description of Artificial Sequence: Synthetic oligonucleotide
  Antisense strand to SEQ ID NO: 312750
uuuaccagugcucuauuug

SEQ ID NO: 312752 - RNA, 19 nt, Artificial Sequence
  Description of Artificial Sequence: Synthetic oligonucleotide
  Sense strand starting at position 947 of SEQ ID NO: 4016
uuaagagauucuguuauca

SEQ ID NO: 312753 - RNA, 19 nt, Artificial Sequence
  Description of Artificial Sequence: Synthetic oligonucleotide
  Antisense strand to SEQ ID NO: 312752
ugauaacagaaucucuuaa

SEQ ID NO: 312754 - RNA, 19 nt, Artificial Sequence
  Description of Artificial Sequence: Synthetic oligonucleotide
  Sense strand starting at position 1077 of SEQ ID NO: 4016
guauauagggcaugauauc

SEQ ID NO: 312755 - RNA, 19 nt, Artificial Sequence
  Description of Artificial Sequence: Synthetic oligonucleotide
  Antisense strand to SEQ ID NO: 312754
gauaucaugcccuauauac

SEQ ID NO: 312756 - RNA, 19 nt, Artificial Sequence
  Description of Artificial Sequence: Synthetic oligonucleotide
  Sense strand starting at position 1083 of SEQ ID NO: 4016
agggcaugauaucuuuaaa

SEQ ID NO: 312757 - RNA, 19 nt, Artificial Sequence
  Description of Artificial Sequence: Synthetic oligonucleotide
  Antisense strand to SEQ ID NO: 312756
uuuaaagauaucaugcccu

SEQ ID NO: 312758 - RNA, 19 nt, Artificial Sequence
  Description of Artificial Sequence: Synthetic oligonucleotide
  Sense strand starting at position 1086 of SEQ ID NO: 4016
gcaugauaucuuuaaagua

SEQ ID NO: 312759 - RNA, 19 nt, Artificial Sequence
  Description of Artificial Sequence: Synthetic oligonucleotide
  Antisense strand to SEQ ID NO: 312758
uacuuuaaagauaucaugc

SEQ ID NO: 312760 - RNA, 19 nt, Artificial Sequence
  Description of Artificial Sequence: Synthetic oligonucleotide
  Sense strand starting at position 1140 of SEQ ID NO: 4016
uauaauuaggacuggcaga

SEQ ID NO: 312761 - RNA, 19 nt, Artificial Sequence
  Description of Artificial Sequence: Synthetic oligonucleotide
  Antisense strand to SEQ ID NO: 312760
ucugccaguccuaauuaua

SEQ ID NO: 312762 - RNA, 19 nt, Artificial Sequence
  Description of Artificial Sequence: Synthetic oligonucleotide
  Sense strand starting at position 1141 of SEQ ID NO: 4016
auaauuaggacuggcagau

SEQ ID NO: 312763 - RNA, 19 nt, Artificial Sequence
  Description of Artificial Sequence: Synthetic oligonucleotide
  Antisense strand to SEQ ID NO: 312762
aucugccaguccuaauuau

SEQ ID NO: 312764 - RNA, 19 nt, Artificial Sequence
  Description of Artificial Sequence: Synthetic oligonucleotide
  Sense strand starting at position 1196 of SEQ ID NO: 4016
guaagaaccugauucuuua

SEQ ID NO: 312765 - RNA, 19 nt, Artificial Sequence
  Description of Artificial Sequence: Synthetic oligonucleotide
  Antisense strand to SEQ ID NO: 312764
uaaagaaucagguucuuac

SEQ ID NO: 312766 - RNA, 19 nt, Artificial Sequence
  Description of Artificial Sequence: Synthetic oligonucleotide
  Sense strand starting at position 1215 of SEQ ID NO: 4016
gucuuauuccaguaauacu

SEQ ID NO: 312767 - RNA, 19 nt, Artificial Sequence
  Description of Artificial Sequence: Synthetic oligonucleotide
  Antisense strand to SEQ ID NO: 312766
aguauuacuggaauaagac

SEQ ID NO: 312768 - RNA, 19 nt, Artificial Sequence
  Description of Artificial Sequence: Synthetic oligonucleotide
  Sense strand starting at position 1304 of SEQ ID NO: 4016
ucaugcauuucuuugagca

SEQ ID NO: 312769 - RNA, 19 nt, Artificial Sequence
  Description of Artificial Sequence: Synthetic oligonucleotide
  Antisense strand to SEQ ID NO: 312768
ugcucaaagaaaugcauga

SEQ ID NO: 312770 - RNA, 19 nt, Artificial Sequence
  Description of Artificial Sequence: Synthetic oligonucleotide
  Sense strand starting at position 1308 of SEQ ID NO: 4016
gcauuucuuugagcaagcu

SEQ ID NO: 312771 - RNA, 19 nt, Artificial Sequence
  Description of Artificial Sequence: Synthetic oligonucleotide
  Antisense strand to SEQ ID NO: 312770
agcuugcucaaagaaaugc

SEQ ID NO: 312772 - RNA, 19 nt, Artificial Sequence
  Description of Artificial Sequence: Synthetic oligonucleotide
  Sense strand starting at position 1683 of SEQ ID NO: 4016
uuaaguaaccagugagaac

SEQ ID NO: 312773 - RNA, 19 nt, Artificial Sequence
  Description of Artificial Sequence: Synthetic oligonucleotide
  Antisense strand to SEQ ID NO: 312772
guucucacugguuacuuaa

SEQ ID NO: 312774 - RNA, 19 nt, Artificial Sequence
  Description of Artificial Sequence: Synthetic oligonucleotide
  Sense strand starting at position 1719 of SEQ ID NO: 4016
gcagacauauagucaauga

SEQ ID NO: 312775 - RNA, 19 nt, Artificial Sequence
  Description of Artificial Sequence: Synthetic oligonucleotide
  Antisense strand to SEQ ID NO: 312774
ucauugacuauaugucugc

SEQ ID NO: 312776 - RNA, 19 nt, Artificial Sequence
  Description of Artificial Sequence: Synthetic oligonucleotide
  Sense strand starting at position 1985 of SEQ ID NO: 4016
ggaacugagcucuguauag

SEQ ID NO: 312777 - RNA, 19 nt, Artificial Sequence
  Description of Artificial Sequence: Synthetic oligonucleotide
  Antisense strand to SEQ ID NO: 312776
cuauacagagcucaguucc

SEQ ID NO: 312778 - RNA, 19 nt, Artificial Sequence
  Description of Artificial Sequence: Synthetic oligonucleotide
  Sense strand starting at position 1987 of SEQ ID NO: 4016
aacugagcucuguauaggu

SEQ ID NO: 312779 - RNA, 19 nt, Artificial Sequence
  Description of Artificial Sequence: Synthetic oligonucleotide
  Antisense strand to SEQ ID NO: 312778
accuauacagagcucaguu

SEQ ID NO: 312780 - RNA, 19 nt, Artificial Sequence
  Description of Artificial Sequence: Synthetic oligonucleotide
  Sense strand starting at position 2154 of SEQ ID NO: 4016
cuguauaaaggcuacaaau

SEQ ID NO: 312781 - RNA, 19 nt, Artificial Sequence
  Description of Artificial Sequence: Synthetic oligonucleotide
  Antisense strand to SEQ ID NO: 312780
auuuguagccuuuauacag

SEQ ID NO: 312782 - RNA, 19 nt, Artificial Sequence
  Description of Artificial Sequence: Synthetic oligonucleotide
  Sense strand starting at position 2201 of SEQ ID NO: 4016
auuaaaguuccggaauuac

SEQ ID NO: 312783 - RNA, 19 nt, Artificial Sequence
  Description of Artificial Sequence: Synthetic oligonucleotide
  Antisense strand to SEQ ID NO: 312782
guaauuccggaacuuuaau

SEQ ID NO: 312784 - RNA, 19 nt, Artificial Sequence
  Description of Artificial Sequence: Synthetic oligonucleotide
  Sense strand starting at position 2294 of SEQ ID NO: 4016
uuuauucuggugcaauaau

SEQ ID NO: 312785 - RNA, 19 nt, Artificial Sequence
  Description of Artificial Sequence: Synthetic oligonucleotide
  Antisense strand to SEQ ID NO: 312784
auuauugcaccagaauaaa

SEQ ID NO: 312786 - RNA, 19 nt, Artificial Sequence
  Description of Artificial Sequence: Synthetic oligonucleotide
  Sense strand starting at position 2445 of SEQ ID NO: 4016
ggcugugcugguuuaguua

SEQ ID NO: 312787 - RNA, 19 nt, Artificial Sequence
  Description of Artificial Sequence: Synthetic oligonucleotide
  Antisense strand to SEQ ID NO: 312786
uaacuaaaccagcacagcc

SEQ ID NO: 312788 - RNA, 19 nt, Artificial Sequence
  Description of Artificial Sequence: Synthetic oligonucleotide
  Sense strand starting at position 2606 of SEQ ID NO: 4016
ucacgugcuccugagagaa

SEQ ID NO: 312789 - RNA, 19 nt, Artificial Sequence
  Description of Artificial Sequence: Synthetic oligonucleotide
  Antisense strand to SEQ ID NO: 312788
uucucucaggagcacguga

SEQ ID NO: 312790 - RNA, 19 nt, Artificial Sequence
  Description of Artificial Sequence: Synthetic oligonucleotide
  Sense strand starting at position 2610 of SEQ ID NO: 4016
gugcuccugagagaaucau

SEQ ID NO: 312791 - RNA, 19 nt, Artificial Sequence
  Description of Artificial Sequence: Synthetic oligonucleotide
  Antisense strand to SEQ ID NO: 312790
augauucucucaggagcac

SEQ ID NO: 312792 - RNA, 19 nt, Artificial Sequence
  Description of Artificial Sequence: Synthetic oligonucleotide
  Sense strand starting at position 2838 of SEQ ID NO: 4016
ugcccuuuggcuuaaagaa

SEQ ID NO: 312793 - RNA, 19 nt, Artificial Sequence
  Description of Artificial Sequence: Synthetic oligonucleotide
  Antisense strand to SEQ ID NO: 312792
uucuuuaagccaaagggca

SEQ ID NO: 312794 - RNA, 19 nt, Artificial Sequence
  Description of Artificial Sequence: Synthetic oligonucleotide
  Sense strand starting at position 2983 of SEQ ID NO: 4016
uaggucaaggagugauauu

SEQ ID NO: 312795 - RNA, 19 nt, Artificial Sequence
  Description of Artificial Sequence: Synthetic oligonucleotide
  Antisense strand to SEQ ID NO: 312794
aauaucacuccuugaccua

SEQ ID NO: 312796 - RNA, 19 nt, Artificial Sequence
  Description of Artificial Sequence: Synthetic oligonucleotide
  Sense strand starting at position 2994 of SEQ ID NO: 4016
gugauauuccagcauauua

SEQ ID NO: 312797 - RNA, 19 nt, Artificial Sequence
  Description of Artificial Sequence: Synthetic oligonucleotide
  Antisense strand to SEQ ID NO: 312796
uaauaugcuggaauaucac

SEQ ID NO: 312798 - RNA, 19 nt, Artificial Sequence
  Description of Artificial Sequence: Synthetic oligonucleotide
  Sense strand starting at position 3076 of SEQ ID NO: 4016
gccaguauagacuaauuau

SEQ ID NO: 312799 - RNA, 19 nt, Artificial Sequence
  Description of Artificial Sequence: Synthetic oligonucleotide
  Antisense strand to SEQ ID NO: 312798
auaauuagucuauacuggc

SEQ ID NO: 312800 - RNA, 19 nt, Artificial Sequence
  Description of Artificial Sequence: Synthetic oligonucleotide
  Sense strand starting at position 3110 of SEQ ID NO: 4016
ugaguaugauagcuauuaa

SEQ ID NO: 312801 - RNA, 19 nt, Artificial Sequence
  Description of Artificial Sequence: Synthetic oligonucleotide
  Antisense strand to SEQ ID NO: 312800
uuaauagcuaucauacuca

SEQ ID NO: 312802 - RNA, 19 nt, Artificial Sequence
  Description of Artificial Sequence: Synthetic oligonucleotide
  Sense strand starting at position 3205 of SEQ ID NO: 4016
guaaaucagucuccacaug

SEQ ID NO: 312803 - RNA, 19 nt, Artificial Sequence
  Description of Artificial Sequence: Synthetic oligonucleotide
  Antisense strand to SEQ ID NO: 312802
cauguggagacugauuuac

SEQ ID NO: 312804 - RNA, 19 nt, Artificial Sequence
  Description of Artificial Sequence: Synthetic oligonucleotide
  Sense strand starting at position 3235 of SEQ ID NO: 4016
uauguauuagugcagauau

SEQ ID NO: 312805 - RNA, 19 nt, Artificial Sequence
  Description of Artificial Sequence: Synthetic oligonucleotide
  Antisense strand to SEQ ID NO: 312804
auaucugcacuaauacaua

SEQ ID NO: 312806 - RNA, 19 nt, Artificial Sequence
  Description of Artificial Sequence: Synthetic oligonucleotide
  Sense strand starting at position 3237 of SEQ ID NO: 4016
uguauuagugcagauauaa

SEQ ID NO: 312807 - RNA, 19 nt, Artificial Sequence
  Description of Artificial Sequence: Synthetic oligonucleotide
  Antisense strand to SEQ ID NO: 312806
uuauaucugcacuaauaca

SEQ ID NO: 312808 - RNA, 19 nt, Artificial Sequence
  Description of Artificial Sequence: Synthetic oligonucleotide
  Sense strand starting at position 3271 of SEQ ID NO: 4016
gcagaaaggucucuuggac

SEQ ID NO: 312809 - RNA, 19 nt, Artificial Sequence
  Description of Artificial Sequence: Synthetic oligonucleotide
  Antisense strand to SEQ ID NO: 312808
guccaagagaccuuucugc

SEQ ID NO: 312810 - RNA, 19 nt, Artificial Sequence
  Description of Artificial Sequence: Synthetic oligonucleotide
  Sense strand starting at position 3328 of SEQ ID NO: 4016
acaguaauauacucuguga

SEQ ID NO: 312811 - RNA, 19 nt, Artificial Sequence
  Description of Artificial Sequence: Synthetic oligonucleotide
  Antisense strand to SEQ ID NO: 312810
ucacagaguauauuacugu

SEQ ID NO: 312812 - RNA, 19 nt, Artificial Sequence
  Description of Artificial Sequence: Synthetic oligonucleotide
  Sense strand starting at position 3553 of SEQ ID NO: 4016
ugguacuggaucugaaauc

SEQ ID NO: 312813 - RNA, 19 nt, Artificial Sequence
  Description of Artificial Sequence: Synthetic oligonucleotide
  Antisense strand to SEQ ID NO: 312812
gauuucagauccaguacca

SEQ ID NO: 312814 - RNA, 19 nt, Artificial Sequence
  Description of Artificial Sequence: Synthetic oligonucleotide
  Sense strand starting at position 3690 of SEQ ID NO: 4016
gguuguuaauuacucaaag

SEQ ID NO: 312815 - RNA, 19 nt, Artificial Sequence
  Description of Artificial Sequence: Synthetic oligonucleotide
  Antisense strand to SEQ ID NO: 312814
cuuugaguaauuaacaacc

SEQ ID NO: 312816 - RNA, 19 nt, Artificial Sequence
  Description of Artificial Sequence: Synthetic oligonucleotide
  Sense strand starting at position 3691 of SEQ ID NO: 4016
guuguuaauuacucaaaga

SEQ ID NO: 312817 - RNA, 19 nt, Artificial Sequence
  Description of Artificial Sequence: Synthetic oligonucleotide
  Antisense strand to SEQ ID NO: 312816
ucuuugaguaauuaacaac

SEQ ID NO: 312818 - RNA, 19 nt, Artificial Sequence
  Description of Artificial Sequence: Synthetic oligonucleotide
  Sense strand starting at position 24 of SEQ ID NO: 4017
agcagugucccacacuuaa

SEQ ID NO: 312819 - RNA, 19 nt, Artificial Sequence
  Description of Artificial Sequence: Synthetic oligonucleotide
  Antisense strand to SEQ ID NO: 312818
uuaagugugggacacugcu

SEQ ID NO: 312820 - RNA, 19 nt, Artificial Sequence
  Description of Artificial Sequence: Synthetic oligonucleotide
  Sense strand starting at position 69 of SEQ ID NO: 4017
cauagugcgagagguguaa

SEQ ID NO: 312821 - RNA, 19 nt, Artificial Sequence
  Description of Artificial Sequence: Synthetic oligonucleotide
  Antisense strand to SEQ ID NO: 312820
uuacaccucucgcacuaug

SEQ ID NO: 312822 - RNA, 19 nt, Artificial Sequence
  Description of Artificial Sequence: Synthetic oligonucleotide
  Sense strand starting at position 168 of SEQ ID NO: 4017
aauggauaaugugacucua

SEQ ID NO: 312823 - RNA, 19 nt, Artificial Sequence
  Description of Artificial Sequence: Synthetic oligonucleotide
  Antisense strand to SEQ ID NO: 312822
uagagucacauuauccauu

SEQ ID NO: 312824 - RNA, 19 nt, Artificial Sequence
  Description of Artificial Sequence: Synthetic oligonucleotide
  Sense strand starting at position 170 of SEQ ID NO: 4017
uggauaaugugacucuaca

SEQ ID NO: 312825 - RNA, 19 nt, Artificial Sequence
  Description of Artificial Sequence: Synthetic oligonucleotide
  Antisense strand to SEQ ID NO: 312824
uguagagucacauuaucca

SEQ ID NO: 312826 - RNA, 19 nt, Artificial Sequence
  Description of Artificial Sequence: Synthetic oligonucleotide
  Sense strand starting at position 229 of SEQ ID NO: 4017
ucauaaccguugcuuaaua

SEQ ID NO: 312827 - RNA, 19 nt, Artificial Sequence
  Description of Artificial Sequence: Synthetic oligonucleotide
  Antisense strand to SEQ ID NO: 312826
uauuaagcaacgguuauga

SEQ ID NO: 312828 - RNA, 19 nt, Artificial Sequence
  Description of Artificial Sequence: Synthetic oligonucleotide
  Sense strand starting at position 282 of SEQ ID NO: 4017
gcgaaagacugcuccuuag

SEQ ID NO: 312829 - RNA, 19 nt, Artificial Sequence
  Description of Artificial Sequence: Synthetic oligonucleotide
  Antisense strand to SEQ ID NO: 312828
cuaaggagcagucuuucgc

SEQ ID NO: 312830 - RNA, 19 nt, Artificial Sequence
  Description of Artificial Sequence: Synthetic oligonucleotide
  Sense strand starting at position 285 of SEQ ID NO: 4017
aaagacugcuccuuagguu

SEQ ID NO: 312831 - RNA, 19 nt, Artificial Sequence
  Description of Artificial Sequence: Synthetic oligonucleotide
  Antisense strand to SEQ ID NO: 312830
aaccuaaggagcagucuuu

SEQ ID NO: 312832 - RNA, 19 nt, Artificial Sequence
  Description of Artificial Sequence: Synthetic oligonucleotide
  Sense strand starting at position 308 of SEQ ID NO: 4017
gggcaaucgcccgcuucau

SEQ ID NO: 312833 - RNA, 19 nt, Artificial Sequence
  Description of Artificial Sequence: Synthetic oligonucleotide
  Antisense strand to SEQ ID NO: 312832
augaagcgggcgauugccc

SEQ ID NO: 312834 - RNA, 19 nt, Artificial Sequence
  Description of Artificial Sequence: Synthetic oligonucleotide
  Sense strand starting at position 496 of SEQ ID NO: 4017
uggccucggcgugaucaga

SEQ ID NO: 312835 - RNA, 19 nt, Artificial Sequence
  Description of Artificial Sequence: Synthetic oligonucleotide
  Antisense strand to SEQ ID NO: 312834
ucugaucacgccgaggcca

SEQ ID NO: 312836 - RNA, 19 nt, Artificial Sequence
  Description of Artificial Sequence: Synthetic oligonucleotide
  Sense strand starting at position 502 of SEQ ID NO: 4017
cggcgugaucagaggaggu

SEQ ID NO: 312837 - RNA, 19 nt, Artificial Sequence
  Description of Artificial Sequence: Synthetic oligonucleotide
  Antisense strand to SEQ ID NO: 312836
accuccucugaucacgccg

SEQ ID NO: 312838 - RNA, 19 nt, Artificial Sequence
  Description of Artificial Sequence: Synthetic oligonucleotide
  Sense strand starting at position 612 of SEQ ID NO: 4017
ggcauccuccacuguacaa

SEQ ID NO: 312839 - RNA, 19 nt, Artificial Sequence
  Description of Artificial Sequence: Synthetic oligonucleotide
  Antisense strand to SEQ ID NO: 312838
uuguacaguggaggaugcc

SEQ ID NO: 312840 - RNA, 19 nt, Artificial Sequence
  Description of Artificial Sequence: Synthetic oligonucleotide
  Sense strand starting at position 771 of SEQ ID NO: 4017
aguuuccuugcuggaggaa

SEQ ID NO: 312841 - RNA, 19 nt, Artificial Sequence
  Description of Artificial Sequence: Synthetic oligonucleotide
  Antisense strand to SEQ ID NO: 312840
uuccuccagcaaggaaacu

SEQ ID NO: 312842 - RNA, 19 nt, Artificial Sequence
  Description of Artificial Sequence: Synthetic oligonucleotide
  Sense strand starting at position 1259 of SEQ ID NO: 4017
cgaagacacagucgacuua

SEQ ID NO: 312843 - RNA, 19 nt, Artificial Sequence
  Description of Artificial Sequence: Synthetic oligonucleotide
  Antisense strand to SEQ ID NO: 312842
uaagucgacugugucuucg

SEQ ID NO: 312844 - RNA, 19 nt, Artificial Sequence
  Description of Artificial Sequence: Synthetic oligonucleotide
  Sense strand starting at position 1268 of SEQ ID NO: 4017
agucgacuuacccagagau

SEQ ID NO: 312845 - RNA, 19 nt, Artificial Sequence
  Description of Artificial Sequence: Synthetic oligonucleotide
  Antisense strand to SEQ ID NO: 312844
aucucuggguaagucgacu

SEQ ID NO: 312846 - RNA, 19 nt, Artificial Sequence
  Description of Artificial Sequence: Synthetic oligonucleotide
  Sense strand starting at position 1355 of SEQ ID NO: 4017
gacgaaucaagguggguuu

SEQ ID NO: 312847 - RNA, 19 nt, Artificial Sequence
  Description of Artificial Sequence: Synthetic oligonucleotide
  Antisense strand to SEQ ID NO: 312846
aaacccaccuugauucguc

SEQ ID NO: 312848 - RNA, 19 nt, Artificial Sequence
  Description of Artificial Sequence: Synthetic oligonucleotide
  Sense strand starting at position 2005 of SEQ ID NO: 4017
cgguucagacugggagauu

SEQ ID NO: 312849 - RNA, 19 nt, Artificial Sequence
  Description of Artificial Sequence: Synthetic oligonucleotide
  Antisense strand to SEQ ID NO: 312848
aaucucccagucugaaccg

SEQ ID NO: 312850 - RNA, 19 nt, Artificial Sequence
  Description of Artificial Sequence: Synthetic oligonucleotide
  Sense strand starting at position 2020 of SEQ ID NO: 4017
gauuccaucucgguugagu

SEQ ID NO: 312851 - RNA, 19 nt, Artificial Sequence
  Description of Artificial Sequence: Synthetic oligonucleotide
  Antisense strand to SEQ ID NO: 312850
acucaaccgagauggaauc

SEQ ID NO: 312852 - RNA, 19 nt, Artificial Sequence
  Description of Artificial Sequence: Synthetic oligonucleotide
  Sense strand starting at position 2221 of SEQ ID NO: 4017
gcgauuugcccgcagagug

SEQ ID NO: 312853 - RNA, 19 nt, Artificial Sequence
  Description of Artificial Sequence: Synthetic oligonucleotide
  Antisense strand to SEQ ID NO: 312852
cacucugcgggcaaaucgc

SEQ ID NO: 312854 - RNA, 19 nt, Artificial Sequence
  Description of Artificial Sequence: Synthetic oligonucleotide
  Sense strand starting at position 2345 of SEQ ID NO: 4017
cguggaggauucguucgaa

SEQ ID NO: 312855 - RNA, 19 nt, Artificial Sequence
  Description of Artificial Sequence: Synthetic oligonucleotide
  Antisense strand to SEQ ID NO: 312854
uucgaacgaauccuccacg

SEQ ID NO: 312856 - RNA, 19 nt, Artificial Sequence
  Description of Artificial Sequence: Synthetic oligonucleotide
  Sense strand starting at position 2346 of SEQ ID NO: 4017
guggaggauucguucgaac

SEQ ID NO: 312857 - RNA, 19 nt, Artificial Sequence
  Description of Artificial Sequence: Synthetic oligonucleotide
  Antisense strand to SEQ ID NO: 312856
guucgaacgaauccuccac

SEQ ID NO: 312858 - RNA, 19 nt, Artificial Sequence
  Description of Artificial Sequence: Synthetic oligonucleotide
  Sense strand starting at position 2348 of SEQ ID NO: 4017
ggaggauucguucgaacga

SEQ ID NO: 312859 - RNA, 19 nt, Artificial Sequence
  Description of Artificial Sequence: Synthetic oligonucleotide
  Antisense strand to SEQ ID NO: 312858
ucguucgaacgaauccucc

SEQ ID NO: 312860 - RNA, 19 nt, Artificial Sequence
  Description of Artificial Sequence: Synthetic oligonucleotide
  Sense strand starting at position 2886 of SEQ ID NO: 4017
ucgaaauacuucuugggaa

SEQ ID NO: 312861 - RNA, 19 nt, Artificial Sequence
  Description of Artificial Sequence: Synthetic oligonucleotide
  Antisense strand to SEQ ID NO: 312860
uucccaagaaguauuucga

SEQ ID NO: 312862 - RNA, 19 nt, Artificial Sequence
  Description of Artificial Sequence: Synthetic oligonucleotide
  Sense strand starting at position 2898 of SEQ ID NO: 4017
uugggaaagucuccuuaaa

SEQ ID NO: 312863 - RNA, 19 nt, Artificial Sequence
  Description of Artificial Sequence: Synthetic oligonucleotide
  Antisense strand to SEQ ID NO: 312862
uuuaaggagacuuucccaa

SEQ ID NO: 312864 - RNA, 19 nt, Artificial Sequence
  Description of Artificial Sequence: Synthetic oligonucleotide
  Sense strand starting at position 2993 of SEQ ID NO: 4017
ucccaagugauugguuuga

SEQ ID NO: 312865 - RNA, 19 nt, Artificial Sequence
  Description of Artificial Sequence: Synthetic oligonucleotide
  Antisense strand to SEQ ID NO: 312864
ucaaaccaaucacuuggga

SEQ ID NO: 312866 - RNA, 19 nt, Artificial Sequence
  Description of Artificial Sequence: Synthetic oligonucleotide
  Sense strand starting at position 2997 of SEQ ID NO: 4017
aagugauugguuugacagc

SEQ ID NO: 312867 - RNA, 19 nt, Artificial Sequence
  Description of Artificial Sequence: Synthetic oligonucleotide
  Antisense strand to SEQ ID NO: 312866
gcugucaaaccaaucacuu

SEQ ID NO: 312868 - RNA, 19 nt, Artificial Sequence
  Description of Artificial Sequence: Synthetic oligonucleotide
  Sense strand starting at position 3064 of SEQ ID NO: 4017
gcccuugaucugcaacacu

SEQ ID NO: 312869 - RNA, 19 nt, Artificial Sequence
  Description of Artificial Sequence: Synthetic oligonucleotide
  Antisense strand to SEQ ID NO: 312868
aguguugcagaucaagggc

SEQ ID NO: 312870 - RNA, 19 nt, Artificial Sequence
  Description of Artificial Sequence: Synthetic oligonucleotide
  Sense strand starting at position 3193 of SEQ ID NO: 4017
ucccaagcguccuccaaau

SEQ ID NO: 312871 - RNA, 19 nt, Artificial Sequence
  Description of Artificial Sequence: Synthetic oligonucleotide
  Antisense strand to SEQ ID NO: 312870
auuuggaggacgcuuggga

SEQ ID NO: 312872 - RNA, 19 nt, Artificial Sequence
  Description of Artificial Sequence: Synthetic oligonucleotide
  Sense strand starting at position 3195 of SEQ ID NO: 4017
ccaagcguccuccaaauca

SEQ ID NO: 312873 - RNA, 19 nt, Artificial Sequence
  Description of Artificial Sequence: Synthetic oligonucleotide
  Antisense strand to SEQ ID NO: 312872
ugauuuggaggacgcuugg

SEQ ID NO: 312874 - RNA, 19 nt, Artificial Sequence
  Description of Artificial Sequence: Synthetic oligonucleotide
  Sense strand starting at position 3213 of SEQ ID NO: 4017
agcuuuacagauuguucuu

SEQ ID NO: 312875 - RNA, 19 nt, Artificial Sequence
  Description of Artificial Sequence: Synthetic oligonucleotide
  Antisense strand to SEQ ID NO: 312874
aagaacaaucuguaaagcu

SEQ ID NO: 312876 - RNA, 19 nt, Artificial Sequence
  Description of Artificial Sequence: Synthetic oligonucleotide
  Sense strand starting at position 3219 of SEQ ID NO: 4017
acagauuguucuuugcuua

SEQ ID NO: 312877 - RNA, 19 nt, Artificial Sequence
  Description of Artificial Sequence: Synthetic oligonucleotide
  Antisense strand to SEQ ID NO: 312876
uaagcaaagaacaaucugu

SEQ ID NO: 312878 - RNA, 19 nt, Artificial Sequence
  Description of Artificial Sequence: Synthetic oligonucleotide
  Sense strand starting at position 3222 of SEQ ID NO: 4017
gauuguucuuugcuuaaga

SEQ ID NO: 312879 - RNA, 19 nt, Artificial Sequence
  Description of Artificial Sequence: Synthetic oligonucleotide
  Antisense strand to SEQ ID NO: 312878
ucuuaagcaaagaacaauc

SEQ ID NO: 312880 - RNA, 19 nt, Artificial Sequence
  Description of Artificial Sequence: Synthetic oligonucleotide
  Sense strand starting at position 3223 of SEQ ID NO: 4017
auuguucuuugcuuaagag

SEQ ID NO: 312881 - RNA, 19 nt, Artificial Sequence
  Description of Artificial Sequence: Synthetic oligonucleotide
  Antisense strand to SEQ ID NO: 312880
cucuuaagcaaagaacaau

SEQ ID NO: 312882 - RNA, 19 nt, Artificial Sequence
  Description of Artificial Sequence: Synthetic oligonucleotide
  Sense strand starting at position 3405 of SEQ ID NO: 4017
gcaacaacucaauguuuag

SEQ ID NO: 312883 - RNA, 19 nt, Artificial Sequence
  Description of Artificial Sequence: Synthetic oligonucleotide
  Antisense strand to SEQ ID NO: 312882
cuaaacauugaguuguugc

SEQ ID NO: 312884 - RNA, 19 nt, Artificial Sequence
  Description of Artificial Sequence: Synthetic oligonucleotide
  Sense strand starting at position 3662 of SEQ ID NO: 4017
gcaguauauuuacauagca

SEQ ID NO: 312885 - RNA, 19 nt, Artificial Sequence
  Description of Artificial Sequence: Synthetic oligonucleotide
  Antisense strand to SEQ ID NO: 312884
ugcuauguaaauauacugc

SEQ ID NO: 312886 - RNA, 19 nt, Artificial Sequence
  Description of Artificial Sequence: Synthetic oligonucleotide
  Sense strand starting at position 3697 of SEQ ID NO: 4017
cauuauaagcaauguagag

SEQ ID NO: 312887 - RNA, 19 nt, Artificial Sequence
  Description of Artificial Sequence: Synthetic oligonucleotide
  Antisense strand to SEQ ID NO: 312886
cucuacauugcuuauaaug

SEQ ID NO: 312888 - RNA, 19 nt, Artificial Sequence
  Description of Artificial Sequence: Synthetic oligonucleotide
  Sense strand starting at position 3726 of SEQ ID NO: 4017
guuuacaucguauaaggua

SEQ ID NO: 312889 - RNA, 19 nt, Artificial Sequence
  Description of Artificial Sequence: Synthetic oligonucleotide
  Antisense strand to SEQ ID NO: 312888
uaccuuauacgauguaaac

SEQ ID NO: 312890 - RNA, 19 nt, Artificial Sequence
  Description of Artificial Sequence: Synthetic oligonucleotide
  Sense strand starting at position 3751 of SEQ ID NO: 4017
gcaaucuagagaugaaagu

SEQ ID NO: 312891 - RNA, 19 nt, Artificial Sequence
  Description of Artificial Sequence: Synthetic oligonucleotide
  Antisense strand to SEQ ID NO: 312890
acuuucaucucuagauugc

SEQ ID NO: 312892 - RNA, 19 nt, Artificial Sequence
  Description of Artificial Sequence: Synthetic oligonucleotide
  Sense strand starting at position 3762 of SEQ ID NO: 4017
augaaaguaacgggaaguu

SEQ ID NO: 312893 - RNA, 19 nt, Artificial Sequence
  Description of Artificial Sequence: Synthetic oligonucleotide
  Antisense strand to SEQ ID NO: 312892
aacuucccguuacuuucau

SEQ ID NO: 312894 - RNA, 19 nt, Artificial Sequence
  Description of Artificial Sequence: Synthetic oligonucleotide
  Sense strand starting at position 3815 of SEQ ID NO: 4017
cacuuaacauggucaugga

SEQ ID NO: 312895 - RNA, 19 nt, Artificial Sequence
  Description of Artificial Sequence: Synthetic oligonucleotide
  Antisense strand to SEQ ID NO: 312894
uccaugaccauguuaagug

SEQ ID NO: 312896 - RNA, 19 nt, Artificial Sequence
  Description of Artificial Sequence: Synthetic oligonucleotide
  Sense strand starting at position 3830 of SEQ ID NO: 4017
uggagaggaucuuggaaac

SEQ ID NO: 312897 - RNA, 19 nt, Artificial Sequence
  Description of Artificial Sequence: Synthetic oligonucleotide
  Antisense strand to SEQ ID NO: 312896
guuuccaagauccucucca

SEQ ID NO: 312898 - RNA, 19 nt, Artificial Sequence
  Description of Artificial Sequence: Synthetic oligonucleotide
  Sense strand starting at position 64 of SEQ ID NO: 4018
ccagauauuugacaacugu

SEQ ID NO: 312899 - RNA, 19 nt, Artificial Sequence
  Description of Artificial Sequence: Synthetic oligonucleotide
  Antisense strand to SEQ ID NO: 312898
acaguugucaaauaucugg

SEQ ID NO: 312900 - RNA, 19 nt, Artificial Sequence
  Description of Artificial Sequence: Synthetic oligonucleotide
  Sense strand starting at position 89 of SEQ ID NO: 4018
aaaggauuggucugccaag

SEQ ID NO: 312901 - RNA, 19 nt, Artificial Sequence
  Description of Artificial Sequence: Synthetic oligonucleotide
  Antisense strand to SEQ ID NO: 312900
cuuggcagaccaauccuuu

SEQ ID NO: 312902 - RNA, 19 nt, Artificial Sequence
  Description of Artificial Sequence: Synthetic oligonucleotide
  Sense strand starting at position 90 of SEQ ID NO: 4018
aaggauuggucugccaaga

SEQ ID NO: 312903 - RNA, 19 nt, Artificial Sequence
  Description of Artificial Sequence: Synthetic oligonucleotide
  Antisense strand to SEQ ID NO: 312902
ucuuggcagaccaauccuu

SEQ ID NO: 312904 - RNA, 19 nt, Artificial Sequence
  Description of Artificial Sequence: Synthetic oligonucleotide
  Sense strand starting at position 218 of SEQ ID NO: 4018
gugaucucuugacccuaga

SEQ ID NO: 312905 - RNA, 19 nt, Artificial Sequence
  Description of Artificial Sequence: Synthetic oligonucleotide
  Antisense strand to SEQ ID NO: 312904
ucuagggucaagagaucac

SEQ ID NO: 312906 - RNA, 19 nt, Artificial Sequence
  Description of Artificial Sequence: Synthetic oligonucleotide
  Sense strand starting at position 258 of SEQ ID NO: 4018
aauuccuaucagggaaguu

SEQ ID NO: 312907 - RNA, 19 nt, Artificial Sequence
  Description of Artificial Sequence: Synthetic oligonucleotide
  Antisense strand to SEQ ID NO: 312906
aacuucccugauaggaauu

SEQ ID NO: 312908 - RNA, 19 nt, Artificial Sequence
  Description of Artificial Sequence: Synthetic oligonucleotide
  Sense strand starting at position 286 of SEQ ID NO: 4018
uucuaaaugugguuauauc

SEQ ID NO: 312909 - RNA, 19 nt, Artificial Sequence
  Description of Artificial Sequence: Synthetic oligonucleotide
  Antisense strand to SEQ ID NO: 312908
gauauaaccacauuuagaa

SEQ ID NO: 312910 - RNA, 19 nt, Artificial Sequence
  Description of Artificial Sequence: Synthetic oligonucleotide
  Sense strand starting at position 287 of SEQ ID NO: 4018
ucuaaaugugguuauaucu

SEQ ID NO: 312911 - RNA, 19 nt, Artificial Sequence
  Description of Artificial Sequence: Synthetic oligonucleotide
  Antisense strand to SEQ ID NO: 312910
agauauaaccacauuuaga

SEQ ID NO: 312912 - RNA, 19 nt, Artificial Sequence
  Description of Artificial Sequence: Synthetic oligonucleotide
  Sense strand starting at position 592 of SEQ ID NO: 4018
ugaauuagguauccaguaa

SEQ ID NO: 312913 - RNA, 19 nt, Artificial Sequence
  Description of Artificial Sequence: Synthetic oligonucleotide
  Antisense strand to SEQ ID NO: 312912
uuacuggauaccuaauuca

SEQ ID NO: 312914 - RNA, 19 nt, Artificial Sequence
  Description of Artificial Sequence: Synthetic oligonucleotide
  Sense strand starting at position 634 of SEQ ID NO: 4018
uggaacuuauugucuggaa

SEQ ID NO: 312915 - RNA, 19 nt, Artificial Sequence
  Description of Artificial Sequence: Synthetic oligonucleotide
  Antisense strand to SEQ ID NO: 312914
uuccagacaauaaguucca

SEQ ID NO: 312916 - RNA, 19 nt, Artificial Sequence
  Description of Artificial Sequence: Synthetic oligonucleotide
  Sense strand starting at position 635 of SEQ ID NO: 4018
ggaacuuauugucuggaag

SEQ ID NO: 312917 - RNA, 19 nt, Artificial Sequence
  Description of Artificial Sequence: Synthetic oligonucleotide
  Antisense strand to SEQ ID NO: 312916
cuuccagacaauaaguucc

SEQ ID NO: 312918 - RNA, 19 nt, Artificial Sequence
  Description of Artificial Sequence: Synthetic oligonucleotide
  Sense strand starting at position 636 of SEQ ID NO: 4018
gaacuuauugucuggaagc

SEQ ID NO: 312919 - RNA, 19 nt, Artificial Sequence
  Description of Artificial Sequence: Synthetic oligonucleotide
  Antisense strand to SEQ ID NO: 312918
gcuuccagacaauaaguuc

SEQ ID NO: 312920 - RNA, 19 nt, Artificial Sequence
  Description of Artificial Sequence: Synthetic oligonucleotide
  Sense strand starting at position 650 of SEQ ID NO: 4018
gaagcagaauggucuauau

SEQ ID NO: 312921 - RNA, 19 nt, Artificial Sequence
  Description of Artificial Sequence: Synthetic oligonucleotide
  Antisense strand to SEQ ID NO: 312920
auauagaccauucugcuuc

SEQ ID NO: 312922 - RNA, 19 nt, Artificial Sequence
  Description of Artificial Sequence: Synthetic oligonucleotide
  Sense strand starting at position 805 of SEQ ID NO: 4018
ccacuagagcuacaaaguu

SEQ ID NO: 312923 - RNA, 19 nt, Artificial Sequence
  Description of Artificial Sequence: Synthetic oligonucleotide
  Antisense strand to SEQ ID NO: 312922
aacuuuguagcucuagugg

SEQ ID NO: 312924 - RNA, 19 nt, Artificial Sequence
  Description of Artificial Sequence: Synthetic oligonucleotide
  Sense strand starting at position 924 of SEQ ID NO: 4018
gggaucaguugcucaaacu

SEQ ID NO: 312925 - RNA, 19 nt, Artificial Sequence
  Description of Artificial Sequence: Synthetic oligonucleotide
  Antisense strand to SEQ ID NO: 312924
aguuugagcaacugauccc

SEQ ID NO: 312926 - RNA, 19 nt, Artificial Sequence
  Description of Artificial Sequence: Synthetic oligonucleotide
  Sense strand starting at position 925 of SEQ ID NO: 4018
ggaucaguugcucaaacuc

SEQ ID NO: 312927 - RNA, 19 nt, Artificial Sequence
  Description of Artificial Sequence: Synthetic oligonucleotide
  Antisense strand to SEQ ID NO: 312926
gaguuugagcaacugaucc

SEQ ID NO: 312928 - RNA, 19 nt, Artificial Sequence
  Description of Artificial Sequence: Synthetic oligonucleotide
  Sense strand starting at position 948 of SEQ ID NO: 4018
cuuguuuaucuguauugaa

SEQ ID NO: 312929 - RNA, 19 nt, Artificial Sequence
  Description of Artificial Sequence: Synthetic oligonucleotide
  Antisense strand to SEQ ID NO: 312928
uucaauacagauaaacaag

SEQ ID NO: 312930 - RNA, 19 nt, Artificial Sequence
  Description of Artificial Sequence: Synthetic oligonucleotide
  Sense strand starting at position 1073 of SEQ ID NO: 4018
uucuguuacugaucuggga

SEQ ID NO: 312931 - RNA, 19 nt, Artificial Sequence
  Description of Artificial Sequence: Synthetic oligonucleotide
  Antisense strand to SEQ ID NO: 312930
ucccagaucaguaacagaa

SEQ ID NO: 312932 - RNA, 19 nt, Artificial Sequence
  Description of Artificial Sequence: Synthetic oligonucleotide
  Sense strand starting at position 1075 of SEQ ID NO: 4018
cuguuacugaucugggaca

SEQ ID NO: 312933 - RNA, 19 nt, Artificial Sequence
  Description of Artificial Sequence: Synthetic oligonucleotide
  Antisense strand to SEQ ID NO: 312932
ugucccagaucaguaacag

SEQ ID NO: 312934 - RNA, 19 nt, Artificial Sequence
  Description of Artificial Sequence: Synthetic oligonucleotide
  Sense strand starting at position 1087 of SEQ ID NO: 4018
ugggacaccaauggucaua

SEQ ID NO: 312935 - RNA, 19 nt, Artificial Sequence
  Description of Artificial Sequence: Synthetic oligonucleotide
  Antisense strand to SEQ ID NO: 312934
uaugaccauugguguccca

SEQ ID NO: 312936 - RNA, 19 nt, Artificial Sequence
  Description of Artificial Sequence: Synthetic oligonucleotide
  Sense strand starting at position 1314 of SEQ ID NO: 4018
ucaauaaaugcgggauacu

SEQ ID NO: 312937 - RNA, 19 nt, Artificial Sequence
  Description of Artificial Sequence: Synthetic oligonucleotide
  Antisense strand to SEQ ID NO: 312936
aguaucccgcauuuauuga

SEQ ID NO: 312938 - RNA, 19 nt, Artificial Sequence
  Description of Artificial Sequence: Synthetic oligonucleotide
  Sense strand starting at position 1325 of SEQ ID NO: 4018
gggauacuacguuauuaua

SEQ ID NO: 312939 - RNA, 19 nt, Artificial Sequence
  Description of Artificial Sequence: Synthetic oligonucleotide
  Antisense strand to SEQ ID NO: 312938
uauaauaacguaguauccc

SEQ ID NO: 312940 - RNA, 19 nt, Artificial Sequence
  Description of Artificial Sequence: Synthetic oligonucleotide
  Sense strand starting at position 1412 of SEQ ID NO: 4018
caacaagcccugugggaua

SEQ ID NO: 312941 - RNA, 19 nt, Artificial Sequence
  Description of Artificial Sequence: Synthetic oligonucleotide
  Antisense strand to SEQ ID NO: 312940
uaucccacagggcuuguug

SEQ ID NO: 312942 - RNA, 19 nt, Artificial Sequence
  Description of Artificial Sequence: Synthetic oligonucleotide
  Sense strand starting at position 1479 of SEQ ID NO: 4018
caggcucggaaguaauaga

SEQ ID NO: 312943 - RNA, 19 nt, Artificial Sequence
  Description of Artificial Sequence: Synthetic oligonucleotide
  Antisense strand to SEQ ID NO: 312942
ucuauuacuuccgagccug

SEQ ID NO: 312944 - RNA, 19 nt, Artificial Sequence
  Description of Artificial Sequence: Synthetic oligonucleotide
  Sense strand starting at position 2300 of SEQ ID NO: 4018
gucagagcucuggaguuag

SEQ ID NO: 312945 - RNA, 19 nt, Artificial Sequence
  Description of Artificial Sequence: Synthetic oligonucleotide
  Antisense strand to SEQ ID NO: 312944
cuaacuccagagcucugac

SEQ ID NO: 312946 - RNA, 19 nt, Artificial Sequence
  Description of Artificial Sequence: Synthetic oligonucleotide
  Sense strand starting at position 2469 of SEQ ID NO: 4018
ucuugaguaugaguaugaa

SEQ ID NO: 312947 - RNA, 19 nt, Artificial Sequence
  Description of Artificial Sequence: Synthetic oligonucleotide
  Antisense strand to SEQ ID NO: 312946
uucauacucauacucaaga

SEQ ID NO: 312948 - RNA, 19 nt, Artificial Sequence
  Description of Artificial Sequence: Synthetic oligonucleotide
  Sense strand starting at position 2488 of SEQ ID NO: 4018
ugcagaaagucacuuaacu

SEQ ID NO: 312949 - RNA, 19 nt, Artificial Sequence
  Description of Artificial Sequence: Synthetic oligonucleotide
  Antisense strand to SEQ ID NO: 312948
aguuaagugacuuucugca

SEQ ID NO: 312950 - RNA, 19 nt, Artificial Sequence
  Description of Artificial Sequence: Synthetic oligonucleotide
  Sense strand starting at position 2623 of SEQ ID NO: 4018
gggagauucuacucugcag

SEQ ID NO: 312951 - RNA, 19 nt, Artificial Sequence
  Description of Artificial Sequence: Synthetic oligonucleotide
  Antisense strand to SEQ ID NO: 312950
cugcagaguagaaucuccc

SEQ ID NO: 312952 - RNA, 19 nt, Artificial Sequence
  Description of Artificial Sequence: Synthetic oligonucleotide
  Sense strand starting at position 2625 of SEQ ID NO: 4018
gagauucuacucugcagag

SEQ ID NO: 312953 - RNA, 19 nt, Artificial Sequence
  Description of Artificial Sequence: Synthetic oligonucleotide
  Antisense strand to SEQ ID NO: 312952
cucugcagaguagaaucuc

SEQ ID NO: 312954 - RNA, 19 nt, Artificial Sequence
  Description of Artificial Sequence: Synthetic oligonucleotide
  Sense strand starting at position 2626 of SEQ ID NO: 4018
agauucuacucugcagaga

SEQ ID NO: 312955 - RNA, 19 nt, Artificial Sequence
  Description of Artificial Sequence: Synthetic oligonucleotide
  Antisense strand to SEQ ID NO: 312954
ucucugcagaguagaaucu

SEQ ID NO: 312956 - RNA, 19 nt, Artificial Sequence
  Description of Artificial Sequence: Synthetic oligonucleotide
  Sense strand starting at position 2672 of SEQ ID NO: 4018
augagacuuuaucugcuaa

SEQ ID NO: 312957 - RNA, 19 nt, Artificial Sequence
  Description of Artificial Sequence: Synthetic oligonucleotide
  Antisense strand to SEQ ID NO: 312956
uuagcagauaaagucucau

SEQ ID NO: 312958 - RNA, 19 nt, Artificial Sequence
  Description of Artificial Sequence: Synthetic oligonucleotide
  Sense strand starting at position 2739 of SEQ ID NO: 4018
agguuuaauuuagaagaca

SEQ ID NO: 312959 - RNA, 19 nt, Artificial Sequence
  Description of Artificial Sequence: Synthetic oligonucleotide
  Antisense strand to SEQ ID NO: 312958
ugucuucuaaauuaaaccu

SEQ ID NO: 312960 - RNA, 19 nt, Artificial Sequence
  Description of Artificial Sequence: Synthetic oligonucleotide
  Sense strand starting at position 2878 of SEQ ID NO: 4018
agaaaugacugcuuucuau

SEQ ID NO: 312961 - RNA, 19 nt, Artificial Sequence
  Description of Artificial Sequence: Synthetic oligonucleotide
  Antisense strand to SEQ ID NO: 312960
auagaaagcagucauuucu

SEQ ID NO: 312962 - RNA, 19 nt, Artificial Sequence
  Description of Artificial Sequence: Synthetic oligonucleotide
  Sense strand starting at position 3302 of SEQ ID NO: 4018
ggguaagauuuccaagaga

SEQ ID NO: 312963 - RNA, 19 nt, Artificial Sequence
  Description of Artificial Sequence: Synthetic oligonucleotide
  Antisense strand to SEQ ID NO: 312962
ucucuuggaaaucuuaccc

SEQ ID NO: 312964 - RNA, 19 nt, Artificial Sequence
  Description of Artificial Sequence: Synthetic oligonucleotide
  Sense strand starting at position 3319 of SEQ ID NO: 4018
gaaagaucagcucggcaga

SEQ ID NO: 312965 - RNA, 19 nt, Artificial Sequence
  Description of Artificial Sequence: Synthetic oligonucleotide
  Antisense strand to SEQ ID NO: 312964
ucugccgagcugaucuuuc

SEQ ID NO: 312966 - RNA, 19 nt, Artificial Sequence
  Description of Artificial Sequence: Synthetic oligonucleotide
  Sense strand starting at position 3320 of SEQ ID NO: 4018
aaagaucagcucggcagaa

SEQ ID NO: 312967 - RNA, 19 nt, Artificial Sequence
  Description of Artificial Sequence: Synthetic oligonucleotide
  Antisense strand to SEQ ID NO: 312966
uucugccgagcugaucuuu

SEQ ID NO: 312968 - RNA, 19 nt, Artificial Sequence
  Description of Artificial Sequence: Synthetic oligonucleotide
  Sense strand starting at position 3482 of SEQ ID NO: 4018
aguggcuauccgggaaaca

SEQ ID NO: 312969 - RNA, 19 nt, Artificial Sequence
  Description of Artificial Sequence: Synthetic oligonucleotide
  Antisense strand to SEQ ID NO: 312968
uguuucccggauagccacu

SEQ ID NO: 312970 - RNA, 19 nt, Artificial Sequence
  Description of Artificial Sequence: Synthetic oligonucleotide
  Sense strand starting at position 3483 of SEQ ID NO: 4018
guggcuauccgggaaacaa

SEQ ID NO: 312971 - RNA, 19 nt, Artificial Sequence
  Description of Artificial Sequence: Synthetic oligonucleotide
  Antisense strand to SEQ ID NO: 312970
uuguuucccggauagccac

SEQ ID NO: 312972 - RNA, 19 nt, Artificial Sequence
  Description of Artificial Sequence: Synthetic oligonucleotide
  Sense strand starting at position 3574 of SEQ ID NO: 4018
agccaaaucugauuaguau

SEQ ID NO: 312973 - RNA, 19 nt, Artificial Sequence
  Description of Artificial Sequence: Synthetic oligonucleotide
  Antisense strand to SEQ ID NO: 312972
auacuaaucagauuuggcu

SEQ ID NO: 312974 - RNA, 19 nt, Artificial Sequence
  Description of Artificial Sequence: Synthetic oligonucleotide
  Sense strand starting at position 3575 of SEQ ID NO: 4018
gccaaaucugauuaguauc

SEQ ID NO: 312975 - RNA, 19 nt, Artificial Sequence
  Description of Artificial Sequence: Synthetic oligonucleotide
  Antisense strand to SEQ ID NO: 312974
gauacuaaucagauuuggc

SEQ ID NO: 312976 - RNA, 19 nt, Artificial Sequence
  Description of Artificial Sequence: Synthetic oligonucleotide
  Sense strand starting at position 3955 of SEQ ID NO: 4018
cuuggccucagaggaauau

SEQ ID NO: 312977 - RNA, 19 nt, Artificial Sequence
  Description of Artificial Sequence: Synthetic oligonucleotide
  Antisense strand to SEQ ID NO: 312976
auauuccucugaggccaag

SEQ ID NO: 312978 - RNA, 19 nt, Artificial Sequence
  Description of Artificial Sequence: Synthetic oligonucleotide
  Sense strand starting at position 503 of SEQ ID NO: 4019
cuagguucuuucucagacu

SEQ ID NO: 312979 - RNA, 19 nt, Artificial Sequence
  Description of Artificial Sequence: Synthetic oligonucleotide
  Antisense strand to SEQ ID NO: 312978
agucugagaaagaaccuag

SEQ ID NO: 312980 - RNA, 19 nt, Artificial Sequence
  Description of Artificial Sequence: Synthetic oligonucleotide
  Sense strand starting at position 563 of SEQ ID NO: 4019
uaagucuggucacuggaaa

SEQ ID NO: 312981 - RNA, 19 nt, Artificial Sequence
  Description of Artificial Sequence: Synthetic oligonucleotide
  Antisense strand to SEQ ID NO: 312980
uuuccagugaccagacuua

SEQ ID NO: 312982 - RNA, 19 nt, Artificial Sequence
  Description of Artificial Sequence: Synthetic oligonucleotide
  Sense strand starting at position 589 of SEQ ID NO: 4019
gugcacgaaguguaauaaa

SEQ ID NO: 312983 - RNA, 19 nt, Artificial Sequence
  Description of Artificial Sequence: Synthetic oligonucleotide
  Antisense strand to SEQ ID NO: 312982
uuuauuacacuucgugcac

SEQ ID NO: 312984 - RNA, 19 nt, Artificial Sequence
  Description of Artificial Sequence: Synthetic oligonucleotide
  Sense strand starting at position 881 of SEQ ID NO: 4019
ggcgacagagcucaagaaa

SEQ ID NO: 312985 - RNA, 19 nt, Artificial Sequence
  Description of Artificial Sequence: Synthetic oligonucleotide
  Antisense strand to SEQ ID NO: 312984
uuucuugagcucugucgcc

SEQ ID NO: 312986 - RNA, 19 nt, Artificial Sequence
  Description of Artificial Sequence: Synthetic oligonucleotide
  Sense strand starting at position 923 of SEQ ID NO: 4019
gcagaauaauauccagguu

SEQ ID NO: 312987 - RNA, 19 nt, Artificial Sequence
  Description of Artificial Sequence: Synthetic oligonucleotide
  Antisense strand to SEQ ID NO: 312986
aaccuggauauuauucugc

SEQ ID NO: 312988 - RNA, 19 nt, Artificial Sequence
  Description of Artificial Sequence: Synthetic oligonucleotide
  Sense strand starting at position 926 of SEQ ID NO: 4019
gaauaauauccagguuaug

SEQ ID NO: 312989 - RNA, 19 nt, Artificial Sequence
  Description of Artificial Sequence: Synthetic oligonucleotide
  Antisense strand to SEQ ID NO: 312988
cauaaccuggauauuauuc

SEQ ID NO: 312990 - RNA, 19 nt, Artificial Sequence
  Description of Artificial Sequence: Synthetic oligonucleotide
  Sense strand starting at position 929 of SEQ ID NO: 4019
uaauauccagguuaugagu

SEQ ID NO: 312991 - RNA, 19 nt, Artificial Sequence
  Description of Artificial Sequence: Synthetic oligonucleotide
  Antisense strand to SEQ ID NO: 312990
acucauaaccuggauauua

SEQ ID NO: 312992 - RNA, 19 nt, Artificial Sequence
  Description of Artificial Sequence: Synthetic oligonucleotide
  Sense strand starting at position 936 of SEQ ID NO: 4019
cagguuaugaguuggauag

SEQ ID NO: 312993 - RNA, 19 nt, Artificial Sequence
  Description of Artificial Sequence: Synthetic oligonucleotide
  Antisense strand to SEQ ID NO: 312992
cuauccaacucauaaccug

SEQ ID NO: 312994 - RNA, 19 nt, Artificial Sequence
  Description of Artificial Sequence: Synthetic oligonucleotide
  Sense strand starting at position 980 of SEQ ID NO: 4019
ucuccugugcuguaggaaa

SEQ ID NO: 312995 - RNA, 19 nt, Artificial Sequence
  Description of Artificial Sequence: Synthetic oligonucleotide
  Antisense strand to SEQ ID NO: 312994
uuuccuacagcacaggaga

SEQ ID NO: 312996 - RNA, 19 nt, Artificial Sequence
  Description of Artificial Sequence: Synthetic oligonucleotide
  Sense strand starting at position 1010 of SEQ ID NO: 4019
acaaucgcuuccucagaau

SEQ ID NO: 312997 - RNA, 19 nt, Artificial Sequence
  Description of Artificial Sequence: Synthetic oligonucleotide
  Antisense strand to SEQ ID NO: 312996
auucugaggaagcgauugu

SEQ ID NO: 312998 - RNA, 19 nt, Artificial Sequence
  Description of Artificial Sequence: Synthetic oligonucleotide
  Sense strand starting at position 1067 of SEQ ID NO: 4019
guugguuuacacuaaacuu

SEQ ID NO: 312999 - RNA, 19 nt, Artificial Sequence
  Description of Artificial Sequence: Synthetic oligonucleotide
  Antisense strand to SEQ ID NO: 312998
aaguuuaguguaaaccaac

SEQ ID NO: 313000 - RNA, 19 nt, Artificial Sequence
  Description of Artificial Sequence: Synthetic oligonucleotide
  Sense strand starting at position 1095 of SEQ ID NO: 4019
cugcgucaauuucucugaa

SEQ ID NO: 313001 - RNA, 19 nt, Artificial Sequence
  Description of Artificial Sequence: Synthetic oligonucleotide
  Antisense strand to SEQ ID NO: 313000
uucagagaaauugacgcag

SEQ ID NO: 313002 - RNA, 19 nt, Artificial Sequence
  Description of Artificial Sequence: Synthetic oligonucleotide
  Sense strand starting at position 1096 of SEQ ID NO: 4019
ugcgucaauuucucugaau

SEQ ID NO: 313003 - RNA, 19 nt, Artificial Sequence
  Description of Artificial Sequence: Synthetic oligonucleotide
  Antisense strand to SEQ ID NO: 313002
auucagagaaauugacgca

SEQ ID NO: 313004 - RNA, 19 nt, Artificial Sequence
  Description of Artificial Sequence: Synthetic oligonucleotide
  Sense strand starting at position 1097 of SEQ ID NO: 4019
gcgucaauuucucugaaua

SEQ ID NO: 313005 - RNA, 19 nt, Artificial Sequence
  Description of Artificial Sequence: Synthetic oligonucleotide
  Antisense strand to SEQ ID NO: 313004
uauucagagaaauugacgc

SEQ ID NO: 313006 - RNA, 19 nt, Artificial Sequence
  Description of Artificial Sequence: Synthetic oligonucleotide
  Sense strand starting at position 1192 of SEQ ID NO: 4019
uuguauuugcagugccgaa

SEQ ID NO: 313007 - RNA, 19 nt, Artificial Sequence
  Description of Artificial Sequence: Synthetic oligonucleotide
  Antisense strand to SEQ ID NO: 313006
uucggcacugcaaauacaa

SEQ ID NO: 313008 - RNA, 19 nt, Artificial Sequence
  Description of Artificial Sequence: Synthetic oligonucleotide
  Sense strand starting at position 1204 of SEQ ID NO: 4019
ugccgaaucugaucccaga

SEQ ID NO: 313009 - RNA, 19 nt, Artificial Sequence
  Description of Artificial Sequence: Synthetic oligonucleotide
  Antisense strand to SEQ ID NO: 313008
ucugggaucagauucggca

SEQ ID NO: 313010 - RNA, 19 nt, Artificial Sequence
  Description of Artificial Sequence: Synthetic oligonucleotide
  Sense strand starting at position 1292 of SEQ ID NO: 4019
ugagaucucccuuggccaa

SEQ ID NO: 313011 - RNA, 19 nt, Artificial Sequence
  Description of Artificial Sequence: Synthetic oligonucleotide
  Antisense strand to SEQ ID NO: 313010
uuggccaagggagaucuca

SEQ ID NO: 313012 - RNA, 19 nt, Artificial Sequence
  Description of Artificial Sequence: Synthetic oligonucleotide
  Sense strand starting at position 1323 of SEQ ID NO: 4019
cugaguaagggcgaguaau

SEQ ID NO: 313013 - RNA, 19 nt, Artificial Sequence
  Description of Artificial Sequence: Synthetic oligonucleotide
  Antisense strand to SEQ ID NO: 313012
auuacucgcccuuacucag

SEQ ID NO: 313014 - RNA, 19 nt, Artificial Sequence
  Description of Artificial Sequence: Synthetic oligonucleotide
  Sense strand starting at position 1996 of SEQ ID NO: 4019
gggauuggcucuuuguaau

SEQ ID NO: 313015 - RNA, 19 nt, Artificial Sequence
  Description of Artificial Sequence: Synthetic oligonucleotide
  Antisense strand to SEQ ID NO: 313014
auuacaaagagccaauccc

SEQ ID NO: 313016 - RNA, 19 nt, Artificial Sequence
  Description of Artificial Sequence: Synthetic oligonucleotide
  Sense strand starting at position 2038 of SEQ ID NO: 4019
ggaagauucugauuggguc

SEQ ID NO: 313017 - RNA, 19 nt, Artificial Sequence
  Description of Artificial Sequence: Synthetic oligonucleotide
  Antisense strand to SEQ ID NO: 313016
gacccaaucagaaucuucc

SEQ ID NO: 313018 - RNA, 19 nt, Artificial Sequence
  Description of Artificial Sequence: Synthetic oligonucleotide
  Sense strand starting at position 2039 of SEQ ID NO: 4019
gaagauucugauugggucu

SEQ ID NO: 313019 - RNA, 19 nt, Artificial Sequence
  Description of Artificial Sequence: Synthetic oligonucleotide
  Antisense strand to SEQ ID NO: 313018
agacccaaucagaaucuuc

SEQ ID NO: 313020 - RNA, 19 nt, Artificial Sequence
  Description of Artificial Sequence: Synthetic oligonucleotide
  Sense strand starting at position 2098 of SEQ ID NO: 4019
ucacuuguaauucguggaa

SEQ ID NO: 313021 - RNA, 19 nt, Artificial Sequence
  Description of Artificial Sequence: Synthetic oligonucleotide
  Antisense strand to SEQ ID NO: 313020
uuccacgaauuacaaguga

SEQ ID NO: 313022 - RNA, 19 nt, Artificial Sequence
  Description of Artificial Sequence: Synthetic oligonucleotide
  Sense strand starting at position 2101 of SEQ ID NO: 4019
cuuguaauucguggaaauc

SEQ ID NO: 313023 - RNA, 19 nt, Artificial Sequence
  Description of Artificial Sequence: Synthetic oligonucleotide
  Antisense strand to SEQ ID NO: 313022
gauuuccacgaauuacaag

SEQ ID NO: 313024 - RNA, 19 nt, Artificial Sequence
  Description of Artificial Sequence: Synthetic oligonucleotide
  Sense strand starting at position 2102 of SEQ ID NO: 4019
uuguaauucguggaaaucu

SEQ ID NO: 313025 - RNA, 19 nt, Artificial Sequence
  Description of Artificial Sequence: Synthetic oligonucleotide
  Antisense strand to SEQ ID NO: 313024
agauuuccacgaauuacaa

SEQ ID NO: 313026 - RNA, 19 nt, Artificial Sequence
  Description of Artificial Sequence: Synthetic oligonucleotide
  Sense strand starting at position 2211 of SEQ ID NO: 4019
guggguggguuaaagaauu

SEQ ID NO: 313027 - RNA, 19 nt, Artificial Sequence
  Description of Artificial Sequence: Synthetic oligonucleotide
  Antisense strand to SEQ ID NO: 313026
aauucuuuaacccacccac

SEQ ID NO: 313028 - RNA, 19 nt, Artificial Sequence
  Description of Artificial Sequence: Synthetic oligonucleotide
  Sense strand starting at position 2309 of SEQ ID NO: 4019
guaggaucuugacuaaguu

SEQ ID NO: 313029 - RNA, 19 nt, Artificial Sequence
  Description of Artificial Sequence: Synthetic oligonucleotide
  Antisense strand to SEQ ID NO: 313028
aacuuagucaagauccuac

SEQ ID NO: 313030 - RNA, 19 nt, Artificial Sequence
  Description of Artificial Sequence: Synthetic oligonucleotide
  Sense strand starting at position 2330 of SEQ ID NO: 4019
auguaaugucuggauggca

SEQ ID NO: 313031 - RNA, 19 nt, Artificial Sequence
  Description of Artificial Sequence: Synthetic oligonucleotide
  Antisense strand to SEQ ID NO: 313030
ugccauccagacauuacau

SEQ ID NO: 313032 - RNA, 19 nt, Artificial Sequence
  Description of Artificial Sequence: Synthetic oligonucleotide
  Sense strand starting at position 2426 of SEQ ID NO: 4019
agagacuagggcuguagau

SEQ ID NO: 313033 - RNA, 19 nt, Artificial Sequence
  Description of Artificial Sequence: Synthetic oligonucleotide
  Antisense strand to SEQ ID NO: 313032
aucuacagcccuagucucu

SEQ ID NO: 313034 - RNA, 19 nt, Artificial Sequence
  Description of Artificial Sequence: Synthetic oligonucleotide
  Sense strand starting at position 2439 of SEQ ID NO: 4019
guagauacauuccuuuaug

SEQ ID NO: 313035 - RNA, 19 nt, Artificial Sequence
  Description of Artificial Sequence: Synthetic oligonucleotide
  Antisense strand to SEQ ID NO: 313034
cauaaaggaauguaucuac

SEQ ID NO: 313036 - RNA, 19 nt, Artificial Sequence
  Description of Artificial Sequence: Synthetic oligonucleotide
  Sense strand starting at position 2491 of SEQ ID NO: 4019
gaaacagauuuaggacagu

SEQ ID NO: 313037 - RNA, 19 nt, Artificial Sequence
  Description of Artificial Sequence: Synthetic oligonucleotide
  Antisense strand to SEQ ID NO: 313036
acuguccuaaaucuguuuc

SEQ ID NO: 313038 - RNA, 19 nt, Artificial Sequence
  Description of Artificial Sequence: Synthetic oligonucleotide
  Sense strand starting at position 2638 of SEQ ID NO: 4019
acauaaauguggcuuccaa

SEQ ID NO: 313039 - RNA, 19 nt, Artificial Sequence
  Description of Artificial Sequence: Synthetic oligonucleotide
  Antisense strand to SEQ ID NO: 313038
uuggaagccacauuuaugu

SEQ ID NO: 313040 - RNA, 19 nt, Artificial Sequence
  Description of Artificial Sequence: Synthetic oligonucleotide
  Sense strand starting at position 2725 of SEQ ID NO: 4019
gagcaaucgagagacaugu

SEQ ID NO: 313041 - RNA, 19 nt, Artificial Sequence
  Description of Artificial Sequence: Synthetic oligonucleotide
  Antisense strand to SEQ ID NO: 313040
acaugucucucgauugcuc

SEQ ID NO: 313042 - RNA, 19 nt, Artificial Sequence
  Description of Artificial Sequence: Synthetic oligonucleotide
  Sense strand starting at position 2789 of SEQ ID NO: 4019
gguaacauguugguacuua

SEQ ID NO: 313043 - RNA, 19 nt, Artificial Sequence
  Description of Artificial Sequence: Synthetic oligonucleotide
  Antisense strand to SEQ ID NO: 313042
uaaguaccaacauguuacc

SEQ ID NO: 313044 - RNA, 19 nt, Artificial Sequence
  Description of Artificial Sequence: Synthetic oligonucleotide
  Sense strand starting at position 2801 of SEQ ID NO: 4019
guacuuaaaggaugaguaa

SEQ ID NO: 313045 - RNA, 19 nt, Artificial Sequence
  Description of Artificial Sequence: Synthetic oligonucleotide
  Antisense strand to SEQ ID NO: 313044
uuacucauccuuuaaguac

SEQ ID NO: 313046 - RNA, 19 nt, Artificial Sequence
  Description of Artificial Sequence: Synthetic oligonucleotide
  Sense strand starting at position 3027 of SEQ ID NO: 4019
ucucauucugucgacagga

SEQ ID NO: 313047 - RNA, 19 nt, Artificial Sequence
  Description of Artificial Sequence: Synthetic oligonucleotide
  Antisense strand to SEQ ID NO: 313046
uccugucgacagaaugaga

SEQ ID NO: 313048 - RNA, 19 nt, Artificial Sequence
  Description of Artificial Sequence: Synthetic oligonucleotide
  Sense strand starting at position 3478 of SEQ ID NO: 4019
acccgaacucucugaaaca

SEQ ID NO: 313049 - RNA, 19 nt, Artificial Sequence
  Description of Artificial Sequence: Synthetic oligonucleotide
  Antisense strand to SEQ ID NO: 313048
uguuucagagaguucgggu

SEQ ID NO: 313050 - RNA, 19 nt, Artificial Sequence
  Description of Artificial Sequence: Synthetic oligonucleotide
  Sense strand starting at position 3524 of SEQ ID NO: 4019
gauuaagggcugugcuaga

SEQ ID NO: 313051 - RNA, 19 nt, Artificial Sequence
  Description of Artificial Sequence: Synthetic oligonucleotide
  Antisense strand to SEQ ID NO: 313050
ucuagcacagcccuuaauc

SEQ ID NO: 313052 - RNA, 19 nt, Artificial Sequence
  Description of Artificial Sequence: Synthetic oligonucleotide
  Sense strand starting at position 3935 of SEQ ID NO: 4019
gggccaugcgggcaacaau

SEQ ID NO: 313053 - RNA, 19 nt, Artificial Sequence
  Description of Artificial Sequence: Synthetic oligonucleotide
  Antisense strand to SEQ ID NO: 313052
auuguugcccgcauggccc

SEQ ID NO: 313054 - RNA, 19 nt, Artificial Sequence
  Description of Artificial Sequence: Synthetic oligonucleotide
  Sense strand starting at position 3959 of SEQ ID NO: 4019
ucuguaaggcauugagaua

SEQ ID NO: 313055 - RNA, 19 nt, Artificial Sequence
  Description of Artificial Sequence: Synthetic oligonucleotide
  Antisense strand to SEQ ID NO: 313054
uaucucaaugccuuacaga

SEQ ID NO: 313056 - RNA, 19 nt, Artificial Sequence
  Description of Artificial Sequence: Synthetic oligonucleotide
  Sense strand starting at position 3960 of SEQ ID NO: 4019
cuguaaggcauugagauau

SEQ ID NO: 313057 - RNA, 19 nt, Artificial Sequence
  Description of Artificial Sequence: Synthetic oligonucleotide
  Antisense strand to SEQ ID NO: 313056
auaucucaaugccuuacag

SEQ ID NO: 313058 - RNA, 19 nt, Artificial Sequence
  Description of Artificial Sequence: Synthetic oligonucleotide
  Sense strand starting at position 27 of SEQ ID NO: 4020
ucaugucucguggacuguu

SEQ ID NO: 313059 - RNA, 19 nt, Artificial Sequence
  Description of Artificial Sequence: Synthetic oligonucleotide
  Antisense strand to SEQ ID NO: 313058
aacaguccacgagacauga

SEQ ID NO: 313060 - RNA, 19 nt, Artificial Sequence
  Description of Artificial Sequence: Synthetic oligonucleotide
  Sense strand starting at position 51 of SEQ ID NO: 4020
gaggguaguagcugcuuua

SEQ ID NO: 313061 - RNA, 19 nt, Artificial Sequence
  Description of Artificial Sequence: Synthetic oligonucleotide
  Antisense strand to SEQ ID NO: 313060
uaaagcagcuacuacccuc

SEQ ID NO: 313062 - RNA, 19 nt, Artificial Sequence
  Description of Artificial Sequence: Synthetic oligonucleotide
  Sense strand starting at position 54 of SEQ ID NO: 4020
gguaguagcugcuuuaauu

SEQ ID NO: 313063 - RNA, 19 nt, Artificial Sequence
  Description of Artificial Sequence: Synthetic oligonucleotide
  Antisense strand to SEQ ID NO: 313062
aauuaaagcagcuacuacc

SEQ ID NO: 313064 - RNA, 19 nt, Artificial Sequence
  Description of Artificial Sequence: Synthetic oligonucleotide
  Sense strand starting at position 266 of SEQ ID NO: 4020
cgacuuuguccacgacuuu

SEQ ID NO: 313065 - RNA, 19 nt, Artificial Sequence
  Description of Artificial Sequence: Synthetic oligonucleotide
  Antisense strand to SEQ ID NO: 313064
aaagucguggacaaagucg

SEQ ID NO: 313066 - RNA, 19 nt, Artificial Sequence
  Description of Artificial Sequence: Synthetic oligonucleotide
  Sense strand starting at position 701 of SEQ ID NO: 4020
aagggagauuaguugguau

SEQ ID NO: 313067 - RNA, 19 nt, Artificial Sequence
  Description of Artificial Sequence: Synthetic oligonucleotide
  Antisense strand to SEQ ID NO: 313066
auaccaacuaaucucccuu

SEQ ID NO: 313068 - RNA, 19 nt, Artificial Sequence
  Description of Artificial Sequence: Synthetic oligonucleotide
  Sense strand starting at position 703 of SEQ ID NO: 4020
gggagauuaguugguauca

SEQ ID NO: 313069 - RNA, 19 nt, Artificial Sequence
  Description of Artificial Sequence: Synthetic oligonucleotide
  Antisense strand to SEQ ID NO: 313068
ugauaccaacuaaucuccc

SEQ ID NO: 313070 - RNA, 19 nt, Artificial Sequence
  Description of Artificial Sequence: Synthetic oligonucleotide
  Sense strand starting at position 704 of SEQ ID NO: 4020
ggagauuaguugguaucag

SEQ ID NO: 313071 - RNA, 19 nt, Artificial Sequence
  Description of Artificial Sequence: Synthetic oligonucleotide
  Antisense strand to SEQ ID NO: 313070
cugauaccaacuaaucucc

SEQ ID NO: 313072 - RNA, 19 nt, Artificial Sequence
  Description of Artificial Sequence: Synthetic oligonucleotide
  Sense strand starting at position 725 of SEQ ID NO: 4020
uuaaacagaucuuuguagu

SEQ ID NO: 313073 - RNA, 19 nt, Artificial Sequence
  Description of Artificial Sequence: Synthetic oligonucleotide
  Antisense strand to SEQ ID NO: 313072
acuacaaagaucuguuuaa

SEQ ID NO: 313074 - RNA, 19 nt, Artificial Sequence
  Description of Artificial Sequence: Synthetic oligonucleotide
  Sense strand starting at position 762 of SEQ ID NO: 4020
cgcugauccggacacucau

SEQ ID NO: 313075 - RNA, 19 nt, Artificial Sequence
  Description of Artificial Sequence: Synthetic oligonucleotide
  Antisense strand to SEQ ID NO: 313074
augaguguccggaucagcg

SEQ ID NO: 313076 - RNA, 19 nt, Artificial Sequence
  Description of Artificial Sequence: Synthetic oligonucleotide
  Sense strand starting at position 2305 of SEQ ID NO: 4020
acagcauccacgugaguca

SEQ ID NO: 313077 - RNA, 19 nt, Artificial Sequence
  Description of Artificial Sequence: Synthetic oligonucleotide
  Antisense strand to SEQ ID NO: 313076
ugacucacguggaugcugu

SEQ ID NO: 313078 - RNA, 19 nt, Artificial Sequence
  Description of Artificial Sequence: Synthetic oligonucleotide
  Sense strand starting at position 2337 of SEQ ID NO: 4020
gaaggcuuggccugucuaa

SEQ ID NO: 313079 - RNA, 19 nt, Artificial Sequence
  Description of Artificial Sequence: Synthetic oligonucleotide
  Antisense strand to SEQ ID NO: 313078
uuagacaggccaagccuuc

SEQ ID NO: 313080 - RNA, 19 nt, Artificial Sequence
  Description of Artificial Sequence: Synthetic oligonucleotide
  Sense strand starting at position 2459 of SEQ ID NO: 4020
auaagcuguuuccuagaca

SEQ ID NO: 313081 - RNA, 19 nt, Artificial Sequence
  Description of Artificial Sequence: Synthetic oligonucleotide
  Antisense strand to SEQ ID NO: 313080
ugucuaggaaacagcuuau

SEQ ID NO: 313082 - RNA, 19 nt, Artificial Sequence
  Description of Artificial Sequence: Synthetic oligonucleotide
  Sense strand starting at position 2462 of SEQ ID NO: 4020
agcuguuuccuagacaaac

SEQ ID NO: 313083 - RNA, 19 nt, Artificial Sequence
  Description of Artificial Sequence: Synthetic oligonucleotide
  Antisense strand to SEQ ID NO: 313082
guuugucuaggaaacagcu

SEQ ID NO: 313084 - RNA, 19 nt, Artificial Sequence
  Description of Artificial Sequence: Synthetic oligonucleotide
  Sense strand starting at position 2494 of SEQ ID NO: 4020
acuaaagugcaccguguaa

SEQ ID NO: 313085 - RNA, 19 nt, Artificial Sequence
  Description of Artificial Sequence: Synthetic oligonucleotide
  Antisense strand to SEQ ID NO: 313084
uuacacggugcacuuuagu

SEQ ID NO: 313086 - RNA, 19 nt, Artificial Sequence
  Description of Artificial Sequence: Synthetic oligonucleotide
  Sense strand starting at position 2496 of SEQ ID NO: 4020
uaaagugcaccguguaauu

SEQ ID NO: 313087 - RNA, 19 nt, Artificial Sequence
  Description of Artificial Sequence: Synthetic oligonucleotide
  Antisense strand to SEQ ID NO: 313086
aauuacacggugcacuuua

SEQ ID NO: 313088 - RNA, 19 nt, Artificial Sequence
  Description of Artificial Sequence: Synthetic oligonucleotide
  Sense strand starting at position 2601 of SEQ ID NO: 4020
aggcacuccuaagaaacau

SEQ ID NO: 313089 - RNA, 19 nt, Artificial Sequence
  Description of Artificial Sequence: Synthetic oligonucleotide
  Antisense strand to SEQ ID NO: 313088
auguuucuuaggagugccu

SEQ ID NO: 313090 - RNA, 19 nt, Artificial Sequence
  Description of Artificial Sequence: Synthetic oligonucleotide
  Sense strand starting at position 2612 of SEQ ID NO: 4020
agaaacaucuguggauaca

SEQ ID NO: 313091 - RNA, 19 nt, Artificial Sequence
  Description of Artificial Sequence: Synthetic oligonucleotide
  Antisense strand to SEQ ID NO: 313090
uguauccacagauguuucu

SEQ ID NO: 313092 - RNA, 19 nt, Artificial Sequence
  Description of Artificial Sequence: Synthetic oligonucleotide
  Sense strand starting at position 2735 of SEQ ID NO: 4020
gcgaauuucugccucagag

SEQ ID NO: 313093 - RNA, 19 nt, Artificial Sequence
  Description of Artificial Sequence: Synthetic oligonucleotide
  Antisense strand to SEQ ID NO: 313092
cucugaggcagaaauucgc

SEQ ID NO: 313094 - RNA, 19 nt, Artificial Sequence
  Description of Artificial Sequence: Synthetic oligonucleotide
  Sense strand starting at position 2744 of SEQ ID NO: 4020
ugccucagagagugagauu

SEQ ID NO: 313095 - RNA, 19 nt, Artificial Sequence
  Description of Artificial Sequence: Synthetic oligonucleotide
  Antisense strand to SEQ ID NO: 313094
aaucucacucucugaggca

SEQ ID NO: 313096 - RNA, 19 nt, Artificial Sequence
  Description of Artificial Sequence: Synthetic oligonucleotide
  Sense strand starting at position 2796 of SEQ ID NO: 4020
cuuaucaaugcuuaagaug

SEQ ID NO: 313097 - RNA, 19 nt, Artificial Sequence
  Description of Artificial Sequence: Synthetic oligonucleotide
  Antisense strand to SEQ ID NO: 313096
caucuuaagcauugauaag

SEQ ID NO: 313098 - RNA, 19 nt, Artificial Sequence
  Description of Artificial Sequence: Synthetic oligonucleotide
  Sense strand starting at position 2799 of SEQ ID NO: 4020
aucaaugcuuaagauggaa

SEQ ID NO: 313099 - RNA, 19 nt, Artificial Sequence
  Description of Artificial Sequence: Synthetic oligonucleotide
  Antisense strand to SEQ ID NO: 313098
uuccaucuuaagcauugau

SEQ ID NO: 313100 - RNA, 19 nt, Artificial Sequence
  Description of Artificial Sequence: Synthetic oligonucleotide
  Sense strand starting at position 2814 of SEQ ID NO: 4020
ggaagauguugcuucucau

SEQ ID NO: 313101 - RNA, 19 nt, Artificial Sequence
  Description of Artificial Sequence: Synthetic oligonucleotide
  Antisense strand to SEQ ID NO: 313100
augagaagcaacaucuucc

SEQ ID NO: 313102 - RNA, 19 nt, Artificial Sequence
  Description of Artificial Sequence: Synthetic oligonucleotide
  Sense strand starting at position 2820 of SEQ ID NO: 4020
uguugcuucucauuccauu

SEQ ID NO: 313103 - RNA, 19 nt, Artificial Sequence
  Description of Artificial Sequence: Synthetic oligonucleotide
  Antisense strand to SEQ ID NO: 313102
aauggaaugagaagcaaca

SEQ ID NO: 313104 - RNA, 19 nt, Artificial Sequence
  Description of Artificial Sequence: Synthetic oligonucleotide
  Sense strand starting at position 2826 of SEQ ID NO: 4020
uucucauuccauuagaguu

SEQ ID NO: 313105 - RNA, 19 nt, Artificial Sequence
  Description of Artificial Sequence: Synthetic oligonucleotide
  Antisense strand to SEQ ID NO: 313104
aacucuaauggaaugagaa

SEQ ID NO: 313106 - RNA, 19 nt, Artificial Sequence
  Description of Artificial Sequence: Synthetic oligonucleotide
  Sense strand starting at position 2838 of SEQ ID NO: 4020
uagaguugcccagguacuu

SEQ ID NO: 313107 - RNA, 19 nt, Artificial Sequence
  Description of Artificial Sequence: Synthetic oligonucleotide
  Antisense strand to SEQ ID NO: 313106
aaguaccugggcaacucua

SEQ ID NO: 313108 - RNA, 19 nt, Artificial Sequence
  Description of Artificial Sequence: Synthetic oligonucleotide
  Sense strand starting at position 2944 of SEQ ID NO: 4020
gcuaguuugcaacauguuu

SEQ ID NO: 313109 - RNA, 19 nt, Artificial Sequence
  Description of Artificial Sequence: Synthetic oligonucleotide
  Antisense strand to SEQ ID NO: 313108
aaacauguugcaaacuagc

SEQ ID NO: 313110 - RNA, 19 nt, Artificial Sequence
  Description of Artificial Sequence: Synthetic oligonucleotide
  Sense strand starting at position 2959 of SEQ ID NO: 4020
guuuaaagucauuauuggu

SEQ ID NO: 313111 - RNA, 19 nt, Artificial Sequence
  Description of Artificial Sequence: Synthetic oligonucleotide
  Antisense strand to SEQ ID NO: 313110
accaauaaugacuuuaaac

SEQ ID NO: 313112 - RNA, 19 nt, Artificial Sequence
  Description of Artificial Sequence: Synthetic oligonucleotide
  Sense strand starting at position 2964 of SEQ ID NO: 4020
aagucauuauugguggaag

SEQ ID NO: 313113 - RNA, 19 nt, Artificial Sequence
  Description of Artificial Sequence: Synthetic oligonucleotide
  Antisense strand to SEQ ID NO: 313112
cuuccaccaauaaugacuu

SEQ ID NO: 313114 - RNA, 19 nt, Artificial Sequence
  Description of Artificial Sequence: Synthetic oligonucleotide
  Sense strand starting at position 2966 of SEQ ID NO: 4020
gucauuauugguggaagag

SEQ ID NO: 313115 - RNA, 19 nt, Artificial Sequence
  Description of Artificial Sequence: Synthetic oligonucleotide
  Antisense strand to SEQ ID NO: 313114
cucuuccaccaauaaugac

SEQ ID NO: 313116 - RNA, 19 nt, Artificial Sequence
  Description of Artificial Sequence: Synthetic oligonucleotide
  Sense strand starting at position 3044 of SEQ ID NO: 4020
ucauuuaguucgucugaag

SEQ ID NO: 313117 - RNA, 19 nt, Artificial Sequence
  Description of Artificial Sequence: Synthetic oligonucleotide
  Antisense strand to SEQ ID NO: 313116
cuucagacgaacuaaauga

SEQ ID NO: 313118 - RNA, 19 nt, Artificial Sequence
  Description of Artificial Sequence: Synthetic oligonucleotide
  Sense strand starting at position 3058 of SEQ ID NO: 4020
ugaaguuuaccugagcauc

SEQ ID NO: 313119 - RNA, 19 nt, Artificial Sequence
  Description of Artificial Sequence: Synthetic oligonucleotide
  Antisense strand to SEQ ID NO: 313118
gaugcucagguaaacuuca

SEQ ID NO: 313120 - RNA, 19 nt, Artificial Sequence
  Description of Artificial Sequence: Synthetic oligonucleotide
  Sense strand starting at position 3061 of SEQ ID NO: 4020
aguuuaccugagcaucaaa

SEQ ID NO: 313121 - RNA, 19 nt, Artificial Sequence
  Description of Artificial Sequence: Synthetic oligonucleotide
  Antisense strand to SEQ ID NO: 313120
uuugaugcucagguaaacu

SEQ ID NO: 313122 - RNA, 19 nt, Artificial Sequence
  Description of Artificial Sequence: Synthetic oligonucleotide
  Sense strand starting at position 3505 of SEQ ID NO: 4020
aaguuacacguuuauugua

SEQ ID NO: 313123 - RNA, 19 nt, Artificial Sequence
  Description of Artificial Sequence: Synthetic oligonucleotide
  Antisense strand to SEQ ID NO: 313122
uacaauaaacguguaacuu

SEQ ID NO: 313124 - RNA, 19 nt, Artificial Sequence
  Description of Artificial Sequence: Synthetic oligonucleotide
  Sense strand starting at position 3512 of SEQ ID NO: 4020
acguuuauuguaggaagau

SEQ ID NO: 313125 - RNA, 19 nt, Artificial Sequence
  Description of Artificial Sequence: Synthetic oligonucleotide
  Antisense strand to SEQ ID NO: 313124
aucuuccuacaauaaacgu

SEQ ID NO: 313126 - RNA, 19 nt, Artificial Sequence
  Description of Artificial Sequence: Synthetic oligonucleotide
  Sense strand starting at position 3534 of SEQ ID NO: 4020
acugccucauuugauaaga

SEQ ID NO: 313127 - RNA, 19 nt, Artificial Sequence
  Description of Artificial Sequence: Synthetic oligonucleotide
  Antisense strand to SEQ ID NO: 313126
ucuuaucaaaugaggcagu

SEQ ID NO: 313128 - RNA, 19 nt, Artificial Sequence
  Description of Artificial Sequence: Synthetic oligonucleotide
  Sense strand starting at position 3536 of SEQ ID NO: 4020
ugccucauuugauaagaga

SEQ ID NO: 313129 - RNA, 19 nt, Artificial Sequence
  Description of Artificial Sequence: Synthetic oligonucleotide
  Antisense strand to SEQ ID NO: 313128
ucucuuaucaaaugaggca

SEQ ID NO: 313130 - RNA, 19 nt, Artificial Sequence
  Description of Artificial Sequence: Synthetic oligonucleotide
  Sense strand starting at position 3539 of SEQ ID NO: 4020
cucauuugauaagagacuu

SEQ ID NO: 313131 - RNA, 19 nt, Artificial Sequence
  Description of Artificial Sequence: Synthetic oligonucleotide
  Antisense strand to SEQ ID NO: 313130
aagucucuuaucaaaugag

SEQ ID NO: 313132 - RNA, 19 nt, Artificial Sequence
  Description of Artificial Sequence: Synthetic oligonucleotide
  Sense strand starting at position 3550 of SEQ ID NO: 4020
agagacuucugucuucuaa

SEQ ID NO: 313133 - RNA, 19 nt, Artificial Sequence
  Description of Artificial Sequence: Synthetic oligonucleotide
  Antisense strand to SEQ ID NO: 313132
uuagaagacagaagucucu

SEQ ID NO: 313134 - RNA, 19 nt, Artificial Sequence
  Description of Artificial Sequence: Synthetic oligonucleotide
  Sense strand starting at position 3688 of SEQ ID NO: 4020
ucaugucagaugugucuuu

SEQ ID NO: 313135 - RNA, 19 nt, Artificial Sequence
  Description of Artificial Sequence: Synthetic oligonucleotide
  Antisense strand to SEQ ID NO: 313134
aaagacacaucugacauga

SEQ ID NO: 313136 - RNA, 19 nt, Artificial Sequence
  Description of Artificial Sequence: Synthetic oligonucleotide
  Sense strand starting at position 3718 of SEQ ID NO: 4020
uuaccuuugucuccauagu

SEQ ID NO: 313137 - RNA, 19 nt, Artificial Sequence
  Description of Artificial Sequence: Synthetic oligonucleotide
  Antisense strand to SEQ ID NO: 313136
acuauggagacaaagguaa

SEQ ID NO: 313138 - RNA, 19 nt, Artificial Sequence
  Description of Artificial Sequence: Synthetic oligonucleotide
  Sense strand starting at position 74 of SEQ ID NO: 4021
cuaguaugcuugucuauca

SEQ ID NO: 313139 - RNA, 19 nt, Artificial Sequence
  Description of Artificial Sequence: Synthetic oligonucleotide
  Antisense strand to SEQ ID NO: 313138
ugauagacaagcauacuag

SEQ ID NO: 313140 - RNA, 19 nt, Artificial Sequence
  Description of Artificial Sequence: Synthetic oligonucleotide
  Sense strand starting at position 166 of SEQ ID NO: 4021
ggcaaaccauaugagauua

SEQ ID NO: 313141 - RNA, 19 nt, Artificial Sequence
  Description of Artificial Sequence: Synthetic oligonucleotide
  Antisense strand to SEQ ID NO: 313140
uaaucucauaugguuugcc

SEQ ID NO: 313142 - RNA, 19 nt, Artificial Sequence
  Description of Artificial Sequence: Synthetic oligonucleotide
  Sense strand starting at position 665 of SEQ ID NO: 4021
cauuacuggguuugggaaa

SEQ ID NO: 313143 - RNA, 19 nt, Artificial Sequence
  Description of Artificial Sequence: Synthetic oligonucleotide
  Antisense strand to SEQ ID NO: 313142
uuucccaaacccaguaaug

SEQ ID NO: 313144 - RNA, 19 nt, Artificial Sequence
  Description of Artificial Sequence: Synthetic oligonucleotide
  Sense strand starting at position 689 of SEQ ID NO: 4021
ccuacuacauugucuguaa

SEQ ID NO: 313145 - RNA, 19 nt, Artificial Sequence
  Description of Artificial Sequence: Synthetic oligonucleotide
  Antisense strand to SEQ ID NO: 313144
uuacagacaauguaguagg

SEQ ID NO: 313146 - RNA, 19 nt, Artificial Sequence
  Description of Artificial Sequence: Synthetic oligonucleotide
  Sense strand starting at position 692 of SEQ ID NO: 4021
acuacauugucuguaacaa

SEQ ID NO: 313147 - RNA, 19 nt, Artificial Sequence
  Description of Artificial Sequence: Synthetic oligonucleotide
  Antisense strand to SEQ ID NO: 313146
uuguuacagacaauguagu

SEQ ID NO: 313148 - RNA, 19 nt, Artificial Sequence
  Description of Artificial Sequence: Synthetic oligonucleotide
  Sense strand starting at position 693 of SEQ ID NO: 4021
cuacauugucuguaacaaa

SEQ ID NO: 313149 - RNA, 19 nt, Artificial Sequence
  Description of Artificial Sequence: Synthetic oligonucleotide
  Antisense strand to SEQ ID NO: 313148
uuuguuacagacaauguag

SEQ ID NO: 313150 - RNA, 19 nt, Artificial Sequence
  Description of Artificial Sequence: Synthetic oligonucleotide
  Sense strand starting at position 746 of SEQ ID NO: 4021
uugugaaccgacugaauac

SEQ ID NO: 313151 - RNA, 19 nt, Artificial Sequence
  Description of Artificial Sequence: Synthetic oligonucleotide
  Antisense strand to SEQ ID NO: 313150
guauucagucgguucacaa

SEQ ID NO: 313152 - RNA, 19 nt, Artificial Sequence
  Description of Artificial Sequence: Synthetic oligonucleotide
  Sense strand starting at position 858 of SEQ ID NO: 4021
caaguuccaucguuuggua

SEQ ID NO: 313153 - RNA, 19 nt, Artificial Sequence
  Description of Artificial Sequence: Synthetic oligonucleotide
  Antisense strand to SEQ ID NO: 313152
uaccaaacgauggaacuug

SEQ ID NO: 313154 - RNA, 19 nt, Artificial Sequence
  Description of Artificial Sequence: Synthetic oligonucleotide
  Sense strand starting at position 1147 of SEQ ID NO: 4021
ucccgauaguccuuaauca

SEQ ID NO: 313155 - RNA, 19 nt, Artificial Sequence
  Description of Artificial Sequence: Synthetic oligonucleotide
  Antisense strand to SEQ ID NO: 313154
ugauuaaggacuaucggga

SEQ ID NO: 313156 - RNA, 19 nt, Artificial Sequence
  Description of Artificial Sequence: Synthetic oligonucleotide
  Sense strand starting at position 1148 of SEQ ID NO: 4021
cccgauaguccuuaaucag

SEQ ID NO: 313157 - RNA, 19 nt, Artificial Sequence
  Description of Artificial Sequence: Synthetic oligonucleotide
  Antisense strand to SEQ ID NO: 313156
cugauuaaggacuaucggg

SEQ ID NO: 313158 - RNA, 19 nt, Artificial Sequence
  Description of Artificial Sequence: Synthetic oligonucleotide
  Sense strand starting at position 2372 of SEQ ID NO: 4021
gacuucggagggugacaua

SEQ ID NO: 313159 - RNA, 19 nt, Artificial Sequence
  Description of Artificial Sequence: Synthetic oligonucleotide
  Antisense strand to SEQ ID NO: 313158
uaugucacccuccgaaguc

SEQ ID NO: 313160 - RNA, 19 nt, Artificial Sequence
  Description of Artificial Sequence: Synthetic oligonucleotide
  Sense strand starting at position 2429 of SEQ ID NO: 4021
accuuucuauccgugacaa

SEQ ID NO: 313161 - RNA, 19 nt, Artificial Sequence
  Description of Artificial Sequence: Synthetic oligonucleotide
  Antisense strand to SEQ ID NO: 313160
uugucacggauagaaaggu

SEQ ID NO: 313162 - RNA, 19 nt, Artificial Sequence
  Description of Artificial Sequence: Synthetic oligonucleotide
  Sense strand starting at position 2430 of SEQ ID NO: 4021
ccuuucuauccgugacaaa

SEQ ID NO: 313163 - RNA, 19 nt, Artificial Sequence
  Description of Artificial Sequence: Synthetic oligonucleotide
  Antisense strand to SEQ ID NO: 313162
uuugucacggauagaaagg

SEQ ID NO: 313164 - RNA, 19 nt, Artificial Sequence
  Description of Artificial Sequence: Synthetic oligonucleotide
  Sense strand starting at position 2431 of SEQ ID NO: 4021
cuuucuauccgugacaaag

SEQ ID NO: 313165 - RNA, 19 nt, Artificial Sequence
  Description of Artificial Sequence: Synthetic oligonucleotide
  Antisense strand to SEQ ID NO: 313164
cuuugucacggauagaaag

SEQ ID NO: 313166 - RNA, 19 nt, Artificial Sequence
  Description of Artificial Sequence: Synthetic oligonucleotide
  Sense strand starting at position 2448 of SEQ ID NO: 4021
agguuuggaucccaagaca

SEQ ID NO: 313167 - RNA, 19 nt, Artificial Sequence
  Description of Artificial Sequence: Synthetic oligonucleotide
  Antisense strand to SEQ ID NO: 313166
ugucuugggauccaaaccu

SEQ ID NO: 313168 - RNA, 19 nt, Artificial Sequence
  Description of Artificial Sequence: Synthetic oligonucleotide
  Sense strand starting at position 2478 of SEQ ID NO: 4021
ccuuaaugacguugccauu

SEQ ID NO: 313169 - RNA, 19 nt, Artificial Sequence
  Description of Artificial Sequence: Synthetic oligonucleotide
  Antisense strand to SEQ ID NO: 313168
aauggcaacgucauuaagg

SEQ ID NO: 313170 - RNA, 19 nt, Artificial Sequence
  Description of Artificial Sequence: Synthetic oligonucleotide
  Sense strand starting at position 2492 of SEQ ID NO: 4021
ccauuagggcuccgaauua

SEQ ID NO: 313171 - RNA, 19 nt, Artificial Sequence
  Description of Artificial Sequence: Synthetic oligonucleotide
  Antisense strand to SEQ ID NO: 313170
uaauucggagcccuaaugg

SEQ ID NO: 313172 - RNA, 19 nt, Artificial Sequence
  Description of Artificial Sequence: Synthetic oligonucleotide
  Sense strand starting at position 2534 of SEQ ID NO: 4021
aagaauugauucuggagac

SEQ ID NO: 313173 - RNA, 19 nt, Artificial Sequence
  Description of Artificial Sequence: Synthetic oligonucleotide
  Antisense strand to SEQ ID NO: 313172
gucuccagaaucaauucuu

SEQ ID NO: 313174 - RNA, 19 nt, Artificial Sequence
  Description of Artificial Sequence: Synthetic oligonucleotide
  Sense strand starting at position 2552 of SEQ ID NO: 4021
cggugucuucaguauggca

SEQ ID NO: 313175 - RNA, 19 nt, Artificial Sequence
  Description of Artificial Sequence: Synthetic oligonucleotide
  Antisense strand to SEQ ID NO: 313174
ugccauacugaagacaccg

SEQ ID NO: 313176 - RNA, 19 nt, Artificial Sequence
  Description of Artificial Sequence: Synthetic oligonucleotide
  Sense strand starting at position 2630 of SEQ ID NO: 4021
aaagguaggucccagaaga

SEQ ID NO: 313177 - RNA, 19 nt, Artificial Sequence
  Description of Artificial Sequence: Synthetic oligonucleotide
  Antisense strand to SEQ ID NO: 313176
ucuucugggaccuaccuuu

SEQ ID NO: 313178 - RNA, 19 nt, Artificial Sequence
  Description of Artificial Sequence: Synthetic oligonucleotide
  Sense strand starting at position 2896 of SEQ ID NO: 4021
ugguauuauuugugagagg

SEQ ID NO: 313179 - RNA, 19 nt, Artificial Sequence
  Description of Artificial Sequence: Synthetic oligonucleotide
  Antisense strand to SEQ ID NO: 313178
ccucucacaaauaauacca

SEQ ID NO: 313180 - RNA, 19 nt, Artificial Sequence
  Description of Artificial Sequence: Synthetic oligonucleotide
  Sense strand starting at position 2897 of SEQ ID NO: 4021
gguauuauuugugagaggu

SEQ ID NO: 313181 - RNA, 19 nt, Artificial Sequence
  Description of Artificial Sequence: Synthetic oligonucleotide
  Antisense strand to SEQ ID NO: 313180
accucucacaaauaauacc

SEQ ID NO: 313182 - RNA, 19 nt, Artificial Sequence
  Description of Artificial Sequence: Synthetic oligonucleotide
  Sense strand starting at position 2899 of SEQ ID NO: 4021
uauuauuugugagagguca

SEQ ID NO: 313183 - RNA, 19 nt, Artificial Sequence
  Description of Artificial Sequence: Synthetic oligonucleotide
  Antisense strand to SEQ ID NO: 313182
ugaccucucacaaauaaua

SEQ ID NO: 313184 - RNA, 19 nt, Artificial Sequence
  Description of Artificial Sequence: Synthetic oligonucleotide
  Sense strand starting at position 3180 of SEQ ID NO: 4021
ugcuaugaucccgauucca

SEQ ID NO: 313185 - RNA, 19 nt, Artificial Sequence
  Description of Artificial Sequence: Synthetic oligonucleotide
  Antisense strand to SEQ ID NO: 313184
uggaaucgggaucauagca

SEQ ID NO: 313186 - RNA, 19 nt, Artificial Sequence
  Description of Artificial Sequence: Synthetic oligonucleotide
  Sense strand starting at position 3210 of SEQ ID NO: 4021
gagaauggaucauaaagaa

SEQ ID NO: 313187 - RNA, 19 nt, Artificial Sequence
  Description of Artificial Sequence: Synthetic oligonucleotide
  Antisense strand to SEQ ID NO: 313186
uucuuuaugauccauucuc

SEQ ID NO: 313188 - RNA, 19 nt, Artificial Sequence
  Description of Artificial Sequence: Synthetic oligonucleotide
  Sense strand starting at position 3230 of SEQ ID NO: 4021
uucccauucugaguggaga

SEQ ID NO: 313189 - RNA, 19 nt, Artificial Sequence
  Description of Artificial Sequence: Synthetic oligonucleotide
  Antisense strand to SEQ ID NO: 313188
ucuccacucagaaugggaa

SEQ ID NO: 313190 - RNA, 19 nt, Artificial Sequence
  Description of Artificial Sequence: Synthetic oligonucleotide
  Sense strand starting at position 3259 of SEQ ID NO: 4021
uccggagaaucucuagaau

SEQ ID NO: 313191 - RNA, 19 nt, Artificial Sequence
  Description of Artificial Sequence: Synthetic oligonucleotide
  Antisense strand to SEQ ID NO: 313190
auucuagagauucuccgga

SEQ ID NO: 313192 - RNA, 19 nt, Artificial Sequence
  Description of Artificial Sequence: Synthetic oligonucleotide
  Sense strand starting at position 3268 of SEQ ID NO: 4021
ucucuagaaugggagauuu

SEQ ID NO: 313193 - RNA, 19 nt, Artificial Sequence
  Description of Artificial Sequence: Synthetic oligonucleotide
  Antisense strand to SEQ ID NO: 313192
aaaucucccauucuagaga

SEQ ID NO: 313194 - RNA, 19 nt, Artificial Sequence
  Description of Artificial Sequence: Synthetic oligonucleotide
  Sense strand starting at position 3313 of SEQ ID NO: 4021
ggugccgacuuuccagaaa

SEQ ID NO: 313195 - RNA, 19 nt, Artificial Sequence
  Description of Artificial Sequence: Synthetic oligonucleotide
  Antisense strand to SEQ ID NO: 313194
uuucuggaaagucggcacc

SEQ ID NO: 313196 - RNA, 19 nt, Artificial Sequence
  Description of Artificial Sequence: Synthetic oligonucleotide
  Sense strand starting at position 3316 of SEQ ID NO: 4021
gccgacuuuccagaaauuc

SEQ ID NO: 313197 - RNA, 19 nt, Artificial Sequence
  Description of Artificial Sequence: Synthetic oligonucleotide
  Antisense strand to SEQ ID NO: 313196
gaauuucuggaaagucggc

SEQ ID NO: 313198 - RNA, 19 nt, Artificial Sequence
  Description of Artificial Sequence: Synthetic oligonucleotide
  Sense strand starting at position 3358 of SEQ ID NO: 4021
ccuguccugacuugugaag

SEQ ID NO: 313199 - RNA, 19 nt, Artificial Sequence
  Description of Artificial Sequence: Synthetic oligonucleotide
  Antisense strand to SEQ ID NO: 313198
cuucacaagucaggacagg

SEQ ID NO: 313200 - RNA, 19 nt, Artificial Sequence
  Description of Artificial Sequence: Synthetic oligonucleotide
  Sense strand starting at position 3379 of SEQ ID NO: 4021
ugcuuugugcuuugacaga

SEQ ID NO: 313201 - RNA, 19 nt, Artificial Sequence
  Description of Artificial Sequence: Synthetic oligonucleotide
  Antisense strand to SEQ ID NO: 313200
ucugucaaagcacaaagca

SEQ ID NO: 313202 - RNA, 19 nt, Artificial Sequence
  Description of Artificial Sequence: Synthetic oligonucleotide
  Sense strand starting at position 3384 of SEQ ID NO: 4021
ugugcuuugacagacagga

SEQ ID NO: 313203 - RNA, 19 nt, Artificial Sequence
  Description of Artificial Sequence: Synthetic oligonucleotide
  Antisense strand to SEQ ID NO: 313202
uccugucugucaaagcaca

SEQ ID NO: 313204 - RNA, 19 nt, Artificial Sequence
  Description of Artificial Sequence: Synthetic oligonucleotide
  Sense strand starting at position 3436 of SEQ ID NO: 4021
gcagaaaugccuuacuaug

SEQ ID NO: 313205 - RNA, 19 nt, Artificial Sequence
  Description of Artificial Sequence: Synthetic oligonucleotide
  Antisense strand to SEQ ID NO: 313204
cauaguaaggcauuucugc

SEQ ID NO: 313206 - RNA, 19 nt, Artificial Sequence
  Description of Artificial Sequence: Synthetic oligonucleotide
  Sense strand starting at position 3438 of SEQ ID NO: 4021
agaaaugccuuacuauguu

SEQ ID NO: 313207 - RNA, 19 nt, Artificial Sequence
  Description of Artificial Sequence: Synthetic oligonucleotide
  Antisense strand to SEQ ID NO: 313206
aacauaguaaggcauuucu

SEQ ID NO: 313208 - RNA, 19 nt, Artificial Sequence
  Description of Artificial Sequence: Synthetic oligonucleotide
  Sense strand starting at position 3513 of SEQ ID NO: 4021
cagacacaugaguguuuau

SEQ ID NO: 313209 - RNA, 19 nt, Artificial Sequence
  Description of Artificial Sequence: Synthetic oligonucleotide
  Antisense strand to SEQ ID NO: 313208
auaaacacucaugugucug

SEQ ID NO: 313210 - RNA, 19 nt, Artificial Sequence
  Description of Artificial Sequence: Synthetic oligonucleotide
  Sense strand starting at position 3727 of SEQ ID NO: 4021
auggaaccucugugguaga

SEQ ID NO: 313211 - RNA, 19 nt, Artificial Sequence
  Description of Artificial Sequence: Synthetic oligonucleotide
  Antisense strand to SEQ ID NO: 313210
ucuaccacagagguuccau

SEQ ID NO: 313212 - RNA, 19 nt, Artificial Sequence
  Description of Artificial Sequence: Synthetic oligonucleotide
  Sense strand starting at position 3838 of SEQ ID NO: 4021
ugcugcuuucuguaccuua

SEQ ID NO: 313213 - RNA, 19 nt, Artificial Sequence
  Description of Artificial Sequence: Synthetic oligonucleotide
  Antisense strand to SEQ ID NO: 313212
uaagguacagaaagcagca

SEQ ID NO: 313214 - RNA, 19 nt, Artificial Sequence
  Description of Artificial Sequence: Synthetic oligonucleotide
  Sense strand starting at position 3849 of SEQ ID NO: 4021
guaccuuagucucugaaau

SEQ ID NO: 313215 - RNA, 19 nt, Artificial Sequence
  Description of Artificial Sequence: Synthetic oligonucleotide
  Antisense strand to SEQ ID NO: 313214
auuucagagacuaagguac

SEQ ID NO: 313216 - RNA, 19 nt, Artificial Sequence
  Description of Artificial Sequence: Synthetic oligonucleotide
  Sense strand starting at position 3916 of SEQ ID NO: 4021
ugcaaucaucuggaaucau

SEQ ID NO: 313217 - RNA, 19 nt, Artificial Sequence
  Description of Artificial Sequence: Synthetic oligonucleotide
  Antisense strand to SEQ ID NO: 313216
augauuccagaugauugca

SEQ ID NO: 313218 - RNA, 19 nt, Artificial Sequence
  Description of Artificial Sequence: Synthetic oligonucleotide
  Sense strand starting at position 14 of SEQ ID NO: 4022
aaguccgaguguuuaauau

SEQ ID NO: 313219 - RNA, 19 nt, Artificial Sequence
  Description of Artificial Sequence: Synthetic oligonucleotide
  Antisense strand to SEQ ID NO: 313218
auauuaaacacucggacuu

SEQ ID NO: 313220 - RNA, 19 nt, Artificial Sequence
  Description of Artificial Sequence: Synthetic oligonucleotide
  Sense strand starting at position 50 of SEQ ID NO: 4022
ucuuuacuguguccuuaua

SEQ ID NO: 313221 - RNA, 19 nt, Artificial Sequence
  Description of Artificial Sequence: Synthetic oligonucleotide
  Antisense strand to SEQ ID NO: 313220
uauaaggacacaguaaaga

SEQ ID NO: 313222 - RNA, 19 nt, Artificial Sequence
  Description of Artificial Sequence: Synthetic oligonucleotide
  Sense strand starting at position 52 of SEQ ID NO: 4022
uuuacuguguccuuauaua

SEQ ID NO: 313223 - RNA, 19 nt, Artificial Sequence
  Description of Artificial Sequence: Synthetic oligonucleotide
  Antisense strand to SEQ ID NO: 313222
uauauaaggacacaguaaa

SEQ ID NO: 313224 - RNA, 19 nt, Artificial Sequence
  Description of Artificial Sequence: Synthetic oligonucleotide
  Sense strand starting at position 125 of SEQ ID NO: 4022
cggagaaaguccuugcaau

SEQ ID NO: 313225 - RNA, 19 nt, Artificial Sequence
  Description of Artificial Sequence: Synthetic oligonucleotide
  Antisense strand to SEQ ID NO: 313224
auugcaaggacuuucuccg

SEQ ID NO: 313226 - RNA, 19 nt, Artificial Sequence
  Description of Artificial Sequence: Synthetic oligonucleotide
  Sense strand starting at position 126 of SEQ ID NO: 4022
ggagaaaguccuugcaauu

SEQ ID NO: 313227 - RNA, 19 nt, Artificial Sequence
  Description of Artificial Sequence: Synthetic oligonucleotide
  Antisense strand to SEQ ID NO: 313226
aauugcaaggacuuucucc

SEQ ID NO: 313228 - RNA, 19 nt, Artificial Sequence
  Description of Artificial Sequence: Synthetic oligonucleotide
  Sense strand starting at position 145 of SEQ ID NO: 4022
gcaucauggucauuuacuc

SEQ ID NO: 313229 - RNA, 19 nt, Artificial Sequence
  Description of Artificial Sequence: Synthetic oligonucleotide
  Antisense strand to SEQ ID NO: 313228
gaguaaaugaccaugaugc

SEQ ID NO: 313230 - RNA, 19 nt, Artificial Sequence
  Description of Artificial Sequence: Synthetic oligonucleotide
  Sense strand starting at position 524 of SEQ ID NO: 4022
agccuugaaucacuuguuu

SEQ ID NO: 313231 - RNA, 19 nt, Artificial Sequence
  Description of Artificial Sequence: Synthetic oligonucleotide
  Antisense strand to SEQ ID NO: 313230
aaacaagugauucaaggcu

SEQ ID NO: 313232 - RNA, 19 nt, Artificial Sequence
  Description of Artificial Sequence: Synthetic oligonucleotide
  Sense strand starting at position 706 of SEQ ID NO: 4022
guaagacgauucucacaca

SEQ ID NO: 313233 - RNA, 19 nt, Artificial Sequence
  Description of Artificial Sequence: Synthetic oligonucleotide
  Antisense strand to SEQ ID NO: 313232
ugugugagaaucgucuuac

SEQ ID NO: 313234 - RNA, 19 nt, Artificial Sequence
  Description of Artificial Sequence: Synthetic oligonucleotide
  Sense strand starting at position 731 of SEQ ID NO: 4022
ucgagagcugcuuacugua

SEQ ID NO: 313235 - RNA, 19 nt, Artificial Sequence
  Description of Artificial Sequence: Synthetic oligonucleotide
  Antisense strand to SEQ ID NO: 313234
uacaguaagcagcucucga

SEQ ID NO: 313236 - RNA, 19 nt, Artificial Sequence
  Description of Artificial Sequence: Synthetic oligonucleotide
  Sense strand starting at position 736 of SEQ ID NO: 4022
agcugcuuacuguaccaua

SEQ ID NO: 313237 - RNA, 19 nt, Artificial Sequence
  Description of Artificial Sequence: Synthetic oligonucleotide
  Antisense strand to SEQ ID NO: 313236
uaugguacaguaagcagcu

SEQ ID NO: 313238 - RNA, 19 nt, Artificial Sequence
  Description of Artificial Sequence: Synthetic oligonucleotide
  Sense strand starting at position 744 of SEQ ID NO: 4022
acuguaccauacuuggaau

SEQ ID NO: 313239 - RNA, 19 nt, Artificial Sequence
  Description of Artificial Sequence: Synthetic oligonucleotide
  Antisense strand to SEQ ID NO: 313238
auuccaaguaugguacagu

SEQ ID NO: 313240 - RNA, 19 nt, Artificial Sequence
  Description of Artificial Sequence: Synthetic oligonucleotide
  Sense strand starting at position 916 of SEQ ID NO: 4022
uaggcaaucggaugucauc

SEQ ID NO: 313241 - RNA, 19 nt, Artificial Sequence
  Description of Artificial Sequence: Synthetic oligonucleotide
  Antisense strand to SEQ ID NO: 313240
gaugacauccgauugccua

SEQ ID NO: 313242 - RNA, 19 nt, Artificial Sequence
  Description of Artificial Sequence: Synthetic oligonucleotide
  Sense strand starting at position 934 of SEQ ID NO: 4022
cuagccaguccugaauuaa

SEQ ID NO: 313243 - RNA, 19 nt, Artificial Sequence
  Description of Artificial Sequence: Synthetic oligonucleotide
  Antisense strand to SEQ ID NO: 313242
uuaauucaggacuggcuag

SEQ ID NO: 313244 - RNA, 19 nt, Artificial Sequence
  Description of Artificial Sequence: Synthetic oligonucleotide
  Sense strand starting at position 1176 of SEQ ID NO: 4022
ggauacauuuacgcauguu

SEQ ID NO: 313245 - RNA, 19 nt, Artificial Sequence
  Description of Artificial Sequence: Synthetic oligonucleotide
  Antisense strand to SEQ ID NO: 313244
aacaugcguaaauguaucc

SEQ ID NO: 313246 - RNA, 19 nt, Artificial Sequence
  Description of Artificial Sequence: Synthetic oligonucleotide
  Sense strand starting at position 1241 of SEQ ID NO: 4022
uggccuaauugugugagga

SEQ ID NO: 313247 - RNA, 19 nt, Artificial Sequence
  Description of Artificial Sequence: Synthetic oligonucleotide
  Antisense strand to SEQ ID NO: 313246
uccucacacaauuaggcca

SEQ ID NO: 313248 - RNA, 19 nt, Artificial Sequence
  Description of Artificial Sequence: Synthetic oligonucleotide
  Sense strand starting at position 1242 of SEQ ID NO: 4022
ggccuaauugugugaggaa

SEQ ID NO: 313249 - RNA, 19 nt, Artificial Sequence
  Description of Artificial Sequence: Synthetic oligonucleotide
  Antisense strand to SEQ ID NO: 313248
uuccucacacaauuaggcc

SEQ ID NO: 313250 - RNA, 19 nt, Artificial Sequence
  Description of Artificial Sequence: Synthetic oligonucleotide
  Sense strand starting at position 1296 of SEQ ID NO: 4022
gcucgcggucgaguucuua

SEQ ID NO: 313251 - RNA, 19 nt, Artificial Sequence
  Description of Artificial Sequence: Synthetic oligonucleotide
  Antisense strand to SEQ ID NO: 313250
uaagaacucgaccgcgagc

SEQ ID NO: 313252 - RNA, 19 nt, Artificial Sequence
  Description of Artificial Sequence: Synthetic oligonucleotide
  Sense strand starting at position 1299 of SEQ ID NO: 4022
cgcggucgaguucuuagaa

SEQ ID NO: 313253 - RNA, 19 nt, Artificial Sequence
  Description of Artificial Sequence: Synthetic oligonucleotide
  Antisense strand to SEQ ID NO: 313252
uucuaagaacucgaccgcg

SEQ ID NO: 313254 - RNA, 19 nt, Artificial Sequence
  Description of Artificial Sequence: Synthetic oligonucleotide
  Sense strand starting at position 2330 of SEQ ID NO: 4022
agaguuaauucucuaguug

SEQ ID NO: 313255 - RNA, 19 nt, Artificial Sequence
  Description of Artificial Sequence: Synthetic oligonucleotide
  Antisense strand to SEQ ID NO: 313254
caacuagagaauuaacucu

SEQ ID NO: 313256 - RNA, 19 nt, Artificial Sequence
  Description of Artificial Sequence: Synthetic oligonucleotide
  Sense strand starting at position 2331 of SEQ ID NO: 4022
gaguuaauucucuaguugg

SEQ ID NO: 313257 - RNA, 19 nt, Artificial Sequence
  Description of Artificial Sequence: Synthetic oligonucleotide
  Antisense strand to SEQ ID NO: 313256
ccaacuagagaauuaacuc

SEQ ID NO: 313258 - RNA, 19 nt, Artificial Sequence
  Description of Artificial Sequence: Synthetic oligonucleotide
  Sense strand starting at position 2334 of SEQ ID NO: 4022
uuaauucucuaguugggaa

SEQ ID NO: 313259 - RNA, 19 nt, Artificial Sequence
  Description of Artificial Sequence: Synthetic oligonucleotide
  Antisense strand to SEQ ID NO: 313258
uucccaacuagagaauuaa

SEQ ID NO: 313260 - RNA, 19 nt, Artificial Sequence
  Description of Artificial Sequence: Synthetic oligonucleotide
  Sense strand starting at position 2393 of SEQ ID NO: 4022
gcugccucucuagaaagau

SEQ ID NO: 313261 - RNA, 19 nt, Artificial Sequence
  Description of Artificial Sequence: Synthetic oligonucleotide
  Antisense strand to SEQ ID NO: 313260
aucuuucuagagaggcagc

SEQ ID NO: 313262 - RNA, 19 nt, Artificial Sequence
  Description of Artificial Sequence: Synthetic oligonucleotide
  Sense strand starting at position 2402 of SEQ ID NO: 4022
cuagaaagaucaguaggua

SEQ ID NO: 313263 - RNA, 19 nt, Artificial Sequence
  Description of Artificial Sequence: Synthetic oligonucleotide
  Antisense strand to SEQ ID NO: 313262
uaccuacugaucuuucuag

SEQ ID NO: 313264 - RNA, 19 nt, Artificial Sequence
  Description of Artificial Sequence: Synthetic oligonucleotide
  Sense strand starting at position 2405 of SEQ ID NO: 4022
gaaagaucaguagguaccu

SEQ ID NO: 313265 - RNA, 19 nt, Artificial Sequence
  Description of Artificial Sequence: Synthetic oligonucleotide
  Antisense strand to SEQ ID NO: 313264
agguaccuacugaucuuuc

SEQ ID NO: 313266 - RNA, 19 nt, Artificial Sequence
  Description of Artificial Sequence: Synthetic oligonucleotide
  Sense strand starting at position 2608 of SEQ ID NO: 4022
gggcaugggcaacauuauu

SEQ ID NO: 313267 - RNA, 19 nt, Artificial Sequence
  Description of Artificial Sequence: Synthetic oligonucleotide
  Antisense strand to SEQ ID NO: 313266
aauaauguugcccaugccc

SEQ ID NO: 313268 - RNA, 19 nt, Artificial Sequence
  Description of Artificial Sequence: Synthetic oligonucleotide
  Sense strand starting at position 2659 of SEQ ID NO: 4022
gacacugggagcugugaaa

SEQ ID NO: 313269 - RNA, 19 nt, Artificial Sequence
  Description of Artificial Sequence: Synthetic oligonucleotide
  Antisense strand to SEQ ID NO: 313268
uuucacagcucccaguguc

SEQ ID NO: 313270 - RNA, 19 nt, Artificial Sequence
  Description of Artificial Sequence: Synthetic oligonucleotide
  Sense strand starting at position 2705 of SEQ ID NO: 4022
guuugugauucuguuuaaa

SEQ ID NO: 313271 - RNA, 19 nt, Artificial Sequence
  Description of Artificial Sequence: Synthetic oligonucleotide
  Antisense strand to SEQ ID NO: 313270
uuuaaacagaaucacaaac

SEQ ID NO: 313272 - RNA, 19 nt, Artificial Sequence
  Description of Artificial Sequence: Synthetic oligonucleotide
  Sense strand starting at position 2707 of SEQ ID NO: 4022
uugugauucuguuuaaaug

SEQ ID NO: 313273 - RNA, 19 nt, Artificial Sequence
  Description of Artificial Sequence: Synthetic oligonucleotide
  Antisense strand to SEQ ID NO: 313272
cauuuaaacagaaucacaa

SEQ ID NO: 313274 - RNA, 19 nt, Artificial Sequence
  Description of Artificial Sequence: Synthetic oligonucleotide
  Sense strand starting at position 2734 of SEQ ID NO: 4022
gagagaguaguccacagua

SEQ ID NO: 313275 - RNA, 19 nt, Artificial Sequence
  Description of Artificial Sequence: Synthetic oligonucleotide
  Antisense strand to SEQ ID NO: 313274
uacuguggacuacucucuc

SEQ ID NO: 313276 - RNA, 19 nt, Artificial Sequence
  Description of Artificial Sequence: Synthetic oligonucleotide
  Sense strand starting at position 2736 of SEQ ID NO: 4022
gagaguaguccacaguagu

SEQ ID NO: 313277 - RNA, 19 nt, Artificial Sequence
  Description of Artificial Sequence: Synthetic oligonucleotide
  Antisense strand to SEQ ID NO: 313276
acuacuguggacuacucuc

SEQ ID NO: 313278 - RNA, 19 nt, Artificial Sequence
  Description of Artificial Sequence: Synthetic oligonucleotide
  Sense strand starting at position 2875 of SEQ ID NO: 4022
ugggcaugguaccuguaau

SEQ ID NO: 313279 - RNA, 19 nt, Artificial Sequence
  Description of Artificial Sequence: Synthetic oligonucleotide
  Antisense strand to SEQ ID NO: 313278
auuacagguaccaugccca

SEQ ID NO: 313280 - RNA, 19 nt, Artificial Sequence
  Description of Artificial Sequence: Synthetic oligonucleotide
  Sense strand starting at position 2876 of SEQ ID NO: 4022
gggcaugguaccuguaauc

SEQ ID NO: 313281 - RNA, 19 nt, Artificial Sequence
  Description of Artificial Sequence: Synthetic oligonucleotide
  Antisense strand to SEQ ID NO: 313280
gauuacagguaccaugccc

SEQ ID NO: 313282 - RNA, 19 nt, Artificial Sequence
  Description of Artificial Sequence: Synthetic oligonucleotide
  Sense strand starting at position 3622 of SEQ ID NO: 4022
auguauaaugcaggucuaa

SEQ ID NO: 313283 - RNA, 19 nt, Artificial Sequence
  Description of Artificial Sequence: Synthetic oligonucleotide
  Antisense strand to SEQ ID NO: 313282
uuagaccugcauuauacau

SEQ ID NO: 313284 - RNA, 19 nt, Artificial Sequence
  Description of Artificial Sequence: Synthetic oligonucleotide
  Sense strand starting at position 3794 of SEQ ID NO: 4022
ccugacuucuggucuuaga

SEQ ID NO: 313285 - RNA, 19 nt, Artificial Sequence
  Description of Artificial Sequence: Synthetic oligonucleotide
  Antisense strand to SEQ ID NO: 313284
ucuaagaccagaagucagg

SEQ ID NO: 313286 - RNA, 19 nt, Artificial Sequence
  Description of Artificial Sequence: Synthetic oligonucleotide
  Sense strand starting at position 3803 of SEQ ID NO: 4022
uggucuuagagcuaccagu

SEQ ID NO: 313287 - RNA, 19 nt, Artificial Sequence
  Description of Artificial Sequence: Synthetic oligonucleotide
  Antisense strand to SEQ ID NO: 313286
acugguagcucuaagacca

SEQ ID NO: 313288 - RNA, 19 nt, Artificial Sequence
  Description of Artificial Sequence: Synthetic oligonucleotide
  Sense strand starting at position 3817 of SEQ ID NO: 4022
ccaguuaucagcuagagug

SEQ ID NO: 313289 - RNA, 19 nt, Artificial Sequence
  Description of Artificial Sequence: Synthetic oligonucleotide
  Antisense strand to SEQ ID NO: 313288
cacucuagcugauaacugg

SEQ ID NO: 313290 - RNA, 19 nt, Artificial Sequence
  Description of Artificial Sequence: Synthetic oligonucleotide
  Sense strand starting at position 3877 of SEQ ID NO: 4022
agggacuaauuagaaguua

SEQ ID NO: 313291 - RNA, 19 nt, Artificial Sequence
  Description of Artificial Sequence: Synthetic oligonucleotide
  Antisense strand to SEQ ID NO: 313290
uaacuucuaauuagucccu

SEQ ID NO: 313292 - RNA, 19 nt, Artificial Sequence
  Description of Artificial Sequence: Synthetic oligonucleotide
  Sense strand starting at position 3931 of SEQ ID NO: 4022
gcuuuaaauuuggaacaca

SEQ ID NO: 313293 - RNA, 19 nt, Artificial Sequence
  Description of Artificial Sequence: Synthetic oligonucleotide
  Antisense strand to SEQ ID NO: 313292
uguguuccaaauuuaaagc

SEQ ID NO: 313294 - RNA, 19 nt, Artificial Sequence
  Description of Artificial Sequence: Synthetic oligonucleotide
  Sense strand starting at position 3949 of SEQ ID NO: 4022
auggcuuaagagcaucaau

SEQ ID NO: 313295 - RNA, 19 nt, Artificial Sequence
  Description of Artificial Sequence: Synthetic oligonucleotide
  Antisense strand to SEQ ID NO: 313294
auugaugcucuuaagccau

SEQ ID NO: 313296 - RNA, 19 nt, Artificial Sequence
  Description of Artificial Sequence: Synthetic oligonucleotide
  Sense strand starting at position 3952 of SEQ ID NO: 4022
gcuuaagagcaucaauauu

SEQ ID NO: 313297 - RNA, 19 nt, Artificial Sequence
  Description of Artificial Sequence: Synthetic oligonucleotide
  Antisense strand to SEQ ID NO: 313296
aauauugaugcucuuaagc

SEQ ID NO: 313298 - RNA, 19 nt, Artificial Sequence
  Description of Artificial Sequence: Synthetic oligonucleotide
  Sense strand starting at position 5 of SEQ ID NO: 4023
ucuccaagugucuguugau

SEQ ID NO: 313299 - RNA, 19 nt, Artificial Sequence
  Description of Artificial Sequence: Synthetic oligonucleotide
  Antisense strand to SEQ ID NO: 313298
aucaacagacacuuggaga

SEQ ID NO: 313300 - RNA, 19 nt, Artificial Sequence
  Description of Artificial Sequence: Synthetic oligonucleotide
  Sense strand starting at position 6 of SEQ ID NO: 4023
cuccaagugucuguugauu

SEQ ID NO: 313301 - RNA, 19 nt, Artificial Sequence
  Description of Artificial Sequence: Synthetic oligonucleotide
  Antisense strand to SEQ ID NO: 313300
aaucaacagacacuuggag

SEQ ID NO: 313302 - RNA, 19 nt, Artificial Sequence
  Description of Artificial Sequence: Synthetic oligonucleotide
  Sense strand starting at position 12 of SEQ ID NO: 4023
gugucuguugauugaacaa

SEQ ID NO: 313303 - RNA, 19 nt, Artificial Sequence
  Description of Artificial Sequence: Synthetic oligonucleotide
  Antisense strand to SEQ ID NO: 313302
uuguucaaucaacagacac

SEQ ID NO: 313304 - RNA, 19 nt, Artificial Sequence
  Description of Artificial Sequence: Synthetic oligonucleotide
  Sense strand starting at position 120 of SEQ ID NO: 4023
caggcucugugacuguaaa

SEQ ID NO: 313305 - RNA, 19 nt, Artificial Sequence
  Description of Artificial Sequence: Synthetic oligonucleotide
  Antisense strand to SEQ ID NO: 313304
uuuacagucacagagccug

SEQ ID NO: 313306 - RNA, 19 nt, Artificial Sequence
  Description of Artificial Sequence: Synthetic oligonucleotide
  Sense strand starting at position 157 of SEQ ID NO: 4023
ggugugagucaggaggaua

SEQ ID NO: 313307 - RNA, 19 nt, Artificial Sequence
  Description of Artificial Sequence: Synthetic oligonucleotide
  Antisense strand to SEQ ID NO: 313306
uauccuccugacucacacc

SEQ ID NO: 313308 - RNA, 19 nt, Artificial Sequence
  Description of Artificial Sequence: Synthetic oligonucleotide
  Sense strand starting at position 222 of SEQ ID NO: 4023
guaggcuguucacaggauu

SEQ ID NO: 313309 - RNA, 19 nt, Artificial Sequence
  Description of Artificial Sequence: Synthetic oligonucleotide
  Antisense strand to SEQ ID NO: 313308
aauccugugaacagccuac

SEQ ID NO: 313310 - RNA, 19 nt, Artificial Sequence
  Description of Artificial Sequence: Synthetic oligonucleotide
  Sense strand starting at position 236 of SEQ ID NO: 4023
ggauuccuguccuggacau

SEQ ID NO: 313311 - RNA, 19 nt, Artificial Sequence
  Description of Artificial Sequence: Synthetic oligonucleotide
  Antisense strand to SEQ ID NO: 313310
auguccaggacaggaaucc

SEQ ID NO: 313312 - RNA, 19 nt, Artificial Sequence
  Description of Artificial Sequence: Synthetic oligonucleotide
  Sense strand starting at position 475 of SEQ ID NO: 4023
cagagcuagugaggauaau

SEQ ID NO: 313313 - RNA, 19 nt, Artificial Sequence
  Description of Artificial Sequence: Synthetic oligonucleotide
  Antisense strand to SEQ ID NO: 313312
auuauccucacuagcucug

SEQ ID NO: 313314 - RNA, 19 nt, Artificial Sequence
  Description of Artificial Sequence: Synthetic oligonucleotide
  Sense strand starting at position 819 of SEQ ID NO: 4023
ucagcaaggcauuauuaaa

SEQ ID NO: 313315 - RNA, 19 nt, Artificial Sequence
  Description of Artificial Sequence: Synthetic oligonucleotide
  Antisense strand to SEQ ID NO: 313314
uuuaauaaugccuugcuga

SEQ ID NO: 313316 - RNA, 19 nt, Artificial Sequence
  Description of Artificial Sequence: Synthetic oligonucleotide
  Sense strand starting at position 867 of SEQ ID NO: 4023
agacgagaguaaugaauca

SEQ ID NO: 313317 - RNA, 19 nt, Artificial Sequence
  Description of Artificial Sequence: Synthetic oligonucleotide
  Antisense strand to SEQ ID NO: 313316
ugauucauuacucucgucu

SEQ ID NO: 313318 - RNA, 19 nt, Artificial Sequence
  Description of Artificial Sequence: Synthetic oligonucleotide
  Sense strand starting at position 999 of SEQ ID NO: 4023
cccauaucugcaugugcau

SEQ ID NO: 313319 - RNA, 19 nt, Artificial Sequence
  Description of Artificial Sequence: Synthetic oligonucleotide
  Antisense strand to SEQ ID NO: 313318
augcacaugcagauauggg

SEQ ID NO: 313320 - RNA, 19 nt, Artificial Sequence
  Description of Artificial Sequence: Synthetic oligonucleotide
  Sense strand starting at position 1053 of SEQ ID NO: 4023
gcaacuugccgagaacaca

SEQ ID NO: 313321 - RNA, 19 nt, Artificial Sequence
  Description of Artificial Sequence: Synthetic oligonucleotide
  Antisense strand to SEQ ID NO: 313320
uguguucucggcaaguugc

SEQ ID NO: 313322 - RNA, 19 nt, Artificial Sequence
  Description of Artificial Sequence: Synthetic oligonucleotide
  Sense strand starting at position 1079 of SEQ ID NO: 4023
ugaggagaacucgguguuu

SEQ ID NO: 313323 - RNA, 19 nt, Artificial Sequence
  Description of Artificial Sequence: Synthetic oligonucleotide
  Antisense strand to SEQ ID NO: 313322
aaacaccgaguucuccuca

SEQ ID NO: 313324 - RNA, 19 nt, Artificial Sequence
  Description of Artificial Sequence: Synthetic oligonucleotide
  Sense strand starting at position 1161 of SEQ ID NO: 4023
cuggacuccucacaggaau

SEQ ID NO: 313325 - RNA, 19 nt, Artificial Sequence
  Description of Artificial Sequence: Synthetic oligonucleotide
  Antisense strand to SEQ ID NO: 313324
auuccugugaggaguccag

SEQ ID NO: 313326 - RNA, 19 nt, Artificial Sequence
  Description of Artificial Sequence: Synthetic oligonucleotide
  Sense strand starting at position 1247 of SEQ ID NO: 4023
gcgcuuucucuggagguuu

SEQ ID NO: 313327 - RNA, 19 nt, Artificial Sequence
  Description of Artificial Sequence: Synthetic oligonucleotide
  Antisense strand to SEQ ID NO: 313326
aaaccuccagagaaagcgc

SEQ ID NO: 313328 - RNA, 19 nt, Artificial Sequence
  Description of Artificial Sequence: Synthetic oligonucleotide
  Sense strand starting at position 1647 of SEQ ID NO: 4023
gccgguucugggugaggaa

SEQ ID NO: 313329 - RNA, 19 nt, Artificial Sequence
  Description of Artificial Sequence: Synthetic oligonucleotide
  Antisense strand to SEQ ID NO: 313328
uuccucacccagaaccggc

SEQ ID NO: 313330 - RNA, 19 nt, Artificial Sequence
  Description of Artificial Sequence: Synthetic oligonucleotide
  Sense strand starting at position 1648 of SEQ ID NO: 4023
ccgguucugggugaggaau

SEQ ID NO: 313331 - RNA, 19 nt, Artificial Sequence
  Description of Artificial Sequence: Synthetic oligonucleotide
  Antisense strand to SEQ ID NO: 313330
auuccucacccagaaccgg

SEQ ID NO: 313332 - RNA, 19 nt, Artificial Sequence
  Description of Artificial Sequence: Synthetic oligonucleotide
  Sense strand starting at position 1783 of SEQ ID NO: 4023
ggguuucucacucauggau

SEQ ID NO: 313333 - RNA, 19 nt, Artificial Sequence
  Description of Artificial Sequence: Synthetic oligonucleotide
  Antisense strand to SEQ ID NO: 313332
auccaugagugagaaaccc

SEQ ID NO: 313334 - RNA, 19 nt, Artificial Sequence
  Description of Artificial Sequence: Synthetic oligonucleotide
  Sense strand starting at position 2030 of SEQ ID NO: 4023
uguguuugauguuuacauc

SEQ ID NO: 313335 - RNA, 19 nt, Artificial Sequence
  Description of Artificial Sequence: Synthetic oligonucleotide
  Antisense strand to SEQ ID NO: 313334
gauguaaacaucaaacaca

SEQ ID NO: 313336 - RNA, 19 nt, Artificial Sequence
  Description of Artificial Sequence: Synthetic oligonucleotide
  Sense strand starting at position 2031 of SEQ ID NO: 4023
guguuugauguuuacauca

SEQ ID NO: 313337 - RNA, 19 nt, Artificial Sequence
  Description of Artificial Sequence: Synthetic oligonucleotide
  Antisense strand to SEQ ID NO: 313336
ugauguaaacaucaaacac

SEQ ID NO: 313338 - RNA, 19 nt, Artificial Sequence
  Description of Artificial Sequence: Synthetic oligonucleotide
  Sense strand starting at position 2033 of SEQ ID NO: 4023
guuugauguuuacaucaaa

SEQ ID NO: 313339 - RNA, 19 nt, Artificial Sequence
  Description of Artificial Sequence: Synthetic oligonucleotide
  Antisense strand to SEQ ID NO: 313338
uuugauguaaacaucaaac

SEQ ID NO: 313340 - RNA, 19 nt, Artificial Sequence
  Description of Artificial Sequence: Synthetic oligonucleotide
  Sense strand starting at position 2036 of SEQ ID NO: 4023
ugauguuuacaucaaaguc

SEQ ID NO: 313341 - RNA, 19 nt, Artificial Sequence
  Description of Artificial Sequence: Synthetic oligonucleotide
  Antisense strand to SEQ ID NO: 313340
gacuuugauguaaacauca

SEQ ID NO: 313342 - RNA, 19 nt, Artificial Sequence
  Description of Artificial Sequence: Synthetic oligonucleotide
  Sense strand starting at position 2054 of SEQ ID NO: 4023
cacaaagugcugugcucaa

SEQ ID NO: 313343 - RNA, 19 nt, Artificial Sequence
  Description of Artificial Sequence: Synthetic oligonucleotide
  Antisense strand to SEQ ID NO: 313342
uugagcacagcacuuugug

SEQ ID NO: 313344 - RNA, 19 nt, Artificial Sequence
  Description of Artificial Sequence: Synthetic oligonucleotide
  Sense strand starting at position 2058 of SEQ ID NO: 4023
aagugcugugcucaaggaa

SEQ ID NO: 313345 - RNA, 19 nt, Artificial Sequence
  Description of Artificial Sequence: Synthetic oligonucleotide
  Antisense strand to SEQ ID NO: 313344
uuccuugagcacagcacuu

SEQ ID NO: 313346 - RNA, 19 nt, Artificial Sequence
  Description of Artificial Sequence: Synthetic oligonucleotide
  Sense strand starting at position 2705 of SEQ ID NO: 4023
ggaccuuucccacgaagcu

SEQ ID NO: 313347 - RNA, 19 nt, Artificial Sequence
  Description of Artificial Sequence: Synthetic oligonucleotide
  Antisense strand to SEQ ID NO: 313346
agcuucgugggaaaggucc

SEQ ID NO: 313348 - RNA, 19 nt, Artificial Sequence
  Description of Artificial Sequence: Synthetic oligonucleotide
  Sense strand starting at position 2931 of SEQ ID NO: 4023
uugcuuucuugggcacuaa

SEQ ID NO: 313349 - RNA, 19 nt, Artificial Sequence
  Description of Artificial Sequence: Synthetic oligonucleotide
  Antisense strand to SEQ ID NO: 313348
uuagugcccaagaaagcaa

SEQ ID NO: 313350 - RNA, 19 nt, Artificial Sequence
  Description of Artificial Sequence: Synthetic oligonucleotide
  Sense strand starting at position 2982 of SEQ ID NO: 4023
cucagagaccuguguggaa

SEQ ID NO: 313351 - RNA, 19 nt, Artificial Sequence
  Description of Artificial Sequence: Synthetic oligonucleotide
  Antisense strand to SEQ ID NO: 313350
uuccacacaggucucugag

SEQ ID NO: 313352 - RNA, 19 nt, Artificial Sequence
  Description of Artificial Sequence: Synthetic oligonucleotide
  Sense strand starting at position 3016 of SEQ ID NO: 4023
uguggagacuccuaaagcu

SEQ ID NO: 313353 - RNA, 19 nt, Artificial Sequence
  Description of Artificial Sequence: Synthetic oligonucleotide
  Antisense strand to SEQ ID NO: 313352
agcuuuaggagucuccaca

SEQ ID NO: 313354 - RNA, 19 nt, Artificial Sequence
  Description of Artificial Sequence: Synthetic oligonucleotide
  Sense strand starting at position 3187 of SEQ ID NO: 4023
gacuuaauuugugcaagcu

SEQ ID NO: 313355 - RNA, 19 nt, Artificial Sequence
  Description of Artificial Sequence: Synthetic oligonucleotide
  Antisense strand to SEQ ID NO: 313354
agcuugcacaaauuaaguc

SEQ ID NO: 313356 - RNA, 19 nt, Artificial Sequence
  Description of Artificial Sequence: Synthetic oligonucleotide
  Sense strand starting at position 3274 of SEQ ID NO: 4023
aggaauucgcccgguuaau

SEQ ID NO: 313357 - RNA, 19 nt, Artificial Sequence
  Description of Artificial Sequence: Synthetic oligonucleotide
  Antisense strand to SEQ ID NO: 313356
auuaaccgggcgaauuccu

SEQ ID NO: 313358 - RNA, 19 nt, Artificial Sequence
  Description of Artificial Sequence: Synthetic oligonucleotide
  Sense strand starting at position 3344 of SEQ ID NO: 4023
ugucuaucaccuugugaua

SEQ ID NO: 313359 - RNA, 19 nt, Artificial Sequence
  Description of Artificial Sequence: Synthetic oligonucleotide
  Antisense strand to SEQ ID NO: 313358
uaucacaaggugauagaca

SEQ ID NO: 313360 - RNA, 19 nt, Artificial Sequence
  Description of Artificial Sequence: Synthetic oligonucleotide
  Sense strand starting at position 3598 of SEQ ID NO: 4023
ucuguaacucgcucgguua

SEQ ID NO: 313361 - RNA, 19 nt, Artificial Sequence
  Description of Artificial Sequence: Synthetic oligonucleotide
  Antisense strand to SEQ ID NO: 313360
uaaccgagcgaguuacaga

SEQ ID NO: 313362 - RNA, 19 nt, Artificial Sequence
  Description of Artificial Sequence: Synthetic oligonucleotide
  Sense strand starting at position 3601 of SEQ ID NO: 4023
guaacucgcucgguuacaa

SEQ ID NO: 313363 - RNA, 19 nt, Artificial Sequence
  Description of Artificial Sequence: Synthetic oligonucleotide
  Antisense strand to SEQ ID NO: 313362
uuguaaccgagcgaguuac

SEQ ID NO: 313364 - RNA, 19 nt, Artificial Sequence
  Description of Artificial Sequence: Synthetic oligonucleotide
  Sense strand starting at position 3872 of SEQ ID NO: 4023
acgcucauuucuuggagua

SEQ ID NO: 313365 - RNA, 19 nt, Artificial Sequence
  Description of Artificial Sequence: Synthetic oligonucleotide
  Antisense strand to SEQ ID NO: 313364
uacuccaagaaaugagcgu

SEQ ID NO: 313366 - RNA, 19 nt, Artificial Sequence
  Description of Artificial Sequence: Synthetic oligonucleotide
  Sense strand starting at position 3873 of SEQ ID NO: 4023
cgcucauuucuuggaguau

SEQ ID NO: 313367 - RNA, 19 nt, Artificial Sequence
  Description of Artificial Sequence: Synthetic oligonucleotide
  Antisense strand to SEQ ID NO: 313366
auacuccaagaaaugagcg

SEQ ID NO: 313368 - RNA, 19 nt, Artificial Sequence
  Description of Artificial Sequence: Synthetic oligonucleotide
  Sense strand starting at position 3874 of SEQ ID NO: 4023
gcucauuucuuggaguauu

SEQ ID NO: 313369 - RNA, 19 nt, Artificial Sequence
  Description of Artificial Sequence: Synthetic oligonucleotide
  Antisense strand to SEQ ID NO: 313368
aauacuccaagaaaugagc

SEQ ID NO: 313370 - RNA, 19 nt, Artificial Sequence
  Description of Artificial Sequence: Synthetic oligonucleotide
  Sense strand starting at position 3952 of SEQ ID NO: 4023
auacuacaauaaugagagu

SEQ ID NO: 313371 - RNA, 19 nt, Artificial Sequence
  Description of Artificial Sequence: Synthetic oligonucleotide
  Antisense strand to SEQ ID NO: 313370
acucucauuauuguaguau

SEQ ID NO: 313372 - RNA, 19 nt, Artificial Sequence
  Description of Artificial Sequence: Synthetic oligonucleotide
  Sense strand starting at position 3961 of SEQ ID NO: 4023
uaaugagagucgcacugau

SEQ ID NO: 313373 - RNA, 19 nt, Artificial Sequence
  Description of Artificial Sequence: Synthetic oligonucleotide
  Antisense strand to SEQ ID NO: 313372
aucagugcgacucucauua

SEQ ID NO: 313374 - RNA, 19 nt, Artificial Sequence
  Description of Artificial Sequence: Synthetic oligonucleotide
  Sense strand starting at position 3965 of SEQ ID NO: 4023
gagagucgcacugauuaug

SEQ ID NO: 313375 - RNA, 19 nt, Artificial Sequence
  Description of Artificial Sequence: Synthetic oligonucleotide
  Antisense strand to SEQ ID NO: 313374
cauaaucagugcgacucuc

SEQ ID NO: 313376 - RNA, 19 nt, Artificial Sequence
  Description of Artificial Sequence: Synthetic oligonucleotide
  Sense strand starting at position 3975 of SEQ ID NO: 4023
cugauuaugugccagacau

SEQ ID NO: 313377 - RNA, 19 nt, Artificial Sequence
  Description of Artificial Sequence: Synthetic oligonucleotide
  Antisense strand to SEQ ID NO: 313376
augucuggcacauaaucag

SEQ ID NO: 313378 - RNA, 19 nt, Artificial Sequence
  Description of Artificial Sequence: Synthetic oligonucleotide
  Sense strand starting at position 74 of SEQ ID NO: 4024
acuugugucugugagggua

SEQ ID NO: 313379 - RNA, 19 nt, Artificial Sequence
  Description of Artificial Sequence: Synthetic oligonucleotide
  Antisense strand to SEQ ID NO: 313378
uacccucacagacacaagu

SEQ ID NO: 313380 - RNA, 19 nt, Artificial Sequence
  Description of Artificial Sequence: Synthetic oligonucleotide
  Sense strand starting at position 77 of SEQ ID NO: 4024
ugugucugugaggguaaga

SEQ ID NO: 313381 - RNA, 19 nt, Artificial Sequence
  Description of Artificial Sequence: Synthetic oligonucleotide
  Antisense strand to SEQ ID NO: 313380
ucuuacccucacagacaca

SEQ ID NO: 313382 - RNA, 19 nt, Artificial Sequence
  Description of Artificial Sequence: Synthetic oligonucleotide
  Sense strand starting at position 138 of SEQ ID NO: 4024
aguaaagggccggauagua

SEQ ID NO: 313383 - RNA, 19 nt, Artificial Sequence
  Description of Artificial Sequence: Synthetic oligonucleotide
  Antisense strand to SEQ ID NO: 313382
uacuauccggcccuuuacu

SEQ ID NO: 313384 - RNA, 19 nt, Artificial Sequence
  Description of Artificial Sequence: Synthetic oligonucleotide
  Sense strand starting at position 179 of SEQ ID NO: 4024
acaagugaucucugucaca

SEQ ID NO: 313385 - RNA, 19 nt, Artificial Sequence
  Description of Artificial Sequence: Synthetic oligonucleotide
  Antisense strand to SEQ ID NO: 313384
ugugacagagaucacuugu

SEQ ID NO: 313386 - RNA, 19 nt, Artificial Sequence
  Description of Artificial Sequence: Synthetic oligonucleotide
  Sense strand starting at position 182 of SEQ ID NO: 4024
agugaucucugucacaucu

SEQ ID NO: 313387 - RNA, 19 nt, Artificial Sequence
  Description of Artificial Sequence: Synthetic oligonucleotide
  Antisense strand to SEQ ID NO: 313386
agaugugacagagaucacu

SEQ ID NO: 313388 - RNA, 19 nt, Artificial Sequence
  Description of Artificial Sequence: Synthetic oligonucleotide
  Sense strand starting at position 362 of SEQ ID NO: 4024
agcagugcccuuuauuuau

SEQ ID NO: 313389 - RNA, 19 nt, Artificial Sequence
  Description of Artificial Sequence: Synthetic oligonucleotide
  Antisense strand to SEQ ID NO: 313388
auaaauaaagggcacugcu

SEQ ID NO: 313390 - RNA, 19 nt, Artificial Sequence
  Description of Artificial Sequence: Synthetic oligonucleotide
  Sense strand starting at position 702 of SEQ ID NO: 4024
cucauucgauccucgcaaa

SEQ ID NO: 313391 - RNA, 19 nt, Artificial Sequence
  Description of Artificial Sequence: Synthetic oligonucleotide
  Antisense strand to SEQ ID NO: 313390
uuugcgaggaucgaaugag

SEQ ID NO: 313392 - RNA, 19 nt, Artificial Sequence
  Description of Artificial Sequence: Synthetic oligonucleotide
  Sense strand starting at position 727 of SEQ ID NO: 4024
ggagguagacacuguuauu

SEQ ID NO: 313393 - RNA, 19 nt, Artificial Sequence
  Description of Artificial Sequence: Synthetic oligonucleotide
  Antisense strand to SEQ ID NO: 313392
aauaacagugucuaccucc

SEQ ID NO: 313394 - RNA, 19 nt, Artificial Sequence
  Description of Artificial Sequence: Synthetic oligonucleotide
  Sense strand starting at position 770 of SEQ ID NO: 4024
gaggguuagcucugcuuug

SEQ ID NO: 313395 - RNA, 19 nt, Artificial Sequence
  Description of Artificial Sequence: Synthetic oligonucleotide
  Antisense strand to SEQ ID NO: 313394
caaagcagagcuaacccuc

SEQ ID NO: 313396 - RNA, 19 nt, Artificial Sequence
  Description of Artificial Sequence: Synthetic oligonucleotide
  Sense strand starting at position 772 of SEQ ID NO: 4024
ggguuagcucugcuuugca

SEQ ID NO: 313397 - RNA, 19 nt, Artificial Sequence
  Description of Artificial Sequence: Synthetic oligonucleotide
  Antisense strand to SEQ ID NO: 313396
ugcaaagcagagcuaaccc

SEQ ID NO: 313398 - RNA, 19 nt, Artificial Sequence
  Description of Artificial Sequence: Synthetic oligonucleotide
  Sense strand starting at position 819 of SEQ ID NO: 4024
cugagaguguguccacgau

SEQ ID NO: 313399 - RNA, 19 nt, Artificial Sequence
  Description of Artificial Sequence: Synthetic oligonucleotide
  Antisense strand to SEQ ID NO: 313398
aucguggacacacucucag

SEQ ID NO: 313400 - RNA, 19 nt, Artificial Sequence
  Description of Artificial Sequence: Synthetic oligonucleotide
  Sense strand starting at position 1242 of SEQ ID NO: 4024
ucccuugaguuguguggua

SEQ ID NO: 313401 - RNA, 19 nt, Artificial Sequence
  Description of Artificial Sequence: Synthetic oligonucleotide
  Antisense strand to SEQ ID NO: 313400
uaccacacaacucaaggga

SEQ ID NO: 313402 - RNA, 19 nt, Artificial Sequence
  Description of Artificial Sequence: Synthetic oligonucleotide
  Sense strand starting at position 1244 of SEQ ID NO: 4024
ccuugaguugugugguaga

SEQ ID NO: 313403 - RNA, 19 nt, Artificial Sequence
  Description of Artificial Sequence: Synthetic oligonucleotide
  Antisense strand to SEQ ID NO: 313402
ucuaccacacaacucaagg

SEQ ID NO: 313404 - RNA, 19 nt, Artificial Sequence
  Description of Artificial Sequence: Synthetic oligonucleotide
  Sense strand starting at position 1247 of SEQ ID NO: 4024
ugaguugugugguagacaa

SEQ ID NO: 313405 - RNA, 19 nt, Artificial Sequence
  Description of Artificial Sequence: Synthetic oligonucleotide
  Antisense strand to SEQ ID NO: 313404
uugucuaccacacaacuca

SEQ ID NO: 313406 - RNA, 19 nt, Artificial Sequence
  Description of Artificial Sequence: Synthetic oligonucleotide
  Sense strand starting at position 1249 of SEQ ID NO: 4024
aguugugugguagacaacu

SEQ ID NO: 313407 - RNA, 19 nt, Artificial Sequence
  Description of Artificial Sequence: Synthetic oligonucleotide
  Antisense strand to SEQ ID NO: 313406
aguugucuaccacacaacu

SEQ ID NO: 313408 - RNA, 19 nt, Artificial Sequence
  Description of Artificial Sequence: Synthetic oligonucleotide
  Sense strand starting at position 1529 of SEQ ID NO: 4024
cgagcucucucagggaauc

SEQ ID NO: 313409 - RNA, 19 nt, Artificial Sequence
  Description of Artificial Sequence: Synthetic oligonucleotide
  Antisense strand to SEQ ID NO: 313408
gauucccugagagagcucg

SEQ ID NO: 313410 - RNA, 19 nt, Artificial Sequence
  Description of Artificial Sequence: Synthetic oligonucleotide
  Sense strand starting at position 1542 of SEQ ID NO: 4024
ggaauccuccagcgugcaa

SEQ ID NO: 313411 - RNA, 19 nt, Artificial Sequence
  Description of Artificial Sequence: Synthetic oligonucleotide
  Antisense strand to SEQ ID NO: 313410
uugcacgcuggaggauucc

SEQ ID NO: 313412 - RNA, 19 nt, Artificial Sequence
  Description of Artificial Sequence: Synthetic oligonucleotide
  Sense strand starting at position 1573 of SEQ ID NO: 4024
gagucuguuucccaggcaa

SEQ ID NO: 313413 - RNA, 19 nt, Artificial Sequence
  Description of Artificial Sequence: Synthetic oligonucleotide
  Antisense strand to SEQ ID NO: 313412
uugccugggaaacagacuc

SEQ ID NO: 313414 - RNA, 19 nt, Artificial Sequence
  Description of Artificial Sequence: Synthetic oligonucleotide
  Sense strand starting at position 1575 of SEQ ID NO: 4024
gucuguuucccaggcaaac

SEQ ID NO: 313415 - RNA, 19 nt, Artificial Sequence
  Description of Artificial Sequence: Synthetic oligonucleotide
  Antisense strand to SEQ ID NO: 313414
guuugccugggaaacagac

SEQ ID NO: 313416 - RNA, 19 nt, Artificial Sequence
  Description of Artificial Sequence: Synthetic oligonucleotide
  Sense strand starting at position 1585 of SEQ ID NO: 4024
caggcaaacugcugugaga

SEQ ID NO: 313417 - RNA, 19 nt, Artificial Sequence
  Description of Artificial Sequence: Synthetic oligonucleotide
  Antisense strand to SEQ ID NO: 313416
ucucacagcaguuugccug

SEQ ID NO: 313418 - RNA, 19 nt, Artificial Sequence
  Description of Artificial Sequence: Synthetic oligonucleotide
  Sense strand starting at position 1587 of SEQ ID NO: 4024
ggcaaacugcugugagaca

SEQ ID NO: 313419 - RNA, 19 nt, Artificial Sequence
  Description of Artificial Sequence: Synthetic oligonucleotide
  Antisense strand to SEQ ID NO: 313418
ugucucacagcaguuugcc

SEQ ID NO: 313420 - RNA, 19 nt, Artificial Sequence
  Description of Artificial Sequence: Synthetic oligonucleotide
  Sense strand starting at position 2172 of SEQ ID NO: 4024
ugugcauucguacguguac

SEQ ID NO: 313421 - RNA, 19 nt, Artificial Sequence
  Description of Artificial Sequence: Synthetic oligonucleotide
  Antisense strand to SEQ ID NO: 313420
guacacguacgaaugcaca

SEQ ID NO: 313422 - RNA, 19 nt, Artificial Sequence
  Description of Artificial Sequence: Synthetic oligonucleotide
  Sense strand starting at position 2277 of SEQ ID NO: 4024
guaacuaugugucuucucu

SEQ ID NO: 313423 - RNA, 19 nt, Artificial Sequence
  Description of Artificial Sequence: Synthetic oligonucleotide
  Antisense strand to SEQ ID NO: 313422
agagaagacacauaguuac

SEQ ID NO: 313424 - RNA, 19 nt, Artificial Sequence
  Description of Artificial Sequence: Synthetic oligonucleotide
  Sense strand starting at position 2284 of SEQ ID NO: 4024
ugugucuucucugugcaua

SEQ ID NO: 313425 - RNA, 19 nt, Artificial Sequence
  Description of Artificial Sequence: Synthetic oligonucleotide
  Antisense strand to SEQ ID NO: 313424
uaugcacagagaagacaca

SEQ ID NO: 313426 - RNA, 19 nt, Artificial Sequence
  Description of Artificial Sequence: Synthetic oligonucleotide
  Sense strand starting at position 2285 of SEQ ID NO: 4024
gugucuucucugugcauac

SEQ ID NO: 313427 - RNA, 19 nt, Artificial Sequence
  Description of Artificial Sequence: Synthetic oligonucleotide
  Antisense strand to SEQ ID NO: 313426
guaugcacagagaagacac

SEQ ID NO: 313428 - RNA, 19 nt, Artificial Sequence
  Description of Artificial Sequence: Synthetic oligonucleotide
  Sense strand starting at position 2286 of SEQ ID NO: 4024
ugucuucucugugcauaca

SEQ ID NO: 313429 - RNA, 19 nt, Artificial Sequence
  Description of Artificial Sequence: Synthetic oligonucleotide
  Antisense strand to SEQ ID NO: 313428
uguaugcacagagaagaca

SEQ ID NO: 313430 - RNA, 19 nt, Artificial Sequence
  Description of Artificial Sequence: Synthetic oligonucleotide
  Sense strand starting at position 2442 of SEQ ID NO: 4024
ccucucucaucuguaaagu

SEQ ID NO: 313431 - RNA, 19 nt, Artificial Sequence
  Description of Artificial Sequence: Synthetic oligonucleotide
  Antisense strand to SEQ ID NO: 313430
acuuuacagaugagagagg

SEQ ID NO: 313432 - RNA, 19 nt, Artificial Sequence
  Description of Artificial Sequence: Synthetic oligonucleotide
  Sense strand starting at position 2457 of SEQ ID NO: 4024
aagugagguuaaucaccau

SEQ ID NO: 313433 - RNA, 19 nt, Artificial Sequence
  Description of Artificial Sequence: Synthetic oligonucleotide
  Antisense strand to SEQ ID NO: 313432
auggugauuaaccucacuu

SEQ ID NO: 313434 - RNA, 19 nt, Artificial Sequence
  Description of Artificial Sequence: Synthetic oligonucleotide
  Sense strand starting at position 2535 of SEQ ID NO: 4024
acgugacugacacauagua

SEQ ID NO: 313435 - RNA, 19 nt, Artificial Sequence
  Description of Artificial Sequence: Synthetic oligonucleotide
  Antisense strand to SEQ ID NO: 313434
uacuaugugucagucacgu

SEQ ID NO: 313436 - RNA, 19 nt, Artificial Sequence
  Description of Artificial Sequence: Synthetic oligonucleotide
  Sense strand starting at position 2551 of SEQ ID NO: 4024
guagguacucaacaaacgu

SEQ ID NO: 313437 - RNA, 19 nt, Artificial Sequence
  Description of Artificial Sequence: Synthetic oligonucleotide
  Antisense strand to SEQ ID NO: 313436
acguuuguugaguaccuac

SEQ ID NO: 313438 - RNA, 19 nt, Artificial Sequence
  Description of Artificial Sequence: Synthetic oligonucleotide
  Sense strand starting at position 2848 of SEQ ID NO: 4024
cgauucgucucugaggcua

SEQ ID NO: 313439 - RNA, 19 nt, Artificial Sequence
  Description of Artificial Sequence: Synthetic oligonucleotide
  Antisense strand to SEQ ID NO: 313438
uagccucagagacgaaucg

SEQ ID NO: 313440 - RNA, 19 nt, Artificial Sequence
  Description of Artificial Sequence: Synthetic oligonucleotide
  Sense strand starting at position 2850 of SEQ ID NO: 4024
auucgucucugaggcuaaa

SEQ ID NO: 313441 - RNA, 19 nt, Artificial Sequence
  Description of Artificial Sequence: Synthetic oligonucleotide
  Antisense strand to SEQ ID NO: 313440
uuuagccucagagacgaau

SEQ ID NO: 313442 - RNA, 19 nt, Artificial Sequence
  Description of Artificial Sequence: Synthetic oligonucleotide
  Sense strand starting at position 3680 of SEQ ID NO: 4024
uccagaucugcugaugaug

SEQ ID NO: 313443 - RNA, 19 nt, Artificial Sequence
  Description of Artificial Sequence: Synthetic oligonucleotide
  Antisense strand to SEQ ID NO: 313442
caucaucagcagaucugga

SEQ ID NO: 313444 - RNA, 19 nt, Artificial Sequence
  Description of Artificial Sequence: Synthetic oligonucleotide
  Sense strand starting at position 3729 of SEQ ID NO: 4024
auggcuguguucccaggaa

SEQ ID NO: 313445 - RNA, 19 nt, Artificial Sequence
  Description of Artificial Sequence: Synthetic oligonucleotide
  Antisense strand to SEQ ID NO: 313444
uuccugggaacacagccau

SEQ ID NO: 313446 - RNA, 19 nt, Artificial Sequence
  Description of Artificial Sequence: Synthetic oligonucleotide
  Sense strand starting at position 3753 of SEQ ID NO: 4024
acuguucuccaagagccaa

SEQ ID NO: 313447 - RNA, 19 nt, Artificial Sequence
  Description of Artificial Sequence: Synthetic oligonucleotide
  Antisense strand to SEQ ID NO: 313446
uuggcucuuggagaacagu

SEQ ID NO: 313448 - RNA, 19 nt, Artificial Sequence
  Description of Artificial Sequence: Synthetic oligonucleotide
  Sense strand starting at position 76 of SEQ ID NO: 4025
aagugcaguugucuuauuu

SEQ ID NO: 313449 - RNA, 19 nt, Artificial Sequence
  Description of Artificial Sequence: Synthetic oligonucleotide
  Antisense strand to SEQ ID NO: 313448
aaauaagacaacugcacuu

SEQ ID NO: 313450 - RNA, 19 nt, Artificial Sequence
  Description of Artificial Sequence: Synthetic oligonucleotide
  Sense strand starting at position 158 of SEQ ID NO: 4025
auaauuucgucacaagaug

SEQ ID NO: 313451 - RNA, 19 nt, Artificial Sequence
  Description of Artificial Sequence: Synthetic oligonucleotide
  Antisense strand to SEQ ID NO: 313450
caucuugugacgaaauuau

SEQ ID NO: 313452 - RNA, 19 nt, Artificial Sequence
  Description of Artificial Sequence: Synthetic oligonucleotide
  Sense strand starting at position 305 of SEQ ID NO: 4025
cucuacaaugcaugaagua

SEQ ID NO: 313453 - RNA, 19 nt, Artificial Sequence
  Description of Artificial Sequence: Synthetic oligonucleotide
  Antisense strand to SEQ ID NO: 313452
uacuucaugcauuguagag

SEQ ID NO: 313454 - RNA, 19 nt, Artificial Sequence
  Description of Artificial Sequence: Synthetic oligonucleotide
  Sense strand starting at position 306 of SEQ ID NO: 4025
ucuacaaugcaugaaguau

SEQ ID NO: 313455 - RNA, 19 nt, Artificial Sequence
  Description of Artificial Sequence: Synthetic oligonucleotide
  Antisense strand to SEQ ID NO: 313454
auacuucaugcauuguaga

SEQ ID NO: 313456 - RNA, 19 nt, Artificial Sequence
  Description of Artificial Sequence: Synthetic oligonucleotide
  Sense strand starting at position 521 of SEQ ID NO: 4025
cacagaugugaagguaaua

SEQ ID NO: 313457 - RNA, 19 nt, Artificial Sequence
  Description of Artificial Sequence: Synthetic oligonucleotide
  Antisense strand to SEQ ID NO: 313456
uauuaccuucacaucugug

SEQ ID NO: 313458 - RNA, 19 nt, Artificial Sequence
  Description of Artificial Sequence: Synthetic oligonucleotide
  Sense strand starting at position 610 of SEQ ID NO: 4025
ccaguucuccuccaaaguu

SEQ ID NO: 313459 - RNA, 19 nt, Artificial Sequence
  Description of Artificial Sequence: Synthetic oligonucleotide
  Antisense strand to SEQ ID NO: 313458
aacuuuggaggagaacugg

SEQ ID NO: 313460 - RNA, 19 nt, Artificial Sequence
  Description of Artificial Sequence: Synthetic oligonucleotide
  Sense strand starting at position 666 of SEQ ID NO: 4025
ucuuaaauccaaugagcag

SEQ ID NO: 313461 - RNA, 19 nt, Artificial Sequence
  Description of Artificial Sequence: Synthetic oligonucleotide
  Antisense strand to SEQ ID NO: 313460
cugcucauuggauuuaaga

SEQ ID NO: 313462 - RNA, 19 nt, Artificial Sequence
  Description of Artificial Sequence: Synthetic oligonucleotide
  Sense strand starting at position 752 of SEQ ID NO: 4025
auuuaauuaugaggaggau

SEQ ID NO: 313463 - RNA, 19 nt, Artificial Sequence
  Description of Artificial Sequence: Synthetic oligonucleotide
  Antisense strand to SEQ ID NO: 313462
auccuccucauaauuaaau

SEQ ID NO: 313464 - RNA, 19 nt, Artificial Sequence
  Description of Artificial Sequence: Synthetic oligonucleotide
  Sense strand starting at position 826 of SEQ ID NO: 4025
cguaaugucaaauaugguu

SEQ ID NO: 313465 - RNA, 19 nt, Artificial Sequence
  Description of Artificial Sequence: Synthetic oligonucleotide
  Antisense strand to SEQ ID NO: 313464
aaccauauuugacauuacg

SEQ ID NO: 313466 - RNA, 19 nt, Artificial Sequence
  Description of Artificial Sequence: Synthetic oligonucleotide
  Sense strand starting at position 1096 of SEQ ID NO: 4025
gcguuauccuauuuaaucc

SEQ ID NO: 313467 - RNA, 19 nt, Artificial Sequence
  Description of Artificial Sequence: Synthetic oligonucleotide
  Antisense strand to SEQ ID NO: 313466
ggauuaaauaggauaacgc

SEQ ID NO: 313468 - RNA, 19 nt, Artificial Sequence
  Description of Artificial Sequence: Synthetic oligonucleotide
  Sense strand starting at position 1162 of SEQ ID NO: 4025
gacggaaaguccuuccauu

SEQ ID NO: 313469 - RNA, 19 nt, Artificial Sequence
  Description of Artificial Sequence: Synthetic oligonucleotide
  Antisense strand to SEQ ID NO: 313468
aauggaaggacuuuccguc

SEQ ID NO: 313470 - RNA, 19 nt, Artificial Sequence
  Description of Artificial Sequence: Synthetic oligonucleotide
  Sense strand starting at position 1172 of SEQ ID NO: 4025
ccuuccauucuuuauggga

SEQ ID NO: 313471 - RNA, 19 nt, Artificial Sequence
  Description of Artificial Sequence: Synthetic oligonucleotide
  Antisense strand to SEQ ID NO: 313470
ucccauaaagaauggaagg

SEQ ID NO: 313472 - RNA, 19 nt, Artificial Sequence
  Description of Artificial Sequence: Synthetic oligonucleotide
  Sense strand starting at position 1272 of SEQ ID NO: 4025
ggugacggguaaagaaaua

SEQ ID NO: 313473 - RNA, 19 nt, Artificial Sequence
  Description of Artificial Sequence: Synthetic oligonucleotide
  Antisense strand to SEQ ID NO: 313472
uauuucuuuacccgucacc

SEQ ID NO: 313474 - RNA, 19 nt, Artificial Sequence
  Description of Artificial Sequence: Synthetic oligonucleotide
  Sense strand starting at position 1296 of SEQ ID NO: 4025
cacaaagacucgucaugag

SEQ ID NO: 313475 - RNA, 19 nt, Artificial Sequence
  Description of Artificial Sequence: Synthetic oligonucleotide
  Antisense strand to SEQ ID NO: 313474
cucaugacgagucuuugug

SEQ ID NO: 313476 - RNA, 19 nt, Artificial Sequence
  Description of Artificial Sequence: Synthetic oligonucleotide
  Sense strand starting at position 1310 of SEQ ID NO: 4025
augagucggucuuccagaa

SEQ ID NO: 313477 - RNA, 19 nt, Artificial Sequence
  Description of Artificial Sequence: Synthetic oligonucleotide
  Antisense strand to SEQ ID NO: 313476
uucuggaagaccgacucau

SEQ ID NO: 313478 - RNA, 19 nt, Artificial Sequence
  Description of Artificial Sequence: Synthetic oligonucleotide
  Sense strand starting at position 1314 of SEQ ID NO: 4025
gucggucuuccagaaagac

SEQ ID NO: 313479 - RNA, 19 nt, Artificial Sequence
  Description of Artificial Sequence: Synthetic oligonucleotide
  Antisense strand to SEQ ID NO: 313478
gucuuucuggaagaccgac

SEQ ID NO: 313480 - RNA, 19 nt, Artificial Sequence
  Description of Artificial Sequence: Synthetic oligonucleotide
  Sense strand starting at position 1341 of SEQ ID NO: 4025
gagaccguucagcguauuu

SEQ ID NO: 313481 - RNA, 19 nt, Artificial Sequence
  Description of Artificial Sequence: Synthetic oligonucleotide
  Antisense strand to SEQ ID NO: 313480
aaauacgcugaacggucuc

SEQ ID NO: 313482 - RNA, 19 nt, Artificial Sequence
  Description of Artificial Sequence: Synthetic oligonucleotide
  Sense strand starting at position 1692 of SEQ ID NO: 4025
ggguacucacuucgauaau

SEQ ID NO: 313483 - RNA, 19 nt, Artificial Sequence
  Description of Artificial Sequence: Synthetic oligonucleotide
  Antisense strand to SEQ ID NO: 313482
auuaucgaagugaguaccc

SEQ ID NO: 313484 - RNA, 19 nt, Artificial Sequence
  Description of Artificial Sequence: Synthetic oligonucleotide
  Sense strand starting at position 2063 of SEQ ID NO: 4025
ugaugucgcgcauccgaua

SEQ ID NO: 313485 - RNA, 19 nt, Artificial Sequence
  Description of Artificial Sequence: Synthetic oligonucleotide
  Antisense strand to SEQ ID NO: 313484
uaucggaugcgcgacauca

SEQ ID NO: 313486 - RNA, 19 nt, Artificial Sequence
  Description of Artificial Sequence: Synthetic oligonucleotide
  Sense strand starting at position 2141 of SEQ ID NO: 4025
gcguuugugcuuccucuca

SEQ ID NO: 313487 - RNA, 19 nt, Artificial Sequence
  Description of Artificial Sequence: Synthetic oligonucleotide
  Antisense strand to SEQ ID NO: 313486
ugagaggaagcacaaacgc

SEQ ID NO: 313488 - RNA, 19 nt, Artificial Sequence
  Description of Artificial Sequence: Synthetic oligonucleotide
  Sense strand starting at position 2199 of SEQ ID NO: 4025
ucaccucaccgggaaacuu

SEQ ID NO: 313489 - RNA, 19 nt, Artificial Sequence
  Description of Artificial Sequence: Synthetic oligonucleotide
  Antisense strand to SEQ ID NO: 313488
aaguuucccggugagguga

SEQ ID NO: 313490 - RNA, 19 nt, Artificial Sequence
  Description of Artificial Sequence: Synthetic oligonucleotide
  Sense strand starting at position 2323 of SEQ ID NO: 4025
ccuucuuguucccuggaga

SEQ ID NO: 313491 - RNA, 19 nt, Artificial Sequence
  Description of Artificial Sequence: Synthetic oligonucleotide
  Antisense strand to SEQ ID NO: 313490
ucuccagggaacaagaagg

SEQ ID NO: 313492 - RNA, 19 nt, Artificial Sequence
  Description of Artificial Sequence: Synthetic oligonucleotide
  Sense strand starting at position 2324 of SEQ ID NO: 4025
cuucuuguucccuggagag

SEQ ID NO: 313493 - RNA, 19 nt, Artificial Sequence
  Description of Artificial Sequence: Synthetic oligonucleotide
  Antisense strand to SEQ ID NO: 313492
cucuccagggaacaagaag

SEQ ID NO: 313494 - RNA, 19 nt, Artificial Sequence
  Description of Artificial Sequence: Synthetic oligonucleotide
  Sense strand starting at position 2362 of SEQ ID NO: 4025
gagugucgcgugcuucaga

SEQ ID NO: 313495 - RNA, 19 nt, Artificial Sequence
  Description of Artificial Sequence: Synthetic oligonucleotide
  Antisense strand to SEQ ID NO: 313494
ucugaagcacgcgacacuc

SEQ ID NO: 313496 - RNA, 19 nt, Artificial Sequence
  Description of Artificial Sequence: Synthetic oligonucleotide
  Sense strand starting at position 2379 of SEQ ID NO: 4025
gauuccugcgaaggauuau

SEQ ID NO: 313497 - RNA, 19 nt, Artificial Sequence
  Description of Artificial Sequence: Synthetic oligonucleotide
  Antisense strand to SEQ ID NO: 313496
auaauccuucgcaggaauc

SEQ ID NO: 313498 - RNA, 19 nt, Artificial Sequence
  Description of Artificial Sequence: Synthetic oligonucleotide
  Sense strand starting at position 2380 of SEQ ID NO: 4025
auuccugcgaaggauuauu

SEQ ID NO: 313499 - RNA, 19 nt, Artificial Sequence
  Description of Artificial Sequence: Synthetic oligonucleotide
  Antisense strand to SEQ ID NO: 313498
aauaauccuucgcaggaau

SEQ ID NO: 313500 - RNA, 19 nt, Artificial Sequence
  Description of Artificial Sequence: Synthetic oligonucleotide
  Sense strand starting at position 2557 of SEQ ID NO: 4025
ccuuuauaacgugaaagua

SEQ ID NO: 313501 - RNA, 19 nt, Artificial Sequence
  Description of Artificial Sequence: Synthetic oligonucleotide
  Antisense strand to SEQ ID NO: 313500
uacuuucacguuauaaagg

SEQ ID NO: 313502 - RNA, 19 nt, Artificial Sequence
  Description of Artificial Sequence: Synthetic oligonucleotide
  Sense strand starting at position 2565 of SEQ ID NO: 4025
acgugaaaguaaccaaacu

SEQ ID NO: 313503 - RNA, 19 nt, Artificial Sequence
  Description of Artificial Sequence: Synthetic oligonucleotide
  Antisense strand to SEQ ID NO: 313502
aguuugguuacuuucacgu

SEQ ID NO: 313504 - RNA, 19 nt, Artificial Sequence
  Description of Artificial Sequence: Synthetic oligonucleotide
  Sense strand starting at position 2586 of SEQ ID NO: 4025
guuagaacuuaguuuaagu

SEQ ID NO: 313505 - RNA, 19 nt, Artificial Sequence
  Description of Artificial Sequence: Synthetic oligonucleotide
  Antisense strand to SEQ ID NO: 313504
acuuaaacuaaguucuaac

SEQ ID NO: 313506 - RNA, 19 nt, Artificial Sequence
  Description of Artificial Sequence: Synthetic oligonucleotide
  Sense strand starting at position 2607 of SEQ ID NO: 4025
uugguagcuccagaaauuc

SEQ ID NO: 313507 - RNA, 19 nt, Artificial Sequence
  Description of Artificial Sequence: Synthetic oligonucleotide
  Antisense strand to SEQ ID NO: 313506
gaauuucuggagcuaccaa

SEQ ID NO: 313508 - RNA, 19 nt, Artificial Sequence
  Description of Artificial Sequence: Synthetic oligonucleotide
  Sense strand starting at position 2616 of SEQ ID NO: 4025
ccagaaauuccuuggcaca

SEQ ID NO: 313509 - RNA, 19 nt, Artificial Sequence
  Description of Artificial Sequence: Synthetic oligonucleotide
  Antisense strand to SEQ ID NO: 313508
ugugccaaggaauuucugg

SEQ ID NO: 313510 - RNA, 19 nt, Artificial Sequence
  Description of Artificial Sequence: Synthetic oligonucleotide
  Sense strand starting at position 2618 of SEQ ID NO: 4025
agaaauuccuuggcacauu

SEQ ID NO: 313511 - RNA, 19 nt, Artificial Sequence
  Description of Artificial Sequence: Synthetic oligonucleotide
  Antisense strand to SEQ ID NO: 313510
aaugugccaaggaauuucu

SEQ ID NO: 313512 - RNA, 19 nt, Artificial Sequence
  Description of Artificial Sequence: Synthetic oligonucleotide
  Sense strand starting at position 2721 of SEQ ID NO: 4025
gaagaaagaugcccaaagu

SEQ ID NO: 313513 - RNA, 19 nt, Artificial Sequence
  Description of Artificial Sequence: Synthetic oligonucleotide
  Antisense strand to SEQ ID NO: 313512
acuuugggcaucuuucuuc

SEQ ID NO: 313514 - RNA, 19 nt, Artificial Sequence
  Description of Artificial Sequence: Synthetic oligonucleotide
  Sense strand starting at position 3167 of SEQ ID NO: 4025
aagaauugugucgagaaug

SEQ ID NO: 313515 - RNA, 19 nt, Artificial Sequence
  Description of Artificial Sequence: Synthetic oligonucleotide
  Antisense strand to SEQ ID NO: 313514
cauucucgacacaauucuu

SEQ ID NO: 313516 - RNA, 19 nt, Artificial Sequence
  Description of Artificial Sequence: Synthetic oligonucleotide
  Sense strand starting at position 3221 of SEQ ID NO: 4025
cucauauuggcagguuaau

SEQ ID NO: 313517 - RNA, 19 nt, Artificial Sequence
  Description of Artificial Sequence: Synthetic oligonucleotide
  Antisense strand to SEQ ID NO: 313516
auuaaccugccaauaugag

SEQ ID NO: 313518 - RNA, 19 nt, Artificial Sequence
  Description of Artificial Sequence: Synthetic oligonucleotide
  Sense strand starting at position 3291 of SEQ ID NO: 4025
guucuugucagaggaugga

SEQ ID NO: 313519 - RNA, 19 nt, Artificial Sequence
  Description of Artificial Sequence: Synthetic oligonucleotide
  Antisense strand to SEQ ID NO: 313518
uccauccucugacaagaac

SEQ ID NO: 313520 - RNA, 19 nt, Artificial Sequence
  Description of Artificial Sequence: Synthetic oligonucleotide
  Sense strand starting at position 3363 of SEQ ID NO: 4025
gggaucgucuccuuugaga

SEQ ID NO: 313521 - RNA, 19 nt, Artificial Sequence
  Description of Artificial Sequence: Synthetic oligonucleotide
  Antisense strand to SEQ ID NO: 313520
ucucaaaggagacgauccc

SEQ ID NO: 313522 - RNA, 19 nt, Artificial Sequence
  Description of Artificial Sequence: Synthetic oligonucleotide
  Sense strand starting at position 3378 of SEQ ID NO: 4025
gagacuuuguuugcauaug

SEQ ID NO: 313523 - RNA, 19 nt, Artificial Sequence
  Description of Artificial Sequence: Synthetic oligonucleotide
  Antisense strand to SEQ ID NO: 313522
cauaugcaaacaaagucuc

SEQ ID NO: 313524 - RNA, 19 nt, Artificial Sequence
  Description of Artificial Sequence: Synthetic oligonucleotide
  Sense strand starting at position 3549 of SEQ ID NO: 4025
uuaugauaauggcuccagu

SEQ ID NO: 313525 - RNA, 19 nt, Artificial Sequence
  Description of Artificial Sequence: Synthetic oligonucleotide
  Antisense strand to SEQ ID NO: 313524
acuggagccauuaucauaa

SEQ ID NO: 313526 - RNA, 19 nt, Artificial Sequence
  Description of Artificial Sequence: Synthetic oligonucleotide
  Sense strand starting at position 3944 of SEQ ID NO: 4025
ccaagaaagcagggcuaua

SEQ ID NO: 313527 - RNA, 19 nt, Artificial Sequence
  Description of Artificial Sequence: Synthetic oligonucleotide
  Antisense strand to SEQ ID NO: 313526
uauagcccugcuuucuugg

SEQ ID NO: 313528 - RNA, 19 nt, Artificial Sequence
  Description of Artificial Sequence: Synthetic oligonucleotide
  Sense strand starting at position 52 of SEQ ID NO: 4026
aaaggucugucaucacagu

SEQ ID NO: 313529 - RNA, 19 nt, Artificial Sequence
  Description of Artificial Sequence: Synthetic oligonucleotide
  Antisense strand to SEQ ID NO: 313528
acugugaugacagaccuuu

SEQ ID NO: 313530 - RNA, 19 nt, Artificial Sequence
  Description of Artificial Sequence: Synthetic oligonucleotide
  Sense strand starting at position 53 of SEQ ID NO: 4026
aaggucugucaucacaguu

SEQ ID NO: 313531 - RNA, 19 nt, Artificial Sequence
  Description of Artificial Sequence: Synthetic oligonucleotide
  Antisense strand to SEQ ID NO: 313530
aacugugaugacagaccuu

SEQ ID NO: 313532 - RNA, 19 nt, Artificial Sequence
  Description of Artificial Sequence: Synthetic oligonucleotide
  Sense strand starting at position 99 of SEQ ID NO: 4026
ugaauuugauggcauuguu

SEQ ID NO: 313533 - RNA, 19 nt, Artificial Sequence
  Description of Artificial Sequence: Synthetic oligonucleotide
  Antisense strand to SEQ ID NO: 313532
aacaaugccaucaaauuca

SEQ ID NO: 313534 - RNA, 19 nt, Artificial Sequence
  Description of Artificial Sequence: Synthetic oligonucleotide
  Sense strand starting at position 151 of SEQ ID NO: 4026
agaaguuacuuugugcacu

SEQ ID NO: 313535 - RNA, 19 nt, Artificial Sequence
  Description of Artificial Sequence: Synthetic oligonucleotide
  Antisense strand to SEQ ID NO: 313534
agugcacaaaguaacuucu

SEQ ID NO: 313536 - RNA, 19 nt, Artificial Sequence
  Description of Artificial Sequence: Synthetic oligonucleotide
  Sense strand starting at position 157 of SEQ ID NO: 4026
uacuuugugcacuaagaga

SEQ ID NO: 313537 - RNA, 19 nt, Artificial Sequence
  Description of Artificial Sequence: Synthetic oligonucleotide
  Antisense strand to SEQ ID NO: 313536
ucucuuagugcacaaagua

SEQ ID NO: 313538 - RNA, 19 nt, Artificial Sequence
  Description of Artificial Sequence: Synthetic oligonucleotide
  Sense strand starting at position 243 of SEQ ID NO: 4026
uugguuuguccauaccuca

SEQ ID NO: 313539 - RNA, 19 nt, Artificial Sequence
  Description of Artificial Sequence: Synthetic oligonucleotide
  Antisense strand to SEQ ID NO: 313538
ugagguauggacaaaccaa

SEQ ID NO: 313540 - RNA, 19 nt, Artificial Sequence
  Description of Artificial Sequence: Synthetic oligonucleotide
  Sense strand starting at position 246 of SEQ ID NO: 4026
guuuguccauaccucaaga

SEQ ID NO: 313541 - RNA, 19 nt, Artificial Sequence
  Description of Artificial Sequence: Synthetic oligonucleotide
  Antisense strand to SEQ ID NO: 313540
ucuugagguauggacaaac

SEQ ID NO: 313542 - RNA, 19 nt, Artificial Sequence
  Description of Artificial Sequence: Synthetic oligonucleotide
  Sense strand starting at position 257 of SEQ ID NO: 4026
ccucaagagcaagguauua

SEQ ID NO: 313543 - RNA, 19 nt, Artificial Sequence
  Description of Artificial Sequence: Synthetic oligonucleotide
  Antisense strand to SEQ ID NO: 313542
uaauaccuugcucuugagg

SEQ ID NO: 313544 - RNA, 19 nt, Artificial Sequence
  Description of Artificial Sequence: Synthetic oligonucleotide
  Sense strand starting at position 259 of SEQ ID NO: 4026
ucaagagcaagguauuagu

SEQ ID NO: 313545 - RNA, 19 nt, Artificial Sequence
  Description of Artificial Sequence: Synthetic oligonucleotide
  Antisense strand to SEQ ID NO: 313544
acuaauaccuugcucuuga

SEQ ID NO: 313546 - RNA, 19 nt, Artificial Sequence
  Description of Artificial Sequence: Synthetic oligonucleotide
  Sense strand starting at position 406 of SEQ ID NO: 4026
ugacgugcccucugggaau

SEQ ID NO: 313547 - RNA, 19 nt, Artificial Sequence
  Description of Artificial Sequence: Synthetic oligonucleotide
  Antisense strand to SEQ ID NO: 313546
auucccagagggcacguca

SEQ ID NO: 313548 - RNA, 19 nt, Artificial Sequence
  Description of Artificial Sequence: Synthetic oligonucleotide
  Sense strand starting at position 474 of SEQ ID NO: 4026
cucucaagauugcuaggua

SEQ ID NO: 313549 - RNA, 19 nt, Artificial Sequence
  Description of Artificial Sequence: Synthetic oligonucleotide
  Antisense strand to SEQ ID NO: 313548
uaccuagcaaucuugagag

SEQ ID NO: 313550 - RNA, 19 nt, Artificial Sequence
  Description of Artificial Sequence: Synthetic oligonucleotide
  Sense strand starting at position 571 of SEQ ID NO: 4026
agccgaucacauuacuaca

SEQ ID NO: 313551 - RNA, 19 nt, Artificial Sequence
  Description of Artificial Sequence: Synthetic oligonucleotide
  Antisense strand to SEQ ID NO: 313550
uguaguaaugugaucggcu

SEQ ID NO: 313552 - RNA, 19 nt, Artificial Sequence
  Description of Artificial Sequence: Synthetic oligonucleotide
  Sense strand starting at position 754 of SEQ ID NO: 4026
ccuuucgcauuauuaaaga

SEQ ID NO: 313553 - RNA, 19 nt, Artificial Sequence
  Description of Artificial Sequence: Synthetic oligonucleotide
  Antisense strand to SEQ ID NO: 313552
ucuuuaauaaugcgaaagg

SEQ ID NO: 313554 - RNA, 19 nt, Artificial Sequence
  Description of Artificial Sequence: Synthetic oligonucleotide
  Sense strand starting at position 808 of SEQ ID NO: 4026
uuaaguaugcuacaguaua

SEQ ID NO: 313555 - RNA, 19 nt, Artificial Sequence
  Description of Artificial Sequence: Synthetic oligonucleotide
  Antisense strand to SEQ ID NO: 313554
uauacuguagcauacuuaa

SEQ ID NO: 313556 - RNA, 19 nt, Artificial Sequence
  Description of Artificial Sequence: Synthetic oligonucleotide
  Sense strand starting at position 816 of SEQ ID NO: 4026
gcuacaguauacuuuguaa

SEQ ID NO: 313557 - RNA, 19 nt, Artificial Sequence
  Description of Artificial Sequence: Synthetic oligonucleotide
  Antisense strand to SEQ ID NO: 313556
uuacaaaguauacuguagc

SEQ ID NO: 313558 - RNA, 19 nt, Artificial Sequence
  Description of Artificial Sequence: Synthetic oligonucleotide
  Sense strand starting at position 819 of SEQ ID NO: 4026
acaguauacuuuguaaaug

SEQ ID NO: 313559 - RNA, 19 nt, Artificial Sequence
  Description of Artificial Sequence: Synthetic oligonucleotide
  Antisense strand to SEQ ID NO: 313558
cauuuacaaaguauacugu

SEQ ID NO: 313560 - RNA, 19 nt, Artificial Sequence
  Description of Artificial Sequence: Synthetic oligonucleotide
  Sense strand starting at position 857 of SEQ ID NO: 4026
acaagaaugugccucuuaa

SEQ ID NO: 313561 - RNA, 19 nt, Artificial Sequence
  Description of Artificial Sequence: Synthetic oligonucleotide
  Antisense strand to SEQ ID NO: 313560
uuaagaggcacauucuugu

SEQ ID NO: 313562 - RNA, 19 nt, Artificial Sequence
  Description of Artificial Sequence: Synthetic oligonucleotide
  Sense strand starting at position 940 of SEQ ID NO: 4026
uugggcuagccggaauaau

SEQ ID NO: 313563 - RNA, 19 nt, Artificial Sequence
  Description of Artificial Sequence: Synthetic oligonucleotide
  Antisense strand to SEQ ID NO: 313562
auuauuccggcuagcccaa

SEQ ID NO: 313564 - RNA, 19 nt, Artificial Sequence
  Description of Artificial Sequence: Synthetic oligonucleotide
  Sense strand starting at position 950 of SEQ ID NO: 4026
cggaauaauccauggaguu

SEQ ID NO: 313565 - RNA, 19 nt, Artificial Sequence
  Description of Artificial Sequence: Synthetic oligonucleotide
  Antisense strand to SEQ ID NO: 313564
aacuccauggauuauuccg

SEQ ID NO: 313566 - RNA, 19 nt, Artificial Sequence
  Description of Artificial Sequence: Synthetic oligonucleotide
  Sense strand starting at position 951 of SEQ ID NO: 4026
ggaauaauccauggaguuu

SEQ ID NO: 313567 - RNA, 19 nt, Artificial Sequence
  Description of Artificial Sequence: Synthetic oligonucleotide
  Antisense strand to SEQ ID NO: 313566
aaacuccauggauuauucc

SEQ ID NO: 313568 - RNA, 19 nt, Artificial Sequence
  Description of Artificial Sequence: Synthetic oligonucleotide
  Sense strand starting at position 1160 of SEQ ID NO: 4026
ucgggaagcagucaaauau

SEQ ID NO: 313569 - RNA, 19 nt, Artificial Sequence
  Description of Artificial Sequence: Synthetic oligonucleotide
  Antisense strand to SEQ ID NO: 313568
auauuugacugcuucccga

SEQ ID NO: 313570 - RNA, 19 nt, Artificial Sequence
  Description of Artificial Sequence: Synthetic oligonucleotide
  Sense strand starting at position 1438 of SEQ ID NO: 4026
aagagugcgcgucauggaa

SEQ ID NO: 313571 - RNA, 19 nt, Artificial Sequence
  Description of Artificial Sequence: Synthetic oligonucleotide
  Antisense strand to SEQ ID NO: 313570
uuccaugacgcgcacucuu

SEQ ID NO: 313572 - RNA, 19 nt, Artificial Sequence
  Description of Artificial Sequence: Synthetic oligonucleotide
  Sense strand starting at position 1469 of SEQ ID NO: 4026
cacagagacgucuagguca

SEQ ID NO: 313573 - RNA, 19 nt, Artificial Sequence
  Description of Artificial Sequence: Synthetic oligonucleotide
  Antisense strand to SEQ ID NO: 313572
ugaccuagacgucucugug

SEQ ID NO: 313574 - RNA, 19 nt, Artificial Sequence
  Description of Artificial Sequence: Synthetic oligonucleotide
  Sense strand starting at position 1471 of SEQ ID NO: 4026
cagagacgucuaggucaug

SEQ ID NO: 313575 - RNA, 19 nt, Artificial Sequence
  Description of Artificial Sequence: Synthetic oligonucleotide
  Antisense strand to SEQ ID NO: 313574
caugaccuagacgucucug

SEQ ID NO: 313576 - RNA, 19 nt, Artificial Sequence
  Description of Artificial Sequence: Synthetic oligonucleotide
  Sense strand starting at position 2040 of SEQ ID NO: 4026
aagagagauuccuccgcga

SEQ ID NO: 313577 - RNA, 19 nt, Artificial Sequence
  Description of Artificial Sequence: Synthetic oligonucleotide
  Antisense strand to SEQ ID NO: 313576
ucgcggaggaaucucucuu

SEQ ID NO: 313578 - RNA, 19 nt, Artificial Sequence
  Description of Artificial Sequence: Synthetic oligonucleotide
  Sense strand starting at position 2092 of SEQ ID NO: 4026
cgcguugaccauuggagga

SEQ ID NO: 313579 - RNA, 19 nt, Artificial Sequence
  Description of Artificial Sequence: Synthetic oligonucleotide
  Antisense strand to SEQ ID NO: 313578
uccuccaauggucaacgcg

SEQ ID NO: 313580 - RNA, 19 nt, Artificial Sequence
  Description of Artificial Sequence: Synthetic oligonucleotide
  Sense strand starting at position 2209 of SEQ ID NO: 4026
gccggauggcuccucgagu

SEQ ID NO: 313581 - RNA, 19 nt, Artificial Sequence
  Description of Artificial Sequence: Synthetic oligonucleotide
  Antisense strand to SEQ ID NO: 313580
acucgaggagccauccggc

SEQ ID NO: 313582 - RNA, 19 nt, Artificial Sequence
  Description of Artificial Sequence: Synthetic oligonucleotide
  Sense strand starting at position 2416 of SEQ ID NO: 4026
gcuguagaguccuuaaauu

SEQ ID NO: 313583 - RNA, 19 nt, Artificial Sequence
  Description of Artificial Sequence: Synthetic oligonucleotide
  Antisense strand to SEQ ID NO: 313582
aauuuaaggacucuacagc

SEQ ID NO: 313584 - RNA, 19 nt, Artificial Sequence
  Description of Artificial Sequence: Synthetic oligonucleotide
  Sense strand starting at position 2638 of SEQ ID NO: 4026
aacguuacuuuauuucgua

SEQ ID NO: 313585 - RNA, 19 nt, Artificial Sequence
  Description of Artificial Sequence: Synthetic oligonucleotide
  Antisense strand to SEQ ID NO: 313584
uacgaaauaaaguaacguu

SEQ ID NO: 313586 - RNA, 19 nt, Artificial Sequence
  Description of Artificial Sequence: Synthetic oligonucleotide
  Sense strand starting at position 2639 of SEQ ID NO: 4026
acguuacuuuauuucguaa

SEQ ID NO: 313587 - RNA, 19 nt, Artificial Sequence
  Description of Artificial Sequence: Synthetic oligonucleotide
  Antisense strand to SEQ ID NO: 313586
uuacgaaauaaaguaacgu

SEQ ID NO: 313588 - RNA, 19 nt, Artificial Sequence
  Description of Artificial Sequence: Synthetic oligonucleotide
  Sense strand starting at position 3113 of SEQ ID NO: 4026
auuaguccugaaggaaagu

SEQ ID NO: 313589 - RNA, 19 nt, Artificial Sequence
  Description of Artificial Sequence: Synthetic oligonucleotide
  Antisense strand to SEQ ID NO: 313588
acuuuccuucaggacuaau

SEQ ID NO: 313590 - RNA, 19 nt, Artificial Sequence
  Description of Artificial Sequence: Synthetic oligonucleotide
  Sense strand starting at position 3122 of SEQ ID NO: 4026
gaaggaaaguuccuugcuu

SEQ ID NO: 313591 - RNA, 19 nt, Artificial Sequence
  Description of Artificial Sequence: Synthetic oligonucleotide
  Antisense strand to SEQ ID NO: 313590
aagcaaggaacuuuccuuc

SEQ ID NO: 313592 - RNA, 19 nt, Artificial Sequence
  Description of Artificial Sequence: Synthetic oligonucleotide
  Sense strand starting at position 3123 of SEQ ID NO: 4026
aaggaaaguuccuugcuuu

SEQ ID NO: 313593 - RNA, 19 nt, Artificial Sequence
  Description of Artificial Sequence: Synthetic oligonucleotide
  Antisense strand to SEQ ID NO: 313592
aaagcaaggaacuuuccuu

SEQ ID NO: 313594 - RNA, 19 nt, Artificial Sequence
  Description of Artificial Sequence: Synthetic oligonucleotide
  Sense strand starting at position 3245 of SEQ ID NO: 4026
aauugcaaugaguggauua

SEQ ID NO: 313595 - RNA, 19 nt, Artificial Sequence
  Description of Artificial Sequence: Synthetic oligonucleotide
  Antisense strand to SEQ ID NO: 313594
uaauccacucauugcaauu

SEQ ID NO: 313596 - RNA, 19 nt, Artificial Sequence
  Description of Artificial Sequence: Synthetic oligonucleotide
  Sense strand starting at position 3246 of SEQ ID NO: 4026
auugcaaugaguggauuaa

SEQ ID NO: 313597 - RNA, 19 nt, Artificial Sequence
  Description of Artificial Sequence: Synthetic oligonucleotide
  Antisense strand to SEQ ID NO: 313596
uuaauccacucauugcaau

SEQ ID NO: 313598 - RNA, 19 nt, Artificial Sequence
  Description of Artificial Sequence: Synthetic oligonucleotide
  Sense strand starting at position 3857 of SEQ ID NO: 4026
uaggccuuucuguagcuaa

SEQ ID NO: 313599 - RNA, 19 nt, Artificial Sequence
  Description of Artificial Sequence: Synthetic oligonucleotide
  Antisense strand to SEQ ID NO: 313598
uuagcuacagaaaggccua

SEQ ID NO: 313600 - RNA, 19 nt, Artificial Sequence
  Description of Artificial Sequence: Synthetic oligonucleotide
  Sense strand starting at position 3860 of SEQ ID NO: 4026
gccuuucuguagcuaauuu

SEQ ID NO: 313601 - RNA, 19 nt, Artificial Sequence
  Description of Artificial Sequence: Synthetic oligonucleotide
  Antisense strand to SEQ ID NO: 313600
aaauuagcuacagaaaggc

SEQ ID NO: 313602 - RNA, 19 nt, Artificial Sequence
  Description of Artificial Sequence: Synthetic oligonucleotide
  Sense strand starting at position 3880 of SEQ ID NO: 4026
gguaacugcuuucuugaag

SEQ ID NO: 313603 - RNA, 19 nt, Artificial Sequence
  Description of Artificial Sequence: Synthetic oligonucleotide
  Antisense strand to SEQ ID NO: 313602
cuucaagaaagcaguuacc

SEQ ID NO: 313604 - RNA, 19 nt, Artificial Sequence
  Description of Artificial Sequence: Synthetic oligonucleotide
  Sense strand starting at position 3881 of SEQ ID NO: 4026
guaacugcuuucuugaagu

SEQ ID NO: 313605 - RNA, 19 nt, Artificial Sequence
  Description of Artificial Sequence: Synthetic oligonucleotide
  Antisense strand to SEQ ID NO: 313604
acuucaagaaagcaguuac

SEQ ID NO: 313606 - RNA, 19 nt, Artificial Sequence
  Description of Artificial Sequence: Synthetic oligonucleotide
  Sense strand starting at position 3963 of SEQ ID NO: 4026
ccuguaucuggaggucuga

SEQ ID NO: 313607 - RNA, 19 nt, Artificial Sequence
  Description of Artificial Sequence: Synthetic oligonucleotide
  Antisense strand to SEQ ID NO: 313606
ucagaccuccagauacagg

SEQ ID NO: 313608 - RNA, 19 nt, Artificial Sequence
  Description of Artificial Sequence: Synthetic oligonucleotide
  Sense strand starting at position 291 of SEQ ID NO: 4027
ugagaaguauucccaucac

SEQ ID NO: 313609 - RNA, 19 nt, Artificial Sequence
  Description of Artificial Sequence: Synthetic oligonucleotide
  Antisense strand to SEQ ID NO: 313608
gugaugggaauacuucuca

SEQ ID NO: 313610 - RNA, 19 nt, Artificial Sequence
  Description of Artificial Sequence: Synthetic oligonucleotide
  Sense strand starting at position 449 of SEQ ID NO: 4027
aaaguauucgcagauaaga

SEQ ID NO: 313611 - RNA, 19 nt, Artificial Sequence
  Description of Artificial Sequence: Synthetic oligonucleotide
  Antisense strand to SEQ ID NO: 313610
ucuuaucugcgaauacuuu

SEQ ID NO: 313612 - RNA, 19 nt, Artificial Sequence
  Description of Artificial Sequence: Synthetic oligonucleotide
  Sense strand starting at position 451 of SEQ ID NO: 4027
aguauucgcagauaagaga

SEQ ID NO: 313613 - RNA, 19 nt, Artificial Sequence
  Description of Artificial Sequence: Synthetic oligonucleotide
  Antisense strand to SEQ ID NO: 313612
ucucuuaucugcgaauacu

SEQ ID NO: 313614 - RNA, 19 nt, Artificial Sequence
  Description of Artificial Sequence: Synthetic oligonucleotide
  Sense strand starting at position 518 of SEQ ID NO: 4027
uggacagcucaccauacuu

SEQ ID NO: 313615 - RNA, 19 nt, Artificial Sequence
  Description of Artificial Sequence: Synthetic oligonucleotide
  Antisense strand to SEQ ID NO: 313614
aaguauggugagcugucca

SEQ ID NO: 313616 - RNA, 19 nt, Artificial Sequence
  Description of Artificial Sequence: Synthetic oligonucleotide
  Sense strand starting at position 612 of SEQ ID NO: 4027
ggagcuuguguccaacaca

SEQ ID NO: 313617 - RNA, 19 nt, Artificial Sequence
  Description of Artificial Sequence: Synthetic oligonucleotide
  Antisense strand to SEQ ID NO: 313616
uguguuggacacaagcucc

SEQ ID NO: 313618 - RNA, 19 nt, Artificial Sequence
  Description of Artificial Sequence: Synthetic oligonucleotide
  Sense strand starting at position 688 of SEQ ID NO: 4027
ugugaugaauucuuaugua

SEQ ID NO: 313619 - RNA, 19 nt, Artificial Sequence
  Description of Artificial Sequence: Synthetic oligonucleotide
  Antisense strand to SEQ ID NO: 313618
uacauaagaauucaucaca

SEQ ID NO: 313620 - RNA, 19 nt, Artificial Sequence
  Description of Artificial Sequence: Synthetic oligonucleotide
  Sense strand starting at position 830 of SEQ ID NO: 4027
augagaagcuuggugauaa

SEQ ID NO: 313621 - RNA, 19 nt, Artificial Sequence
  Description of Artificial Sequence: Synthetic oligonucleotide
  Antisense strand to SEQ ID NO: 313620
uuaucaccaagcuucucau

SEQ ID NO: 313622 - RNA, 19 nt, Artificial Sequence
  Description of Artificial Sequence: Synthetic oligonucleotide
  Sense strand starting at position 1010 of SEQ ID NO: 4027
aagguaaagcucuggauga

SEQ ID NO: 313623 - RNA, 19 nt, Artificial Sequence
  Description of Artificial Sequence: Synthetic oligonucleotide
  Antisense strand to SEQ ID NO: 313622
ucauccagagcuuuaccuu

SEQ ID NO: 313624 - RNA, 19 nt, Artificial Sequence
  Description of Artificial Sequence: Synthetic oligonucleotide
  Sense strand starting at position 1012 of SEQ ID NO: 4027
gguaaagcucuggaugauc

SEQ ID NO: 313625 - RNA, 19 nt, Artificial Sequence
  Description of Artificial Sequence: Synthetic oligonucleotide
  Antisense strand to SEQ ID NO: 313624
gaucauccagagcuuuacc

SEQ ID NO: 313626 - RNA, 19 nt, Artificial Sequence
  Description of Artificial Sequence: Synthetic oligonucleotide
  Sense strand starting at position 1055 of SEQ ID NO: 4027
gugaacagcugaccaauau

SEQ ID NO: 313627 - RNA, 19 nt, Artificial Sequence
  Description of Artificial Sequence: Synthetic oligonucleotide
  Antisense strand to SEQ ID NO: 313626
auauuggucagcuguucac

SEQ ID NO: 313628 - RNA, 19 nt, Artificial Sequence
  Description of Artificial Sequence: Synthetic oligonucleotide
  Sense strand starting at position 1059 of SEQ ID NO: 4027
acagcugaccaauaucgaa

SEQ ID NO: 313629 - RNA, 19 nt, Artificial Sequence
  Description of Artificial Sequence: Synthetic oligonucleotide
  Antisense strand to SEQ ID NO: 313628
uucgauauuggucagcugu

SEQ ID NO: 313630 - RNA, 19 nt, Artificial Sequence
  Description of Artificial Sequence: Synthetic oligonucleotide
  Sense strand starting at position 1066 of SEQ ID NO: 4027
accaauaucgaaugguaaa

SEQ ID NO: 313631 - RNA, 19 nt, Artificial Sequence
  Description of Artificial Sequence: Synthetic oligonucleotide
  Antisense strand to SEQ ID NO: 313630
uuuaccauucgauauuggu

SEQ ID NO: 313632 - RNA, 19 nt, Artificial Sequence
  Description of Artificial Sequence: Synthetic oligonucleotide
  Sense strand starting at position 1096 of SEQ ID NO: 4027
cuggaaauauaucucaguu

SEQ ID NO: 313633 - RNA, 19 nt, Artificial Sequence
  Description of Artificial Sequence: Synthetic oligonucleotide
  Antisense strand to SEQ ID NO: 313632
aacugagauauauuuccag

SEQ ID NO: 313634 - RNA, 19 nt, Artificial Sequence
  Description of Artificial Sequence: Synthetic oligonucleotide
  Sense strand starting at position 1102 of SEQ ID NO: 4027
auauaucucaguugaggga

SEQ ID NO: 313635 - RNA, 19 nt, Artificial Sequence
  Description of Artificial Sequence: Synthetic oligonucleotide
  Antisense strand to SEQ ID NO: 313634
ucccucaacugagauauau

SEQ ID NO: 313636 - RNA, 19 nt, Artificial Sequence
  Description of Artificial Sequence: Synthetic oligonucleotide
  Sense strand starting at position 1210 of SEQ ID NO: 4027
gggccaucugaccaagagu

SEQ ID NO: 313637 - RNA, 19 nt, Artificial Sequence
  Description of Artificial Sequence: Synthetic oligonucleotide
  Antisense strand to SEQ ID NO: 313636
acucuuggucagauggccc

SEQ ID NO: 313638 - RNA, 19 nt, Artificial Sequence
  Description of Artificial Sequence: Synthetic oligonucleotide
  Sense strand starting at position 1308 of SEQ ID NO: 4027
caugcaaaucaguggacua

SEQ ID NO: 313639 - RNA, 19 nt, Artificial Sequence
  Description of Artificial Sequence: Synthetic oligonucleotide
  Antisense strand to SEQ ID NO: 313638
uaguccacugauuugcaug

SEQ ID NO: 313640 - RNA, 19 nt, Artificial Sequence
  Description of Artificial Sequence: Synthetic oligonucleotide
  Sense strand starting at position 1310 of SEQ ID NO: 4027
ugcaaaucaguggacuaau

SEQ ID NO: 313641 - RNA, 19 nt, Artificial Sequence
  Description of Artificial Sequence: Synthetic oligonucleotide
  Antisense strand to SEQ ID NO: 313640
auuaguccacugauuugca

SEQ ID NO: 313642 - RNA, 19 nt, Artificial Sequence
  Description of Artificial Sequence: Synthetic oligonucleotide
  Sense strand starting at position 2119 of SEQ ID NO: 4027
cgugguugcccuucuguaa

SEQ ID NO: 313643 - RNA, 19 nt, Artificial Sequence
  Description of Artificial Sequence: Synthetic oligonucleotide
  Antisense strand to SEQ ID NO: 313642
uuacagaagggcaaccacg

SEQ ID NO: 313644 - RNA, 19 nt, Artificial Sequence
  Description of Artificial Sequence: Synthetic oligonucleotide
  Sense strand starting at position 2573 of SEQ ID NO: 4027
uuucuaagggaugguagua

SEQ ID NO: 313645 - RNA, 19 nt, Artificial Sequence
  Description of Artificial Sequence: Synthetic oligonucleotide
  Antisense strand to SEQ ID NO: 313644
uacuaccaucccuuagaaa

SEQ ID NO: 313646 - RNA, 19 nt, Artificial Sequence
  Description of Artificial Sequence: Synthetic oligonucleotide
  Sense strand starting at position 2715 of SEQ ID NO: 4027
ugaauaaacagauguguag

SEQ ID NO: 313647 - RNA, 19 nt, Artificial Sequence
  Description of Artificial Sequence: Synthetic oligonucleotide
  Antisense strand to SEQ ID NO: 313646
cuacacaucuguuuauuca

SEQ ID NO: 313648 - RNA, 19 nt, Artificial Sequence
  Description of Artificial Sequence: Synthetic oligonucleotide
  Sense strand starting at position 2872 of SEQ ID NO: 4027
ugggaaggcuucuugagaa

SEQ ID NO: 313649 - RNA, 19 nt, Artificial Sequence
  Description of Artificial Sequence: Synthetic oligonucleotide
  Antisense strand to SEQ ID NO: 313648
uucucaagaagccuuccca

SEQ ID NO: 313650 - RNA, 19 nt, Artificial Sequence
  Description of Artificial Sequence: Synthetic oligonucleotide
  Sense strand starting at position 2879 of SEQ ID NO: 4027
gcuucuugagaagggagua

SEQ ID NO: 313651 - RNA, 19 nt, Artificial Sequence
  Description of Artificial Sequence: Synthetic oligonucleotide
  Antisense strand to SEQ ID NO: 313650
uacucccuucucaagaagc

SEQ ID NO: 313652 - RNA, 19 nt, Artificial Sequence
  Description of Artificial Sequence: Synthetic oligonucleotide
  Sense strand starting at position 2893 of SEQ ID NO: 4027
gaguauuugagcugggucu

SEQ ID NO: 313653 - RNA, 19 nt, Artificial Sequence
  Description of Artificial Sequence: Synthetic oligonucleotide
  Antisense strand to SEQ ID NO: 313652
agacccagcucaaauacuc

SEQ ID NO: 313654 - RNA, 19 nt, Artificial Sequence
  Description of Artificial Sequence: Synthetic oligonucleotide
  Sense strand starting at position 2911 of SEQ ID NO: 4027
uugagauauuuccauagga

SEQ ID NO: 313655 - RNA, 19 nt, Artificial Sequence
  Description of Artificial Sequence: Synthetic oligonucleotide
  Antisense strand to SEQ ID NO: 313654
uccuauggaaauaucucaa

SEQ ID NO: 313656 - RNA, 19 nt, Artificial Sequence
  Description of Artificial Sequence: Synthetic oligonucleotide
  Sense strand starting at position 3000 of SEQ ID NO: 4027
acaggaaauugcucaguuu

SEQ ID NO: 313657 - RNA, 19 nt, Artificial Sequence
  Description of Artificial Sequence: Synthetic oligonucleotide
  Antisense strand to SEQ ID NO: 313656
aaacugagcaauuuccugu

SEQ ID NO: 313658 - RNA, 19 nt, Artificial Sequence
  Description of Artificial Sequence: Synthetic oligonucleotide
  Sense strand starting at position 3109 of SEQ ID NO: 4027
aagugaagggaguguuuga

SEQ ID NO: 313659 - RNA, 19 nt, Artificial Sequence
  Description of Artificial Sequence: Synthetic oligonucleotide
  Antisense strand to SEQ ID NO: 313658
ucaaacacucccuucacuu

SEQ ID NO: 313660 - RNA, 19 nt, Artificial Sequence
  Description of Artificial Sequence: Synthetic oligonucleotide
  Sense strand starting at position 3125 of SEQ ID NO: 4027
ugauucuuggcaugaauca

SEQ ID NO: 313661 - RNA, 19 nt, Artificial Sequence
  Description of Artificial Sequence: Synthetic oligonucleotide
  Antisense strand to SEQ ID NO: 313660
ugauucaugccaagaauca

SEQ ID NO: 313662 - RNA, 19 nt, Artificial Sequence
  Description of Artificial Sequence: Synthetic oligonucleotide
  Sense strand starting at position 3141 of SEQ ID NO: 4027
ucaggaucccuuuaccgau

SEQ ID NO: 313663 - RNA, 19 nt, Artificial Sequence
  Description of Artificial Sequence: Synthetic oligonucleotide
  Antisense strand to SEQ ID NO: 313662
aucgguaaagggauccuga

SEQ ID NO: 313664 - RNA, 19 nt, Artificial Sequence
  Description of Artificial Sequence: Synthetic oligonucleotide
  Sense strand starting at position 3148 of SEQ ID NO: 4027
cccuuuaccgauuagugaa

SEQ ID NO: 313665 - RNA, 19 nt, Artificial Sequence
  Description of Artificial Sequence: Synthetic oligonucleotide
  Antisense strand to SEQ ID NO: 313664
uucacuaaucgguaaaggg

SEQ ID NO: 313666 - RNA, 19 nt, Artificial Sequence
  Description of Artificial Sequence: Synthetic oligonucleotide
  Sense strand starting at position 3155 of SEQ ID NO: 4027
ccgauuagugaagggaacu

SEQ ID NO: 313667 - RNA, 19 nt, Artificial Sequence
  Description of Artificial Sequence: Synthetic oligonucleotide
  Antisense strand to SEQ ID NO: 313666
aguucccuucacuaaucgg

SEQ ID NO: 313668 - RNA, 19 nt, Artificial Sequence
  Description of Artificial Sequence: Synthetic oligonucleotide
  Sense strand starting at position 3156 of SEQ ID NO: 4027
cgauuagugaagggaacua

SEQ ID NO: 313669 - RNA, 19 nt, Artificial Sequence
  Description of Artificial Sequence: Synthetic oligonucleotide
  Antisense strand to SEQ ID NO: 313668
uaguucccuucacuaaucg

SEQ ID NO: 313670 - RNA, 19 nt, Artificial Sequence
  Description of Artificial Sequence: Synthetic oligonucleotide
  Sense strand starting at position 3198 of SEQ ID NO: 4027
gggaaauucuacuuuccca

SEQ ID NO: 313671 - RNA, 19 nt, Artificial Sequence
  Description of Artificial Sequence: Synthetic oligonucleotide
  Antisense strand to SEQ ID NO: 313670
ugggaaaguagaauuuccc

SEQ ID NO: 313672 - RNA, 19 nt, Artificial Sequence
  Description of Artificial Sequence: Synthetic oligonucleotide
  Sense strand starting at position 3233 of SEQ ID NO: 4027
ggccaucaccuauggaaca

SEQ ID NO: 313673 - RNA, 19 nt, Artificial Sequence
  Description of Artificial Sequence: Synthetic oligonucleotide
  Antisense strand to SEQ ID NO: 313672
uguuccauaggugauggcc

SEQ ID NO: 313674 - RNA, 19 nt, Artificial Sequence
  Description of Artificial Sequence: Synthetic oligonucleotide
  Sense strand starting at position 3314 of SEQ ID NO: 4027
ccucuuuagcaggaagcau

SEQ ID NO: 313675 - RNA, 19 nt, Artificial Sequence
  Description of Artificial Sequence: Synthetic oligonucleotide
  Antisense strand to SEQ ID NO: 313674
augcuuccugcuaaagagg

SEQ ID NO: 313676 - RNA, 19 nt, Artificial Sequence
  Description of Artificial Sequence: Synthetic oligonucleotide
  Sense strand starting at position 3464 of SEQ ID NO: 4027
ggcaucagacacuagcauu

SEQ ID NO: 313677 - RNA, 19 nt, Artificial Sequence
  Description of Artificial Sequence: Synthetic oligonucleotide
  Antisense strand to SEQ ID NO: 313676
aaugcuagugucugaugcc

SEQ ID NO: 313678 - RNA, 19 nt, Artificial Sequence
  Description of Artificial Sequence: Synthetic oligonucleotide
  Sense strand starting at position 3634 of SEQ ID NO: 4027
ucuuuaaucugaguugauu

SEQ ID NO: 313679 - RNA, 19 nt, Artificial Sequence
  Description of Artificial Sequence: Synthetic oligonucleotide
  Antisense strand to SEQ ID NO: 313678
aaucaacucagauuaaaga

SEQ ID NO: 313680 - RNA, 19 nt, Artificial Sequence
  Description of Artificial Sequence: Synthetic oligonucleotide
  Sense strand starting at position 3655 of SEQ ID NO: 4027
gccugauagaaugacuugu

SEQ ID NO: 313681 - RNA, 19 nt, Artificial Sequence
  Description of Artificial Sequence: Synthetic oligonucleotide
  Antisense strand to SEQ ID NO: 313680
acaagucauucuaucaggc

SEQ ID NO: 313682 - RNA, 19 nt, Artificial Sequence
  Description of Artificial Sequence: Synthetic oligonucleotide
  Sense strand starting at position 3678 of SEQ ID NO: 4027
gcuaguagaaugcagaagu

SEQ ID NO: 313683 - RNA, 19 nt, Artificial Sequence
  Description of Artificial Sequence: Synthetic oligonucleotide
  Antisense strand to SEQ ID NO: 313682
acuucugcauucuacuagc

SEQ ID NO: 313684 - RNA, 19 nt, Artificial Sequence
  Description of Artificial Sequence: Synthetic oligonucleotide
  Sense strand starting at position 3736 of SEQ ID NO: 4027
augugucugcugucucuua

SEQ ID NO: 313685 - RNA, 19 nt, Artificial Sequence
  Description of Artificial Sequence: Synthetic oligonucleotide
  Antisense strand to SEQ ID NO: 313684
uaagagacagcagacacau

SEQ ID NO: 313686 - RNA, 19 nt, Artificial Sequence
  Description of Artificial Sequence: Synthetic oligonucleotide
  Sense strand starting at position 3738 of SEQ ID NO: 4027
gugucugcugucucuuaua

SEQ ID NO: 313687 - RNA, 19 nt, Artificial Sequence
  Description of Artificial Sequence: Synthetic oligonucleotide
  Antisense strand to SEQ ID NO: 313686
uauaagagacagcagacac

SEQ ID NO: 313688 - RNA, 19 nt, Artificial Sequence
  Description of Artificial Sequence: Synthetic oligonucleotide
  Sense strand starting at position 3 of SEQ ID NO: 4029
cugagaugugaucacuggu

SEQ ID NO: 313689 - RNA, 19 nt, Artificial Sequence
  Description of Artificial Sequence: Synthetic oligonucleotide
  Antisense strand to SEQ ID NO: 313688
accagugaucacaucucag

SEQ ID NO: 313690 - RNA, 19 nt, Artificial Sequence
  Description of Artificial Sequence: Synthetic oligonucleotide
  Sense strand starting at position 6 of SEQ ID NO: 4029
agaugugaucacuggucaa

SEQ ID NO: 313691 - RNA, 19 nt, Artificial Sequence
  Description of Artificial Sequence: Synthetic oligonucleotide
  Antisense strand to SEQ ID NO: 313690
uugaccagugaucacaucu

SEQ ID NO: 313692 - RNA, 19 nt, Artificial Sequence
  Description of Artificial Sequence: Synthetic oligonucleotide
  Sense strand starting at position 126 of SEQ ID NO: 4029
ggacucuuauuugcugcaa

SEQ ID NO: 313693 - RNA, 19 nt, Artificial Sequence
  Description of Artificial Sequence: Synthetic oligonucleotide
  Antisense strand to SEQ ID NO: 313692
uugcagcaaauaagagucc

SEQ ID NO: 313694 - RNA, 19 nt, Artificial Sequence
  Description of Artificial Sequence: Synthetic oligonucleotide
  Sense strand starting at position 197 of SEQ ID NO: 4029
gcaucuugcucauuugagu

SEQ ID NO: 313695 - RNA, 19 nt, Artificial Sequence
  Description of Artificial Sequence: Synthetic oligonucleotide
  Antisense strand to SEQ ID NO: 313694
acucaaaugagcaagaugc

SEQ ID NO: 313696 - RNA, 19 nt, Artificial Sequence
  Description of Artificial Sequence: Synthetic oligonucleotide
  Sense strand starting at position 217 of SEQ ID NO: 4029
cugacaguaccuuggauua

SEQ ID NO: 313697 - RNA, 19 nt, Artificial Sequence
  Description of Artificial Sequence: Synthetic oligonucleotide
  Antisense strand to SEQ ID NO: 313696
uaauccaagguacugucag

SEQ ID NO: 313698 - RNA, 19 nt, Artificial Sequence
  Description of Artificial Sequence: Synthetic oligonucleotide
  Sense strand starting at position 235 of SEQ ID NO: 4029
agcgacucucaagauuauu

SEQ ID NO: 313699 - RNA, 19 nt, Artificial Sequence
  Description of Artificial Sequence: Synthetic oligonucleotide
  Antisense strand to SEQ ID NO: 313698
aauaaucuugagagucgcu

SEQ ID NO: 313700 - RNA, 19 nt, Artificial Sequence
  Description of Artificial Sequence: Synthetic oligonucleotide
  Sense strand starting at position 524 of SEQ ID NO: 4029
uuuaaaugcuagucaugac

SEQ ID NO: 313701 - RNA, 19 nt, Artificial Sequence
  Description of Artificial Sequence: Synthetic oligonucleotide
  Antisense strand to SEQ ID NO: 313700
gucaugacuagcauuuaaa

SEQ ID NO: 313702 - RNA, 19 nt, Artificial Sequence
  Description of Artificial Sequence: Synthetic oligonucleotide
  Sense strand starting at position 531 of SEQ ID NO: 4029
gcuagucaugacuaaauua

SEQ ID NO: 313703 - RNA, 19 nt, Artificial Sequence
  Description of Artificial Sequence: Synthetic oligonucleotide
  Antisense strand to SEQ ID NO: 313702
uaauuuagucaugacuagc

SEQ ID NO: 313704 - RNA, 19 nt, Artificial Sequence
  Description of Artificial Sequence: Synthetic oligonucleotide
  Sense strand starting at position 602 of SEQ ID NO: 4029
uccaauuauuaugcagagu

SEQ ID NO: 313705 - RNA, 19 nt, Artificial Sequence
  Description of Artificial Sequence: Synthetic oligonucleotide
  Antisense strand to SEQ ID NO: 313704
acucugcauaauaauugga

SEQ ID NO: 313706 - RNA, 19 nt, Artificial Sequence
  Description of Artificial Sequence: Synthetic oligonucleotide
  Sense strand starting at position 737 of SEQ ID NO: 4029
aggcuuuagguucaaacga

SEQ ID NO: 313707 - RNA, 19 nt, Artificial Sequence
  Description of Artificial Sequence: Synthetic oligonucleotide
  Antisense strand to SEQ ID NO: 313706
ucguuugaaccuaaagccu

SEQ ID NO: 313708 - RNA, 19 nt, Artificial Sequence
  Description of Artificial Sequence: Synthetic oligonucleotide
  Sense strand starting at position 764 of SEQ ID NO: 4029
aggucuuccacguauuaag

SEQ ID NO: 313709 - RNA, 19 nt, Artificial Sequence
  Description of Artificial Sequence: Synthetic oligonucleotide
  Antisense strand to SEQ ID NO: 313708
cuuaauacguggaagaccu

SEQ ID NO: 313710 - RNA, 19 nt, Artificial Sequence
  Description of Artificial Sequence: Synthetic oligonucleotide
  Sense strand starting at position 863 of SEQ ID NO: 4029
cccaaauuguuagcagauu

SEQ ID NO: 313711 - RNA, 19 nt, Artificial Sequence
  Description of Artificial Sequence: Synthetic oligonucleotide
  Antisense strand to SEQ ID NO: 313710
aaucugcuaacaauuuggg

SEQ ID NO: 313712 - RNA, 19 nt, Artificial Sequence
  Description of Artificial Sequence: Synthetic oligonucleotide
  Sense strand starting at position 875 of SEQ ID NO: 4029
gcagauucucucgaggaug

SEQ ID NO: 313713 - RNA, 19 nt, Artificial Sequence
  Description of Artificial Sequence: Synthetic oligonucleotide
  Antisense strand to SEQ ID NO: 313712
cauccucgagagaaucugc

SEQ ID NO: 313714 - RNA, 19 nt, Artificial Sequence
  Description of Artificial Sequence: Synthetic oligonucleotide
  Sense strand starting at position 886 of SEQ ID NO: 4029
cgaggaugagaucgcuaca

SEQ ID NO: 313715 - RNA, 19 nt, Artificial Sequence
  Description of Artificial Sequence: Synthetic oligonucleotide
  Antisense strand to SEQ ID NO: 313714
uguagcgaucucauccucg

SEQ ID NO: 313716 - RNA, 19 nt, Artificial Sequence
  Description of Artificial Sequence: Synthetic oligonucleotide
  Sense strand starting at position 1012 of SEQ ID NO: 4029
gagaaccaguaucuuguua

SEQ ID NO: 313717 - RNA, 19 nt, Artificial Sequence
  Description of Artificial Sequence: Synthetic oligonucleotide
  Antisense strand to SEQ ID NO: 313716
uaacaagauacugguucuc

SEQ ID NO: 313718 - RNA, 19 nt, Artificial Sequence
  Description of Artificial Sequence: Synthetic oligonucleotide
  Sense strand starting at position 1043 of SEQ ID NO: 4029
acgagcuaccaagaaucau

SEQ ID NO: 313719 - RNA, 19 nt, Artificial Sequence
  Description of Artificial Sequence: Synthetic oligonucleotide
  Antisense strand to SEQ ID NO: 313718
augauucuugguagcucgu

SEQ ID NO: 313720 - RNA, 19 nt, Artificial Sequence
  Description of Artificial Sequence: Synthetic oligonucleotide
  Sense strand starting at position 1055 of SEQ ID NO: 4029
gaaucaucgcgugagauaa

SEQ ID NO: 313721 - RNA, 19 nt, Artificial Sequence
  Description of Artificial Sequence: Synthetic oligonucleotide
  Antisense strand to SEQ ID NO: 313720
uuaucucacgcgaugauuc

SEQ ID NO: 313722 - RNA, 19 nt, Artificial Sequence
  Description of Artificial Sequence: Synthetic oligonucleotide
  Sense strand starting at position 1093 of SEQ ID NO: 4029
ccuucuuaggagcaaguaa

SEQ ID NO: 313723 - RNA, 19 nt, Artificial Sequence
  Description of Artificial Sequence: Synthetic oligonucleotide
  Antisense strand to SEQ ID NO: 313722
uuacuugcuccuaagaagg

SEQ ID NO: 313724 - RNA, 19 nt, Artificial Sequence
  Description of Artificial Sequence: Synthetic oligonucleotide
  Sense strand starting at position 2310 of SEQ ID NO: 4029
gagcuagucguuuccguuu

SEQ ID NO: 313725 - RNA, 19 nt, Artificial Sequence
  Description of Artificial Sequence: Synthetic oligonucleotide
  Antisense strand to SEQ ID NO: 313724
aaacggaaacgacuagcuc

SEQ ID NO: 313726 - RNA, 19 nt, Artificial Sequence
  Description of Artificial Sequence: Synthetic oligonucleotide
  Sense strand starting at position 2496 of SEQ ID NO: 4029
gcuuaaggaaguuagguau

SEQ ID NO: 313727 - RNA, 19 nt, Artificial Sequence
  Description of Artificial Sequence: Synthetic oligonucleotide
  Antisense strand to SEQ ID NO: 313726
auaccuaacuuccuuaagc

SEQ ID NO: 313728 - RNA, 19 nt, Artificial Sequence
  Description of Artificial Sequence: Synthetic oligonucleotide
  Sense strand starting at position 2559 of SEQ ID NO: 4029
acaacauuaggucaugcaa

SEQ ID NO: 313729 - RNA, 19 nt, Artificial Sequence
  Description of Artificial Sequence: Synthetic oligonucleotide
  Antisense strand to SEQ ID NO: 313728
uugcaugaccuaauguugu

SEQ ID NO: 313730 - RNA, 19 nt, Artificial Sequence
  Description of Artificial Sequence: Synthetic oligonucleotide
  Sense strand starting at position 2624 of SEQ ID NO: 4029
acaguuuaaguguaacgga

SEQ ID NO: 313731 - RNA, 19 nt, Artificial Sequence
  Description of Artificial Sequence: Synthetic oligonucleotide
  Antisense strand to SEQ ID NO: 313730
uccguuacacuuaaacugu

SEQ ID NO: 313732 - RNA, 19 nt, Artificial Sequence
  Description of Artificial Sequence: Synthetic oligonucleotide
  Sense strand starting at position 2629 of SEQ ID NO: 4029
uuaaguguaacggagauca

SEQ ID NO: 313733 - RNA, 19 nt, Artificial Sequence
  Description of Artificial Sequence: Synthetic oligonucleotide
  Antisense strand to SEQ ID NO: 313732
ugaucuccguuacacuuaa

SEQ ID NO: 313734 - RNA, 19 nt, Artificial Sequence
  Description of Artificial Sequence: Synthetic oligonucleotide
  Sense strand starting at position 2676 of SEQ ID NO: 4029
augaaauuauaaucugcga

SEQ ID NO: 313735 - RNA, 19 nt, Artificial Sequence
  Description of Artificial Sequence: Synthetic oligonucleotide
  Antisense strand to SEQ ID NO: 313734
ucgcagauuauaauuucau

SEQ ID NO: 313736 - RNA, 19 nt, Artificial Sequence
  Description of Artificial Sequence: Synthetic oligonucleotide
  Sense strand starting at position 2809 of SEQ ID NO: 4029
guagcuguaauugucguua

SEQ ID NO: 313737 - RNA, 19 nt, Artificial Sequence
  Description of Artificial Sequence: Synthetic oligonucleotide
  Antisense strand to SEQ ID NO: 313736
uaacgacaauuacagcuac

SEQ ID NO: 313738 - RNA, 19 nt, Artificial Sequence
  Description of Artificial Sequence: Synthetic oligonucleotide
  Sense strand starting at position 2919 of SEQ ID NO: 4029
cuguauuucucagcuccuu

SEQ ID NO: 313739 - RNA, 19 nt, Artificial Sequence
  Description of Artificial Sequence: Synthetic oligonucleotide
  Antisense strand to SEQ ID NO: 313738
aaggagcugagaaauacag

SEQ ID NO: 313740 - RNA, 19 nt, Artificial Sequence
  Description of Artificial Sequence: Synthetic oligonucleotide
  Sense strand starting at position 2977 of SEQ ID NO: 4029
uccugcaacuguucgauuu

SEQ ID NO: 313741 - RNA, 19 nt, Artificial Sequence
  Description of Artificial Sequence: Synthetic oligonucleotide
  Antisense strand to SEQ ID NO: 313740
aaaucgaacaguugcagga

SEQ ID NO: 313742 - RNA, 19 nt, Artificial Sequence
  Description of Artificial Sequence: Synthetic oligonucleotide
  Sense strand starting at position 2978 of SEQ ID NO: 4029
ccugcaacuguucgauuua

SEQ ID NO: 313743 - RNA, 19 nt, Artificial Sequence
  Description of Artificial Sequence: Synthetic oligonucleotide
  Antisense strand to SEQ ID NO: 313742
uaaaucgaacaguugcagg

SEQ ID NO: 313744 - RNA, 19 nt, Artificial Sequence
  Description of Artificial Sequence: Synthetic oligonucleotide
  Sense strand starting at position 3085 of SEQ ID NO: 4029
uccacuauacauugaucga

SEQ ID NO: 313745 - RNA, 19 nt, Artificial Sequence
  Description of Artificial Sequence: Synthetic oligonucleotide
  Antisense strand to SEQ ID NO: 313744
ucgaucaauguauagugga

SEQ ID NO: 313746 - RNA, 19 nt, Artificial Sequence
  Description of Artificial Sequence: Synthetic oligonucleotide
  Sense strand starting at position 3089 of SEQ ID NO: 4029
cuauacauugaucgaagca

SEQ ID NO: 313747 - RNA, 19 nt, Artificial Sequence
  Description of Artificial Sequence: Synthetic oligonucleotide
  Antisense strand to SEQ ID NO: 313746
ugcuucgaucaauguauag

SEQ ID NO: 313748 - RNA, 19 nt, Artificial Sequence
  Description of Artificial Sequence: Synthetic oligonucleotide
  Sense strand starting at position 3099 of SEQ ID NO: 4029
aucgaagcaccaugacauu

SEQ ID NO: 313749 - RNA, 19 nt, Artificial Sequence
  Description of Artificial Sequence: Synthetic oligonucleotide
  Antisense strand to SEQ ID NO: 313748
aaugucauggugcuucgau

SEQ ID NO: 313750 - RNA, 19 nt, Artificial Sequence
  Description of Artificial Sequence: Synthetic oligonucleotide
  Sense strand starting at position 3165 of SEQ ID NO: 4029
cugugaaaucaagaugcau

SEQ ID NO: 313751 - RNA, 19 nt, Artificial Sequence
  Description of Artificial Sequence: Synthetic oligonucleotide
  Antisense strand to SEQ ID NO: 313750
augcaucuugauuucacag

SEQ ID NO: 313752 - RNA, 19 nt, Artificial Sequence
  Description of Artificial Sequence: Synthetic oligonucleotide
  Sense strand starting at position 3284 of SEQ ID NO: 4029
cugagauaagugcauuguu

SEQ ID NO: 313753 - RNA, 19 nt, Artificial Sequence
  Description of Artificial Sequence: Synthetic oligonucleotide
  Antisense strand to SEQ ID NO: 313752
aacaaugcacuuaucucag

SEQ ID NO: 313754 - RNA, 19 nt, Artificial Sequence
  Description of Artificial Sequence: Synthetic oligonucleotide
  Sense strand starting at position 3494 of SEQ ID NO: 4029
cugaguuacuuaccaagua

SEQ ID NO: 313755 - RNA, 19 nt, Artificial Sequence
  Description of Artificial Sequence: Synthetic oligonucleotide
  Antisense strand to SEQ ID NO: 313754
uacuugguaaguaacucag

SEQ ID NO: 313756 - RNA, 19 nt, Artificial Sequence
  Description of Artificial Sequence: Synthetic oligonucleotide
  Sense strand starting at position 3595 of SEQ ID NO: 4029
cuucgauauuauucuugau

SEQ ID NO: 313757 - RNA, 19 nt, Artificial Sequence
  Description of Artificial Sequence: Synthetic oligonucleotide
  Antisense strand to SEQ ID NO: 313756
aucaagaauaauaucgaag

SEQ ID NO: 313758 - RNA, 19 nt, Artificial Sequence
  Description of Artificial Sequence: Synthetic oligonucleotide
  Sense strand starting at position 3597 of SEQ ID NO: 4029
ucgauauuauucuugauag

SEQ ID NO: 313759 - RNA, 19 nt, Artificial Sequence
  Description of Artificial Sequence: Synthetic oligonucleotide
  Antisense strand to SEQ ID NO: 313758
cuaucaagaauaauaucga

SEQ ID NO: 313760 - RNA, 19 nt, Artificial Sequence
  Description of Artificial Sequence: Synthetic oligonucleotide
  Sense strand starting at position 3607 of SEQ ID NO: 4029
ucuugauagccugauuagu

SEQ ID NO: 313761 - RNA, 19 nt, Artificial Sequence
  Description of Artificial Sequence: Synthetic oligonucleotide
  Antisense strand to SEQ ID NO: 313760
acuaaucaggcuaucaaga

SEQ ID NO: 313762 - RNA, 19 nt, Artificial Sequence
  Description of Artificial Sequence: Synthetic oligonucleotide
  Sense strand starting at position 3616 of SEQ ID NO: 4029
ccugauuagucaguuacaa

SEQ ID NO: 313763 - RNA, 19 nt, Artificial Sequence
  Description of Artificial Sequence: Synthetic oligonucleotide
  Antisense strand to SEQ ID NO: 313762
uuguaacugacuaaucagg

SEQ ID NO: 313764 - RNA, 19 nt, Artificial Sequence
  Description of Artificial Sequence: Synthetic oligonucleotide
  Sense strand starting at position 3757 of SEQ ID NO: 4029
agaauaagaucagcugcuu

SEQ ID NO: 313765 - RNA, 19 nt, Artificial Sequence
  Description of Artificial Sequence: Synthetic oligonucleotide
  Antisense strand to SEQ ID NO: 313764
aagcagcugaucuuauucu

SEQ ID NO: 313766 - RNA, 19 nt, Artificial Sequence
  Description of Artificial Sequence: Synthetic oligonucleotide
  Sense strand starting at position 3763 of SEQ ID NO: 4029
agaucagcugcuuggaaga

SEQ ID NO: 313767 - RNA, 19 nt, Artificial Sequence
  Description of Artificial Sequence: Synthetic oligonucleotide
  Antisense strand to SEQ ID NO: 313766
ucuuccaagcagcugaucu

SEQ ID NO: 313768 - RNA, 19 nt, Artificial Sequence
  Description of Artificial Sequence: Synthetic oligonucleotide
  Sense strand starting at position 151 of SEQ ID NO: 4028
ggugacaagcauuauccua

SEQ ID NO: 313769 - RNA, 19 nt, Artificial Sequence
  Description of Artificial Sequence: Synthetic oligonucleotide
  Antisense strand to SEQ ID NO: 313768
uaggauaaugcuugucacc

SEQ ID NO: 313770 - RNA, 19 nt, Artificial Sequence
  Description of Artificial Sequence: Synthetic oligonucleotide
  Sense strand starting at position 153 of SEQ ID NO: 4028
ugacaagcauuauccuaga

SEQ ID NO: 313771 - RNA, 19 nt, Artificial Sequence
  Description of Artificial Sequence: Synthetic oligonucleotide
  Antisense strand to SEQ ID NO: 313770
ucuaggauaaugcuuguca

SEQ ID NO: 313772 - RNA, 19 nt, Artificial Sequence
  Description of Artificial Sequence: Synthetic oligonucleotide
  Sense strand starting at position 291 of SEQ ID NO: 4028
gguagcugccaugauuaau

SEQ ID NO: 313773 - RNA, 19 nt, Artificial Sequence
  Description of Artificial Sequence: Synthetic oligonucleotide
  Antisense strand to SEQ ID NO: 313772
auuaaucauggcagcuacc

SEQ ID NO: 313774 - RNA, 19 nt, Artificial Sequence
  Description of Artificial Sequence: Synthetic oligonucleotide
  Sense strand starting at position 386 of SEQ ID NO: 4028
guaacugagaugugaucac

SEQ ID NO: 313775 - RNA, 19 nt, Artificial Sequence
  Description of Artificial Sequence: Synthetic oligonucleotide
  Antisense strand to SEQ ID NO: 313774
gugaucacaucucaguuac

SEQ ID NO: 313776 - RNA, 19 nt, Artificial Sequence
  Description of Artificial Sequence: Synthetic oligonucleotide
  Sense strand starting at position 390 of SEQ ID NO: 4028
cugagaugugaucacuggu

SEQ ID NO: 313777 - RNA, 19 nt, Artificial Sequence
  Description of Artificial Sequence: Synthetic oligonucleotide
  Antisense strand to SEQ ID NO: 313776
accagugaucacaucucag

SEQ ID NO: 313778 - RNA, 19 nt, Artificial Sequence
  Description of Artificial Sequence: Synthetic oligonucleotide
  Sense strand starting at position 393 of SEQ ID NO: 4028
agaugugaucacuggucaa

SEQ ID NO: 313779 - RNA, 19 nt, Artificial Sequence
  Description of Artificial Sequence: Synthetic oligonucleotide
  Antisense strand to SEQ ID NO: 313778
uugaccagugaucacaucu

SEQ ID NO: 313780 - RNA, 19 nt, Artificial Sequence
  Description of Artificial Sequence: Synthetic oligonucleotide
  Sense strand starting at position 513 of SEQ ID NO: 4028
ggacucuuauuugcugcaa

SEQ ID NO: 313781 - RNA, 19 nt, Artificial Sequence
  Description of Artificial Sequence: Synthetic oligonucleotide
  Antisense strand to SEQ ID NO: 313780
uugcagcaaauaagagucc

SEQ ID NO: 313782 - RNA, 19 nt, Artificial Sequence
  Description of Artificial Sequence: Synthetic oligonucleotide
  Sense strand starting at position 584 of SEQ ID NO: 4028
gcaucuugcucauuugagu

SEQ ID NO: 313783 - RNA, 19 nt, Artificial Sequence
  Description of Artificial Sequence: Synthetic oligonucleotide
  Antisense strand to SEQ ID NO: 313782
acucaaaugagcaagaugc

SEQ ID NO: 313784 - RNA, 19 nt, Artificial Sequence
  Description of Artificial Sequence: Synthetic oligonucleotide
  Sense strand starting at position 604 of SEQ ID NO: 4028
cugacaguaccuuggauua

SEQ ID NO: 313785 - RNA, 19 nt, Artificial Sequence
  Description of Artificial Sequence: Synthetic oligonucleotide
  Antisense strand to SEQ ID NO: 313784
uaauccaagguacugucag

SEQ ID NO: 313786 - RNA, 19 nt, Artificial Sequence
  Description of Artificial Sequence: Synthetic oligonucleotide
  Sense strand starting at position 622 of SEQ ID NO: 4028
agcgacucucaagauuauu

SEQ ID NO: 313787 - RNA, 19 nt, Artificial Sequence
  Description of Artificial Sequence: Synthetic oligonucleotide
  Antisense strand to SEQ ID NO: 313786
aauaaucuugagagucgcu

SEQ ID NO: 313788 - RNA, 19 nt, Artificial Sequence
  Description of Artificial Sequence: Synthetic oligonucleotide
  Sense strand starting at position 911 of SEQ ID NO: 4028
uuuaaaugcuagucaugac

SEQ ID NO: 313789 - RNA, 19 nt, Artificial Sequence
  Description of Artificial Sequence: Synthetic oligonucleotide
  Antisense strand to SEQ ID NO: 313788
gucaugacuagcauuuaaa

SEQ ID NO: 313790 - RNA, 19 nt, Artificial Sequence
  Description of Artificial Sequence: Synthetic oligonucleotide
  Sense strand starting at position 918 of SEQ ID NO: 4028
gcuagucaugacuaaauua

SEQ ID NO: 313791 - RNA, 19 nt, Artificial Sequence
  Description of Artificial Sequence: Synthetic oligonucleotide
  Antisense strand to SEQ ID NO: 313790
uaauuuagucaugacuagc

SEQ ID NO: 313792 - RNA, 19 nt, Artificial Sequence
  Description of Artificial Sequence: Synthetic oligonucleotide
  Sense strand starting at position 989 of SEQ ID NO: 4028
uccaauuauuaugcagagu

SEQ ID NO: 313793 - RNA, 19 nt, Artificial Sequence
  Description of Artificial Sequence: Synthetic oligonucleotide
  Antisense strand to SEQ ID NO: 313792
acucugcauaauaauugga

SEQ ID NO: 313794 - RNA, 19 nt, Artificial Sequence
  Description of Artificial Sequence: Synthetic oligonucleotide
  Sense strand starting at position 1124 of SEQ ID NO: 4028
aggcuuuagguucaaacga

SEQ ID NO: 313795 - RNA, 19 nt, Artificial Sequence
  Description of Artificial Sequence: Synthetic oligonucleotide
  Antisense strand to SEQ ID NO: 313794
ucguuugaaccuaaagccu

SEQ ID NO: 313796 - RNA, 19 nt, Artificial Sequence
  Description of Artificial Sequence: Synthetic oligonucleotide
  Sense strand starting at position 1151 of SEQ ID NO: 4028
aggucuuccacguauuaag

SEQ ID NO: 313797 - RNA, 19 nt, Artificial Sequence
  Description of Artificial Sequence: Synthetic oligonucleotide
  Antisense strand to SEQ ID NO: 313796
cuuaauacguggaagaccu

SEQ ID NO: 313798 - RNA, 19 nt, Artificial Sequence
  Description of Artificial Sequence: Synthetic oligonucleotide
  Sense strand starting at position 1250 of SEQ ID NO: 4028
cccaaauuguuagcagauu

SEQ ID NO: 313799 - RNA, 19 nt, Artificial Sequence
  Description of Artificial Sequence: Synthetic oligonucleotide
  Antisense strand to SEQ ID NO: 313798
aaucugcuaacaauuuggg

SEQ ID NO: 313800 - RNA, 19 nt, Artificial Sequence
  Description of Artificial Sequence: Synthetic oligonucleotide
  Sense strand starting at position 1262 of SEQ ID NO: 4028
gcagauucucucgaggaug

SEQ ID NO: 313801 - RNA, 19 nt, Artificial Sequence
  Description of Artificial Sequence: Synthetic oligonucleotide
  Antisense strand to SEQ ID NO: 313800
cauccucgagagaaucugc

SEQ ID NO: 313802 - RNA, 19 nt, Artificial Sequence
  Description of Artificial Sequence: Synthetic oligonucleotide
  Sense strand starting at position 1273 of SEQ ID NO: 4028
cgaggaugagaucgcuaca

SEQ ID NO: 313803 - RNA, 19 nt, Artificial Sequence
  Description of Artificial Sequence: Synthetic oligonucleotide
  Antisense strand to SEQ ID NO: 313802
uguagcgaucucauccucg

SEQ ID NO: 313804 - RNA, 19 nt, Artificial Sequence
  Description of Artificial Sequence: Synthetic oligonucleotide
  Sense strand starting at position 1399 of SEQ ID NO: 4028
gagaaccaguaucuuguua

SEQ ID NO: 313805 - RNA, 19 nt, Artificial Sequence
  Description of Artificial Sequence: Synthetic oligonucleotide
  Antisense strand to SEQ ID NO: 313804
uaacaagauacugguucuc

SEQ ID NO: 313806 - RNA, 19 nt, Artificial Sequence
  Description of Artificial Sequence: Synthetic oligonucleotide
  Sense strand starting at position 1430 of SEQ ID NO: 4028
acgagcuaccaagaaucau

SEQ ID NO: 313807 - RNA, 19 nt, Artificial Sequence
  Description of Artificial Sequence: Synthetic oligonucleotide
  Antisense strand to SEQ ID NO: 313806
augauucuugguagcucgu

SEQ ID NO: 313808 - RNA, 19 nt, Artificial Sequence
  Description of Artificial Sequence: Synthetic oligonucleotide
  Sense strand starting at position 1442 of SEQ ID NO: 4028
gaaucaucgcgugagauaa

SEQ ID NO: 313809 - RNA, 19 nt, Artificial Sequence
  Description of Artificial Sequence: Synthetic oligonucleotide
  Antisense strand to SEQ ID NO: 313808
uuaucucacgcgaugauuc

SEQ ID NO: 313810 - RNA, 19 nt, Artificial Sequence
  Description of Artificial Sequence: Synthetic oligonucleotide
  Sense strand starting at position 1480 of SEQ ID NO: 4028
ccuucuuaggagcaaguaa

SEQ ID NO: 313811 - RNA, 19 nt, Artificial Sequence
  Description of Artificial Sequence: Synthetic oligonucleotide
  Antisense strand to SEQ ID NO: 313810
uuacuugcuccuaagaagg

SEQ ID NO: 313812 - RNA, 19 nt, Artificial Sequence
  Description of Artificial Sequence: Synthetic oligonucleotide
  Sense strand starting at position 2697 of SEQ ID NO: 4028
gagcuagucguuuccguuu

SEQ ID NO: 313813 - RNA, 19 nt, Artificial Sequence
  Description of Artificial Sequence: Synthetic oligonucleotide
  Antisense strand to SEQ ID NO: 313812
aaacggaaacgacuagcuc

SEQ ID NO: 313814 - RNA, 19 nt, Artificial Sequence
  Description of Artificial Sequence: Synthetic oligonucleotide
  Sense strand starting at position 2883 of SEQ ID NO: 4028
gcuuaaggaaguuagguau

SEQ ID NO: 313815 - RNA, 19 nt, Artificial Sequence
  Description of Artificial Sequence: Synthetic oligonucleotide
  Antisense strand to SEQ ID NO: 313814
auaccuaacuuccuuaagc

SEQ ID NO: 313816 - RNA, 19 nt, Artificial Sequence
  Description of Artificial Sequence: Synthetic oligonucleotide
  Sense strand starting at position 2946 of SEQ ID NO: 4028
acaacauuaggucaugcaa

SEQ ID NO: 313817 - RNA, 19 nt, Artificial Sequence
  Description of Artificial Sequence: Synthetic oligonucleotide
  Antisense strand to SEQ ID NO: 313816
uugcaugaccuaauguugu

SEQ ID NO: 313818 - RNA, 19 nt, Artificial Sequence
  Description of Artificial Sequence: Synthetic oligonucleotide
  Sense strand starting at position 3011 of SEQ ID NO: 4028
acaguuuaaguguaacgga

SEQ ID NO: 313819 - RNA, 19 nt, Artificial Sequence
  Description of Artificial Sequence: Synthetic oligonucleotide
  Antisense strand to SEQ ID NO: 313818
uccguuacacuuaaacugu

SEQ ID NO: 313820 - RNA, 19 nt, Artificial Sequence
  Description of Artificial Sequence: Synthetic oligonucleotide
  Sense strand starting at position 3016 of SEQ ID NO: 4028
uuaaguguaacggagauca

SEQ ID NO: 313821 - RNA, 19 nt, Artificial Sequence
  Description of Artificial Sequence: Synthetic oligonucleotide
  Antisense strand to SEQ ID NO: 313820
ugaucuccguuacacuuaa

SEQ ID NO: 313822 - RNA, 19 nt, Artificial Sequence
  Description of Artificial Sequence: Synthetic oligonucleotide
  Sense strand starting at position 3063 of SEQ ID NO: 4028
augaaauuauaaucugcga

SEQ ID NO: 313823 - RNA, 19 nt, Artificial Sequence
  Description of Artificial Sequence: Synthetic oligonucleotide
  Antisense strand to SEQ ID NO: 313822
ucgcagauuauaauuucau

SEQ ID NO: 313824 - RNA, 19 nt, Artificial Sequence
  Description of Artificial Sequence: Synthetic oligonucleotide
  Sense strand starting at position 3196 of SEQ ID NO: 4028
guagcuguaauugucguua

SEQ ID NO: 313825 - RNA, 19 nt, Artificial Sequence
  Description of Artificial Sequence: Synthetic oligonucleotide
  Antisense strand to SEQ ID NO: 313824
uaacgacaauuacagcuac

SEQ ID NO: 313826 - RNA, 19 nt, Artificial Sequence
  Description of Artificial Sequence: Synthetic oligonucleotide
  Sense strand starting at position 3306 of SEQ ID NO: 4028
cuguauuucucagcuccuu

SEQ ID NO: 313827 - RNA, 19 nt, Artificial Sequence
  Description of Artificial Sequence: Synthetic oligonucleotide
  Antisense strand to SEQ ID NO: 313826
aaggagcugagaaauacag

SEQ ID NO: 313828 - RNA, 19 nt, Artificial Sequence
  Description of Artificial Sequence: Synthetic oligonucleotide
  Sense strand starting at position 3364 of SEQ ID NO: 4028
uccugcaacuguucgauuu

SEQ ID NO: 313829 - RNA, 19 nt, Artificial Sequence
  Description of Artificial Sequence: Synthetic oligonucleotide
  Antisense strand to SEQ ID NO: 313828
aaaucgaacaguugcagga

SEQ ID NO: 313830 - RNA, 19 nt, Artificial Sequence
  Description of Artificial Sequence: Synthetic oligonucleotide
  Sense strand starting at position 3365 of SEQ ID NO: 4028
ccugcaacuguucgauuua

SEQ ID NO: 313831 - RNA, 19 nt, Artificial Sequence
  Description of Artificial Sequence: Synthetic oligonucleotide
  Antisense strand to SEQ ID NO: 313830
uaaaucgaacaguugcagg

SEQ ID NO: 313832 - RNA, 19 nt, Artificial Sequence
  Description of Artificial Sequence: Synthetic oligonucleotide
  Sense strand starting at position 3472 of SEQ ID NO: 4028
uccacuauacauugaucga

SEQ ID NO: 313833 - RNA, 19 nt, Artificial Sequence
  Description of Artificial Sequence: Synthetic oligonucleotide
  Antisense strand to SEQ ID NO: 313832
ucgaucaauguauagugga

SEQ ID NO: 313834 - RNA, 19 nt, Artificial Sequence
  Description of Artificial Sequence: Synthetic oligonucleotide
  Sense strand starting at position 3476 of SEQ ID NO: 4028
cuauacauugaucgaagca

SEQ ID NO: 313835 - RNA, 19 nt, Artificial Sequence
  Description of Artificial Sequence: Synthetic oligonucleotide
  Antisense strand to SEQ ID NO: 313834
ugcuucgaucaauguauag

SEQ ID NO: 313836 - RNA, 19 nt, Artificial Sequence
  Description of Artificial Sequence: Synthetic oligonucleotide
  Sense strand starting at position 3486 of SEQ ID NO: 4028
aucgaagcaccaugacauu

SEQ ID NO: 313837 - RNA, 19 nt, Artificial Sequence
  Description of Artificial Sequence: Synthetic oligonucleotide
  Antisense strand to SEQ ID NO: 313836
aaugucauggugcuucgau

SEQ ID NO: 313838 - RNA, 19 nt, Artificial Sequence
  Description of Artificial Sequence: Synthetic oligonucleotide
  Sense strand starting at position 3552 of SEQ ID NO: 4028
cugugaaaucaagaugcau

SEQ ID NO: 313839 - RNA, 19 nt, Artificial Sequence
  Description of Artificial Sequence: Synthetic oligonucleotide
  Antisense strand to SEQ ID NO: 313838
augcaucuugauuucacag

SEQ ID NO: 313840 - RNA, 19 nt, Artificial Sequence
  Description of Artificial Sequence: Synthetic oligonucleotide
  Sense strand starting at position 3671 of SEQ ID NO: 4028
cugagauaagugcauuguu

SEQ ID NO: 313841 - RNA, 19 nt, Artificial Sequence
  Description of Artificial Sequence: Synthetic oligonucleotide
  Antisense strand to SEQ ID NO: 313840
aacaaugcacuuaucucag

SEQ ID NO: 313842 - RNA, 19 nt, Artificial Sequence
  Description of Artificial Sequence: Synthetic oligonucleotide
  Sense strand starting at position 3674 of SEQ ID NO: 4028
agauaagugcauuguuuaa

SEQ ID NO: 313843 - RNA, 19 nt, Artificial Sequence
  Description of Artificial Sequence: Synthetic oligonucleotide
  Antisense strand to SEQ ID NO: 313842
uuaaacaaugcacuuaucu

SEQ ID NO: 313844 - RNA, 19 nt, Artificial Sequence
  Description of Artificial Sequence: Synthetic oligonucleotide
  Sense strand starting at position 3881 of SEQ ID NO: 4028
cugaguuacuuaccaagua

SEQ ID NO: 313845 - RNA, 19 nt, Artificial Sequence
  Description of Artificial Sequence: Synthetic oligonucleotide
  Antisense strand to SEQ ID NO: 313844
uacuugguaaguaacucag

SEQ ID NO: 313846 - RNA, 19 nt, Artificial Sequence
  Description of Artificial Sequence: Synthetic oligonucleotide
  Sense strand starting at position 3982 of SEQ ID NO: 4028
cuucgauauuauucuugau

SEQ ID NO: 313847 - RNA, 19 nt, Artificial Sequence
  Description of Artificial Sequence: Synthetic oligonucleotide
  Antisense strand to SEQ ID NO: 313846
aucaagaauaauaucgaag

SEQ ID NO: 313848 - RNA, 19 nt, Artificial Sequence
  Description of Artificial Sequence: Synthetic oligonucleotide
  Sense strand starting at position 30 of SEQ ID NO: 4030
ccucgaggauuaguuuaaa

SEQ ID NO: 313849 - RNA, 19 nt, Artificial Sequence
  Description of Artificial Sequence: Synthetic oligonucleotide
  Antisense strand to SEQ ID NO: 313848
uuuaaacuaauccucgagg

SEQ ID NO: 313850 - RNA, 19 nt, Artificial Sequence
  Description of Artificial Sequence: Synthetic oligonucleotide
  Sense strand starting at position 178 of SEQ ID NO: 4030
cuggaaagugaguaucagu

SEQ ID NO: 313851 - RNA, 19 nt, Artificial Sequence
  Description of Artificial Sequence: Synthetic oligonucleotide
  Antisense strand to SEQ ID NO: 313850
acugauacucacuuuccag

SEQ ID NO: 313852 - RNA, 19 nt, Artificial Sequence
  Description of Artificial Sequence: Synthetic oligonucleotide
  Sense strand starting at position 338 of SEQ ID NO: 4030
uccuauugauuugaaauug

SEQ ID NO: 313853 - RNA, 19 nt, Artificial Sequence
  Description of Artificial Sequence: Synthetic oligonucleotide
  Antisense strand to SEQ ID NO: 313852
caauuucaaaucaauagga

SEQ ID NO: 313854 - RNA, 19 nt, Artificial Sequence
  Description of Artificial Sequence: Synthetic oligonucleotide
  Sense strand starting at position 392 of SEQ ID NO: 4030
aagugucugggaugaaaca

SEQ ID NO: 313855 - RNA, 19 nt, Artificial Sequence
  Description of Artificial Sequence: Synthetic oligonucleotide
  Antisense strand to SEQ ID NO: 313854
uguuucaucccagacacuu

SEQ ID NO: 313856 - RNA, 19 nt, Artificial Sequence
  Description of Artificial Sequence: Synthetic oligonucleotide
  Sense strand starting at position 517 of SEQ ID NO: 4030
cagggcauuugugcuguaa

SEQ ID NO: 313857 - RNA, 19 nt, Artificial Sequence
  Description of Artificial Sequence: Synthetic oligonucleotide
  Antisense strand to SEQ ID NO: 313856
uuacagcacaaaugcccug

SEQ ID NO: 313858 - RNA, 19 nt, Artificial Sequence
  Description of Artificial Sequence: Synthetic oligonucleotide
  Sense strand starting at position 521 of SEQ ID NO: 4030
gcauuugugcuguaaacuu

SEQ ID NO: 313859 - RNA, 19 nt, Artificial Sequence
  Description of Artificial Sequence: Synthetic oligonucleotide
  Antisense strand to SEQ ID NO: 313858
aaguuuacagcacaaaugc

SEQ ID NO: 313860 - RNA, 19 nt, Artificial Sequence
  Description of Artificial Sequence: Synthetic oligonucleotide
  Sense strand starting at position 655 of SEQ ID NO: 4030
ucaucacuguuccugggaa

SEQ ID NO: 313861 - RNA, 19 nt, Artificial Sequence
  Description of Artificial Sequence: Synthetic oligonucleotide
  Antisense strand to SEQ ID NO: 313860
uucccaggaacagugauga

SEQ ID NO: 313862 - RNA, 19 nt, Artificial Sequence
  Description of Artificial Sequence: Synthetic oligonucleotide
  Sense strand starting at position 657 of SEQ ID NO: 4030
aucacuguuccugggaacu

SEQ ID NO: 313863 - RNA, 19 nt, Artificial Sequence
  Description of Artificial Sequence: Synthetic oligonucleotide
  Antisense strand to SEQ ID NO: 313862
aguucccaggaacagugau

SEQ ID NO: 313864 - RNA, 19 nt, Artificial Sequence
  Description of Artificial Sequence: Synthetic oligonucleotide
  Sense strand starting at position 811 of SEQ ID NO: 4030
cccugauauccugacagca

SEQ ID NO: 313865 - RNA, 19 nt, Artificial Sequence
  Description of Artificial Sequence: Synthetic oligonucleotide
  Antisense strand to SEQ ID NO: 313864
ugcugucaggauaucaggg

SEQ ID NO: 313866 - RNA, 19 nt, Artificial Sequence
  Description of Artificial Sequence: Synthetic oligonucleotide
  Sense strand starting at position 875 of SEQ ID NO: 4030
acucaaguuccaugaggac

SEQ ID NO: 313867 - RNA, 19 nt, Artificial Sequence
  Description of Artificial Sequence: Synthetic oligonucleotide
  Antisense strand to SEQ ID NO: 313866
guccucauggaacuugagu

SEQ ID NO: 313868 - RNA, 19 nt, Artificial Sequence
  Description of Artificial Sequence: Synthetic oligonucleotide
  Sense strand starting at position 916 of SEQ ID NO: 4030
acagaagugagguguuacu

SEQ ID NO: 313869 - RNA, 19 nt, Artificial Sequence
  Description of Artificial Sequence: Synthetic oligonucleotide
  Antisense strand to SEQ ID NO: 313868
aguaacaccucacuucugu

SEQ ID NO: 313870 - RNA, 19 nt, Artificial Sequence
  Description of Artificial Sequence: Synthetic oligonucleotide
  Sense strand starting at position 997 of SEQ ID NO: 4030
agacaacuuucugcuuaga

SEQ ID NO: 313871 - RNA, 19 nt, Artificial Sequence
  Description of Artificial Sequence: Synthetic oligonucleotide
  Antisense strand to SEQ ID NO: 313870
ucuaagcagaaaguugucu

SEQ ID NO: 313872 - RNA, 19 nt, Artificial Sequence
  Description of Artificial Sequence: Synthetic oligonucleotide
  Sense strand starting at position 1039 of SEQ ID NO: 4030
gaugaacugccaugucuaa

SEQ ID NO: 313873 - RNA, 19 nt, Artificial Sequence
  Description of Artificial Sequence: Synthetic oligonucleotide
  Antisense strand to SEQ ID NO: 313872
uuagacauggcaguucauc

SEQ ID NO: 313874 - RNA, 19 nt, Artificial Sequence
  Description of Artificial Sequence: Synthetic oligonucleotide
  Sense strand starting at position 1043 of SEQ ID NO: 4030
aacugccaugucuaagaga

SEQ ID NO: 313875 - RNA, 19 nt, Artificial Sequence
  Description of Artificial Sequence: Synthetic oligonucleotide
  Antisense strand to SEQ ID NO: 313874
ucucuuagacauggcaguu

SEQ ID NO: 313876 - RNA, 19 nt, Artificial Sequence
  Description of Artificial Sequence: Synthetic oligonucleotide
  Sense strand starting at position 1073 of SEQ ID NO: 4030
ccgaauuuguaggucugua

SEQ ID NO: 313877 - RNA, 19 nt, Artificial Sequence
  Description of Artificial Sequence: Synthetic oligonucleotide
  Antisense strand to SEQ ID NO: 313876
uacagaccuacaaauucgg

SEQ ID NO: 313878 - RNA, 19 nt, Artificial Sequence
  Description of Artificial Sequence: Synthetic oligonucleotide
  Sense strand starting at position 1078 of SEQ ID NO: 4030
uuuguaggucuguaacuga

SEQ ID NO: 313879 - RNA, 19 nt, Artificial Sequence
  Description of Artificial Sequence: Synthetic oligonucleotide
  Antisense strand to SEQ ID NO: 313878
ucaguuacagaccuacaaa

SEQ ID NO: 313880 - RNA, 19 nt, Artificial Sequence
  Description of Artificial Sequence: Synthetic oligonucleotide
  Sense strand starting at position 1086 of SEQ ID NO: 4030
ucuguaacugaccaaguuu

SEQ ID NO: 313881 - RNA, 19 nt, Artificial Sequence
  Description of Artificial Sequence: Synthetic oligonucleotide
  Antisense strand to SEQ ID NO: 313880
aaacuuggucaguuacaga

SEQ ID NO: 313882 - RNA, 19 nt, Artificial Sequence
  Description of Artificial Sequence: Synthetic oligonucleotide
  Sense strand starting at position 1408 of SEQ ID NO: 4030
ugaaauuccuacccacgga

SEQ ID NO: 313883 - RNA, 19 nt, Artificial Sequence
  Description of Artificial Sequence: Synthetic oligonucleotide
  Antisense strand to SEQ ID NO: 313882
uccguggguaggaauuuca

SEQ ID NO: 313884 - RNA, 19 nt, Artificial Sequence
  Description of Artificial Sequence: Synthetic oligonucleotide
  Sense strand starting at position 1548 of SEQ ID NO: 4030
cugcgaagucuuguuugua

SEQ ID NO: 313885 - RNA, 19 nt, Artificial Sequence
  Description of Artificial Sequence: Synthetic oligonucleotide
  Antisense strand to SEQ ID NO: 313884
uacaaacaagacuucgcag

SEQ ID NO: 313886 - RNA, 19 nt, Artificial Sequence
  Description of Artificial Sequence: Synthetic oligonucleotide
  Sense strand starting at position 1716 of SEQ ID NO: 4030
gcagguuagaacugaucuc

SEQ ID NO: 313887 - RNA, 19 nt, Artificial Sequence
  Description of Artificial Sequence: Synthetic oligonucleotide
  Antisense strand to SEQ ID NO: 313886
gagaucaguucuaaccugc

SEQ ID NO: 313888 - RNA, 19 nt, Artificial Sequence
  Description of Artificial Sequence: Synthetic oligonucleotide
  Sense strand starting at position 1775 of SEQ ID NO: 4030
acguguuacgccucuucua

SEQ ID NO: 313889 - RNA, 19 nt, Artificial Sequence
  Description of Artificial Sequence: Synthetic oligonucleotide
  Antisense strand to SEQ ID NO: 313888
uagaagaggcguaacacgu

SEQ ID NO: 313890 - RNA, 19 nt, Artificial Sequence
  Description of Artificial Sequence: Synthetic oligonucleotide
  Sense strand starting at position 1776 of SEQ ID NO: 4030
cguguuacgccucuucuaa

SEQ ID NO: 313891 - RNA, 19 nt, Artificial Sequence
  Description of Artificial Sequence: Synthetic oligonucleotide
  Antisense strand to SEQ ID NO: 313890
uuagaagaggcguaacacg

SEQ ID NO: 313892 - RNA, 19 nt, Artificial Sequence
  Description of Artificial Sequence: Synthetic oligonucleotide
  Sense strand starting at position 1922 of SEQ ID NO: 4030
caaguuucucucugggaaa

SEQ ID NO: 313893 - RNA, 19 nt, Artificial Sequence
  Description of Artificial Sequence: Synthetic oligonucleotide
  Antisense strand to SEQ ID NO: 313892
uuucccagagagaaacuug

SEQ ID NO: 313894 - RNA, 19 nt, Artificial Sequence
  Description of Artificial Sequence: Synthetic oligonucleotide
  Sense strand starting at position 1976 of SEQ ID NO: 4030
aacgcuuuaguggaagaaa

SEQ ID NO: 313895 - RNA, 19 nt, Artificial Sequence
  Description of Artificial Sequence: Synthetic oligonucleotide
  Antisense strand to SEQ ID NO: 313894
uuucuuccacuaaagcguu

SEQ ID NO: 313896 - RNA, 19 nt, Artificial Sequence
  Description of Artificial Sequence: Synthetic oligonucleotide
  Sense strand starting at position 2279 of SEQ ID NO: 4030
acaucaaauuguguaggua

SEQ ID NO: 313897 - RNA, 19 nt, Artificial Sequence
  Description of Artificial Sequence: Synthetic oligonucleotide
  Antisense strand to SEQ ID NO: 313896
uaccuacacaauuugaugu

SEQ ID NO: 313898 - RNA, 19 nt, Artificial Sequence
  Description of Artificial Sequence: Synthetic oligonucleotide
  Sense strand starting at position 2280 of SEQ ID NO: 4030
caucaaauuguguagguau

SEQ ID NO: 313899 - RNA, 19 nt, Artificial Sequence
  Description of Artificial Sequence: Synthetic oligonucleotide
  Antisense strand to SEQ ID NO: 313898
auaccuacacaauuugaug

SEQ ID NO: 313900 - RNA, 19 nt, Artificial Sequence
  Description of Artificial Sequence: Synthetic oligonucleotide
  Sense strand starting at position 2292 of SEQ ID NO: 4030
uagguaucucaguacagcu

SEQ ID NO: 313901 - RNA, 19 nt, Artificial Sequence
  Description of Artificial Sequence: Synthetic oligonucleotide
  Antisense strand to SEQ ID NO: 313900
agcuguacugagauaccua

SEQ ID NO: 313902 - RNA, 19 nt, Artificial Sequence
  Description of Artificial Sequence: Synthetic oligonucleotide
  Sense strand starting at position 2739 of SEQ ID NO: 4030
cucugaagggauugguuau

SEQ ID NO: 313903 - RNA, 19 nt, Artificial Sequence
  Description of Artificial Sequence: Synthetic oligonucleotide
  Antisense strand to SEQ ID NO: 313902
auaaccaaucccuucagag

SEQ ID NO: 313904 - RNA, 19 nt, Artificial Sequence
  Description of Artificial Sequence: Synthetic oligonucleotide
  Sense strand starting at position 2746 of SEQ ID NO: 4030
gggauugguuaugcaaaua

SEQ ID NO: 313905 - RNA, 19 nt, Artificial Sequence
  Description of Artificial Sequence: Synthetic oligonucleotide
  Antisense strand to SEQ ID NO: 313904
uauuugcauaaccaauccc

SEQ ID NO: 313906 - RNA, 19 nt, Artificial Sequence
  Description of Artificial Sequence: Synthetic oligonucleotide
  Sense strand starting at position 2908 of SEQ ID NO: 4030
gucagcaauuuagcaagua

SEQ ID NO: 313907 - RNA, 19 nt, Artificial Sequence
  Description of Artificial Sequence: Synthetic oligonucleotide
  Antisense strand to SEQ ID NO: 313906
uacuugcuaaauugcugac

SEQ ID NO: 313908 - RNA, 19 nt, Artificial Sequence
  Description of Artificial Sequence: Synthetic oligonucleotide
  Sense strand starting at position 3027 of SEQ ID NO: 4030
ugguuuacacugcacauaa

SEQ ID NO: 313909 - RNA, 19 nt, Artificial Sequence
  Description of Artificial Sequence: Synthetic oligonucleotide
  Antisense strand to SEQ ID NO: 313908
uuaugugcaguguaaacca

SEQ ID NO: 313910 - RNA, 19 nt, Artificial Sequence
  Description of Artificial Sequence: Synthetic oligonucleotide
  Sense strand starting at position 3157 of SEQ ID NO: 4030
cuuaaauaacugugagacu

SEQ ID NO: 313911 - RNA, 19 nt, Artificial Sequence
  Description of Artificial Sequence: Synthetic oligonucleotide
  Antisense strand to SEQ ID NO: 313910
agucucacaguuauuuaag

SEQ ID NO: 313912 - RNA, 19 nt, Artificial Sequence
  Description of Artificial Sequence: Synthetic oligonucleotide
  Sense strand starting at position 3184 of SEQ ID NO: 4030
uuuccuaaagagugaaagu

SEQ ID NO: 313913 - RNA, 19 nt, Artificial Sequence
  Description of Artificial Sequence: Synthetic oligonucleotide
  Antisense strand to SEQ ID NO: 313912
acuuucacucuuuaggaaa

SEQ ID NO: 313914 - RNA, 19 nt, Artificial Sequence
  Description of Artificial Sequence: Synthetic oligonucleotide
  Sense strand starting at position 3521 of SEQ ID NO: 4030
uccacacucccagagguau

SEQ ID NO: 313915 - RNA, 19 nt, Artificial Sequence
  Description of Artificial Sequence: Synthetic oligonucleotide
  Antisense strand to SEQ ID NO: 313914
auaccucugggagugugga

SEQ ID NO: 313916 - RNA, 19 nt, Artificial Sequence
  Description of Artificial Sequence: Synthetic oligonucleotide
  Sense strand starting at position 3535 of SEQ ID NO: 4030
gguauacgucuuuguauuu

SEQ ID NO: 313917 - RNA, 19 nt, Artificial Sequence
  Description of Artificial Sequence: Synthetic oligonucleotide
  Antisense strand to SEQ ID NO: 313916
aaauacaaagacguauacc

SEQ ID NO: 313918 - RNA, 19 nt, Artificial Sequence
  Description of Artificial Sequence: Synthetic oligonucleotide
  Sense strand starting at position 3627 of SEQ ID NO: 4030
cuuguucuaggaugcaaga

SEQ ID NO: 313919 - RNA, 19 nt, Artificial Sequence
  Description of Artificial Sequence: Synthetic oligonucleotide
  Antisense strand to SEQ ID NO: 313918
ucuugcauccuagaacaag

SEQ ID NO: 313920 - RNA, 19 nt, Artificial Sequence
  Description of Artificial Sequence: Synthetic oligonucleotide
  Sense strand starting at position 3749 of SEQ ID NO: 4030
cagauaaagugucuauaga

SEQ ID NO: 313921 - RNA, 19 nt, Artificial Sequence
  Description of Artificial Sequence: Synthetic oligonucleotide
  Antisense strand to SEQ ID NO: 313920
ucuauagacacuuuaucug

SEQ ID NO: 313922 - RNA, 19 nt, Artificial Sequence
  Description of Artificial Sequence: Synthetic oligonucleotide
  Sense strand starting at position 3890 of SEQ ID NO: 4030
cuaaauauaugugugacuu

SEQ ID NO: 313923 - RNA, 19 nt, Artificial Sequence
  Description of Artificial Sequence: Synthetic oligonucleotide
  Antisense strand to SEQ ID NO: 313922
aagucacacauauauuuag

SEQ ID NO: 313924 - RNA, 19 nt, Artificial Sequence
  Description of Artificial Sequence: Synthetic oligonucleotide
  Sense strand starting at position 3894 of SEQ ID NO: 4030
auauaugugugacuuauca

SEQ ID NO: 313925 - RNA, 19 nt, Artificial Sequence
  Description of Artificial Sequence: Synthetic oligonucleotide
  Antisense strand to SEQ ID NO: 313924
ugauaagucacacauauau

SEQ ID NO: 313926 - RNA, 19 nt, Artificial Sequence
  Description of Artificial Sequence: Synthetic oligonucleotide
  Sense strand starting at position 3910 of SEQ ID NO: 4030
ucaaguuccucuucugaga

SEQ ID NO: 313927 - RNA, 19 nt, Artificial Sequence
  Description of Artificial Sequence: Synthetic oligonucleotide
  Antisense strand to SEQ ID NO: 313926
ucucagaagaggaacuuga

SEQ ID NO: 313928 - RNA, 19 nt, Artificial Sequence
  Description of Artificial Sequence: Synthetic oligonucleotide
  Sense strand starting at position 50 of SEQ ID NO: 4031
auuaucuugcauuguguca

SEQ ID NO: 313929 - RNA, 19 nt, Artificial Sequence
  Description of Artificial Sequence: Synthetic oligonucleotide
  Antisense strand to SEQ ID NO: 313928
ugacacaaugcaagauaau

SEQ ID NO: 313930 - RNA, 19 nt, Artificial Sequence
  Description of Artificial Sequence: Synthetic oligonucleotide
  Sense strand starting at position 264 of SEQ ID NO: 4031
uuuguuucuguccauccaa

SEQ ID NO: 313931 - RNA, 19 nt, Artificial Sequence
  Description of Artificial Sequence: Synthetic oligonucleotide
  Antisense strand to SEQ ID NO: 313930
uuggauggacagaaacaaa

SEQ ID NO: 313932 - RNA, 19 nt, Artificial Sequence
  Description of Artificial Sequence: Synthetic oligonucleotide
  Sense strand starting at position 354 of SEQ ID NO: 4031
guggcucuacgacagacau

SEQ ID NO: 313933 - RNA, 19 nt, Artificial Sequence
  Description of Artificial Sequence: Synthetic oligonucleotide
  Antisense strand to SEQ ID NO: 313932
augucugucguagagccac

SEQ ID NO: 313934 - RNA, 19 nt, Artificial Sequence
  Description of Artificial Sequence: Synthetic oligonucleotide
  Sense strand starting at position 521 of SEQ ID NO: 4031
gcagcaagucuguagggaa

SEQ ID NO: 313935 - RNA, 19 nt, Artificial Sequence
  Description of Artificial Sequence: Synthetic oligonucleotide
  Antisense strand to SEQ ID NO: 313934
uucccuacagacuugcugc

SEQ ID NO: 313936 - RNA, 19 nt, Artificial Sequence
  Description of Artificial Sequence: Synthetic oligonucleotide
  Sense strand starting at position 548 of SEQ ID NO: 4031
uuuggcaugucuccaagaa

SEQ ID NO: 313937 - RNA, 19 nt, Artificial Sequence
  Description of Artificial Sequence: Synthetic oligonucleotide
  Antisense strand to SEQ ID NO: 313936
uucuuggagacaugccaaa

SEQ ID NO: 313938 - RNA, 19 nt, Artificial Sequence
  Description of Artificial Sequence: Synthetic oligonucleotide
  Sense strand starting at position 549 of SEQ ID NO: 4031
uuggcaugucuccaagaac

SEQ ID NO: 313939 - RNA, 19 nt, Artificial Sequence
  Description of Artificial Sequence: Synthetic oligonucleotide
  Antisense strand to SEQ ID NO: 313938
guucuuggagacaugccaa

SEQ ID NO: 313940 - RNA, 19 nt, Artificial Sequence
  Description of Artificial Sequence: Synthetic oligonucleotide
  Sense strand starting at position 552 of SEQ ID NO: 4031
gcaugucuccaagaacuag

SEQ ID NO: 313941 - RNA, 19 nt, Artificial Sequence
  Description of Artificial Sequence: Synthetic oligonucleotide
  Antisense strand to SEQ ID NO: 313940
cuaguucuuggagacaugc

SEQ ID NO: 313942 - RNA, 19 nt, Artificial Sequence
  Description of Artificial Sequence: Synthetic oligonucleotide
  Sense strand starting at position 684 of SEQ ID NO: 4031
gagcuugagucaguuccaa

SEQ ID NO: 313943 - RNA, 19 nt, Artificial Sequence
  Description of Artificial Sequence: Synthetic oligonucleotide
  Antisense strand to SEQ ID NO: 313942
uuggaacugacucaagcuc

SEQ ID NO: 313944 - RNA, 19 nt, Artificial Sequence
  Description of Artificial Sequence: Synthetic oligonucleotide
  Sense strand starting at position 726 of SEQ ID NO: 4031
ggaggacuuggcugccauu

SEQ ID NO: 313945 - RNA, 19 nt, Artificial Sequence
  Description of Artificial Sequence: Synthetic oligonucleotide
  Antisense strand to SEQ ID NO: 313944
aauggcagccaaguccucc

SEQ ID NO: 313946 - RNA, 19 nt, Artificial Sequence
  Description of Artificial Sequence: Synthetic oligonucleotide
  Sense strand starting at position 893 of SEQ ID NO: 4031
gaagaucugaggugaagug

SEQ ID NO: 313947 - RNA, 19 nt, Artificial Sequence
  Description of Artificial Sequence: Synthetic oligonucleotide
  Antisense strand to SEQ ID NO: 313946
cacuucaccucagaucuuc

SEQ ID NO: 313948 - RNA, 19 nt, Artificial Sequence
  Description of Artificial Sequence: Synthetic oligonucleotide
  Sense strand starting at position 913 of SEQ ID NO: 4031
gaagguugucucugcugag

SEQ ID NO: 313949 - RNA, 19 nt, Artificial Sequence
  Description of Artificial Sequence: Synthetic oligonucleotide
  Antisense strand to SEQ ID NO: 313948
cucagcagagacaaccuuc

SEQ ID NO: 313950 - RNA, 19 nt, Artificial Sequence
  Description of Artificial Sequence: Synthetic oligonucleotide
  Sense strand starting at position 914 of SEQ ID NO: 4031
aagguugucucugcugaga

SEQ ID NO: 313951 - RNA, 19 nt, Artificial Sequence
  Description of Artificial Sequence: Synthetic oligonucleotide
  Antisense strand to SEQ ID NO: 313950
ucucagcagagacaaccuu

SEQ ID NO: 313952 - RNA, 19 nt, Artificial Sequence
  Description of Artificial Sequence: Synthetic oligonucleotide
  Sense strand starting at position 1129 of SEQ ID NO: 4031
cuggauauccuguagucaa

SEQ ID NO: 313953 - RNA, 19 nt, Artificial Sequence
  Description of Artificial Sequence: Synthetic oligonucleotide
  Antisense strand to SEQ ID NO: 313952
uugacuacaggauauccag

SEQ ID NO: 313954 - RNA, 19 nt, Artificial Sequence
  Description of Artificial Sequence: Synthetic oligonucleotide
  Sense strand starting at position 1132 of SEQ ID NO: 4031
gauauccuguagucaagga

SEQ ID NO: 313955 - RNA, 19 nt, Artificial Sequence
  Description of Artificial Sequence: Synthetic oligonucleotide
  Antisense strand to SEQ ID NO: 313954
uccuugacuacaggauauc

SEQ ID NO: 313956 - RNA, 19 nt, Artificial Sequence
  Description of Artificial Sequence: Synthetic oligonucleotide
  Sense strand starting at position 1136 of SEQ ID NO: 4031
uccuguagucaaggagcaa

SEQ ID NO: 313957 - RNA, 19 nt, Artificial Sequence
  Description of Artificial Sequence: Synthetic oligonucleotide
  Antisense strand to SEQ ID NO: 313956
uugcuccuugacuacagga

SEQ ID NO: 313958 - RNA, 19 nt, Artificial Sequence
  Description of Artificial Sequence: Synthetic oligonucleotide
  Sense strand starting at position 1183 of SEQ ID NO: 4031
acaaaucucugguccugaa

SEQ ID NO: 313959 - RNA, 19 nt, Artificial Sequence
  Description of Artificial Sequence: Synthetic oligonucleotide
  Antisense strand to SEQ ID NO: 313958
uucaggaccagagauuugu

SEQ ID NO: 313960 - RNA, 19 nt, Artificial Sequence
  Description of Artificial Sequence: Synthetic oligonucleotide
  Sense strand starting at position 1460 of SEQ ID NO: 4031
ugcaaagaguuggucggau

SEQ ID NO: 313961 - RNA, 19 nt, Artificial Sequence
  Description of Artificial Sequence: Synthetic oligonucleotide
  Antisense strand to SEQ ID NO: 313960
auccgaccaacucuuugca

SEQ ID NO: 313962 - RNA, 19 nt, Artificial Sequence
  Description of Artificial Sequence: Synthetic oligonucleotide
  Sense strand starting at position 1462 of SEQ ID NO: 4031
caaagaguuggucggauug

SEQ ID NO: 313963 - RNA, 19 nt, Artificial Sequence
  Description of Artificial Sequence: Synthetic oligonucleotide
  Antisense strand to SEQ ID NO: 313962
caauccgaccaacucuuug

SEQ ID NO: 313964 - RNA, 19 nt, Artificial Sequence
  Description of Artificial Sequence: Synthetic oligonucleotide
  Sense strand starting at position 2337 of SEQ ID NO: 4031
gcuccuguauuucucugaa

SEQ ID NO: 313965 - RNA, 19 nt, Artificial Sequence
  Description of Artificial Sequence: Synthetic oligonucleotide
  Antisense strand to SEQ ID NO: 313964
uucagagaaauacaggagc

SEQ ID NO: 313966 - RNA, 19 nt, Artificial Sequence
  Description of Artificial Sequence: Synthetic oligonucleotide
  Sense strand starting at position 2339 of SEQ ID NO: 4031
uccuguauuucucugaagu

SEQ ID NO: 313967 - RNA, 19 nt, Artificial Sequence
  Description of Artificial Sequence: Synthetic oligonucleotide
  Antisense strand to SEQ ID NO: 313966
acuucagagaaauacagga

SEQ ID NO: 313968 - RNA, 19 nt, Artificial Sequence
  Description of Artificial Sequence: Synthetic oligonucleotide
  Sense strand starting at position 2341 of SEQ ID NO: 4031
cuguauuucucugaaguac

SEQ ID NO: 313969 - RNA, 19 nt, Artificial Sequence
  Description of Artificial Sequence: Synthetic oligonucleotide
  Antisense strand to SEQ ID NO: 313968
guacuucagagaaauacag

SEQ ID NO: 313970 - RNA, 19 nt, Artificial Sequence
  Description of Artificial Sequence: Synthetic oligonucleotide
  Sense strand starting at position 2407 of SEQ ID NO: 4031
ccugcuaugugaucuuacu

SEQ ID NO: 313971 - RNA, 19 nt, Artificial Sequence
  Description of Artificial Sequence: Synthetic oligonucleotide
  Antisense strand to SEQ ID NO: 313970
aguaagaucacauagcagg

SEQ ID NO: 313972 - RNA, 19 nt, Artificial Sequence
  Description of Artificial Sequence: Synthetic oligonucleotide
  Sense strand starting at position 2471 of SEQ ID NO: 4031
ugagcauacugggaaauca

SEQ ID NO: 313973 - RNA, 19 nt, Artificial Sequence
  Description of Artificial Sequence: Synthetic oligonucleotide
  Antisense strand to SEQ ID NO: 313972
ugauuucccaguaugcuca

SEQ ID NO: 313974 - RNA, 19 nt, Artificial Sequence
  Description of Artificial Sequence: Synthetic oligonucleotide
  Sense strand starting at position 2503 of SEQ ID NO: 4031
ccuuguuucguguuagguc

SEQ ID NO: 313975 - RNA, 19 nt, Artificial Sequence
  Description of Artificial Sequence: Synthetic oligonucleotide
  Antisense strand to SEQ ID NO: 313974
gaccuaacacgaaacaagg

SEQ ID NO: 313976 - RNA, 19 nt, Artificial Sequence
  Description of Artificial Sequence: Synthetic oligonucleotide
  Sense strand starting at position 2545 of SEQ ID NO: 4031
cagugugguccucagucuu

SEQ ID NO: 313977 - RNA, 19 nt, Artificial Sequence
  Description of Artificial Sequence: Synthetic oligonucleotide
  Antisense strand to SEQ ID NO: 313976
aagacugaggaccacacug

SEQ ID NO: 313978 - RNA, 19 nt, Artificial Sequence
  Description of Artificial Sequence: Synthetic oligonucleotide
  Sense strand starting at position 2696 of SEQ ID NO: 4031
agccuagaauauucuuagu

SEQ ID NO: 313979 - RNA, 19 nt, Artificial Sequence
  Description of Artificial Sequence: Synthetic oligonucleotide
  Antisense strand to SEQ ID NO: 313978
acuaagaauauucuaggcu

SEQ ID NO: 313980 - RNA, 19 nt, Artificial Sequence
  Description of Artificial Sequence: Synthetic oligonucleotide
  Sense strand starting at position 3311 of SEQ ID NO: 4031
aucauuugguucuaagaau

SEQ ID NO: 313981 - RNA, 19 nt, Artificial Sequence
  Description of Artificial Sequence: Synthetic oligonucleotide
  Antisense strand to SEQ ID NO: 313980
auucuuagaaccaaaugau

SEQ ID NO: 313982 - RNA, 19 nt, Artificial Sequence
  Description of Artificial Sequence: Synthetic oligonucleotide
  Sense strand starting at position 3371 of SEQ ID NO: 4031
aauuuagaauuguaggcuu

SEQ ID NO: 313983 - RNA, 19 nt, Artificial Sequence
  Description of Artificial Sequence: Synthetic oligonucleotide
  Antisense strand to SEQ ID NO: 313982
aagccuacaauucuaaauu

SEQ ID NO: 313984 - RNA, 19 nt, Artificial Sequence
  Description of Artificial Sequence: Synthetic oligonucleotide
  Sense strand starting at position 3514 of SEQ ID NO: 4031
gaaagaauuguaggcuuuc

SEQ ID NO: 313985 - RNA, 19 nt, Artificial Sequence
  Description of Artificial Sequence: Synthetic oligonucleotide
  Antisense strand to SEQ ID NO: 313984
gaaagccuacaauucuuuc

SEQ ID NO: 313986 - RNA, 19 nt, Artificial Sequence
  Description of Artificial Sequence: Synthetic oligonucleotide
  Sense strand starting at position 3525 of SEQ ID NO: 4031
aggcuuucaguuuggagaa

SEQ ID NO: 313987 - RNA, 19 nt, Artificial Sequence
  Description of Artificial Sequence: Synthetic oligonucleotide
  Antisense strand to SEQ ID NO: 313986
uucuccaaacugaaagccu

SEQ ID NO: 313988 - RNA, 19 nt, Artificial Sequence
  Description of Artificial Sequence: Synthetic oligonucleotide
  Sense strand starting at position 3544 of SEQ ID NO: 4031
acguguauggagcagacua

SEQ ID NO: 313989 - RNA, 19 nt, Artificial Sequence
  Description of Artificial Sequence: Synthetic oligonucleotide
  Antisense strand to SEQ ID NO: 313988
uagucugcuccauacacgu

SEQ ID NO: 313990 - RNA, 19 nt, Artificial Sequence
  Description of Artificial Sequence: Synthetic oligonucleotide
  Sense strand starting at position 3546 of SEQ ID NO: 4031
guguauggagcagacuaaa

SEQ ID NO: 313991 - RNA, 19 nt, Artificial Sequence
  Description of Artificial Sequence: Synthetic oligonucleotide
  Antisense strand to SEQ ID NO: 313990
uuuagucugcuccauacac

SEQ ID NO: 313992 - RNA, 19 nt, Artificial Sequence
  Description of Artificial Sequence: Synthetic oligonucleotide
  Sense strand starting at position 3673 of SEQ ID NO: 4031
gagccagaaugcuugaagu

SEQ ID NO: 313993 - RNA, 19 nt, Artificial Sequence
  Description of Artificial Sequence: Synthetic oligonucleotide
  Antisense strand to SEQ ID NO: 313992
acuucaagcauucuggcuc

SEQ ID NO: 313994 - RNA, 19 nt, Artificial Sequence
  Description of Artificial Sequence: Synthetic oligonucleotide
  Sense strand starting at position 3690 of SEQ ID NO: 4031
gugcaaauguagucauuug

SEQ ID NO: 313995 - RNA, 19 nt, Artificial Sequence
  Description of Artificial Sequence: Synthetic oligonucleotide
  Antisense strand to SEQ ID NO: 313994
caaaugacuacauuugcac

SEQ ID NO: 313996 - RNA, 19 nt, Artificial Sequence
  Description of Artificial Sequence: Synthetic oligonucleotide
  Sense strand starting at position 3697 of SEQ ID NO: 4031
uguagucauuuguucuuau

SEQ ID NO: 313997 - RNA, 19 nt, Artificial Sequence
  Description of Artificial Sequence: Synthetic oligonucleotide
  Antisense strand to SEQ ID NO: 313996
auaagaacaaaugacuaca

SEQ ID NO: 313998 - RNA, 19 nt, Artificial Sequence
  Description of Artificial Sequence: Synthetic oligonucleotide
  Sense strand starting at position 3698 of SEQ ID NO: 4031
guagucauuuguucuuaug

SEQ ID NO: 313999 - RNA, 19 nt, Artificial Sequence
  Description of Artificial Sequence: Synthetic oligonucleotide
  Antisense strand to SEQ ID NO: 313998
cauaagaacaaaugacuac

SEQ ID NO: 314000 - RNA, 19 nt, Artificial Sequence
  Description of Artificial Sequence: Synthetic oligonucleotide
  Sense strand starting at position 3708 of SEQ ID NO: 4031
guucuuauguugcuauaca

SEQ ID NO: 314001 - RNA, 19 nt, Artificial Sequence
  Description of Artificial Sequence: Synthetic oligonucleotide
  Antisense strand to SEQ ID NO: 314000
uguauagcaacauaagaac

SEQ ID NO: 314002 - RNA, 19 nt, Artificial Sequence
  Description of Artificial Sequence: Synthetic oligonucleotide
  Sense strand starting at position 3726 of SEQ ID NO: 4031
agaaauaccucgcuaggca

SEQ ID NO: 314003 - RNA, 19 nt, Artificial Sequence
  Description of Artificial Sequence: Synthetic oligonucleotide
  Antisense strand to SEQ ID NO: 314002
ugccuagcgagguauuucu

SEQ ID NO: 314004 - RNA, 19 nt, Artificial Sequence
  Description of Artificial Sequence: Synthetic oligonucleotide
  Sense strand starting at position 3727 of SEQ ID NO: 4031
gaaauaccucgcuaggcau

SEQ ID NO: 314005 - RNA, 19 nt, Artificial Sequence
  Description of Artificial Sequence: Synthetic oligonucleotide
  Antisense strand to SEQ ID NO: 314004
augccuagcgagguauuuc

SEQ ID NO: 314006 - RNA, 19 nt, Artificial Sequence
  Description of Artificial Sequence: Synthetic oligonucleotide
  Sense strand starting at position 3905 of SEQ ID NO: 4031
ccaaauacucgagaggcuu

SEQ ID NO: 314007 - RNA, 19 nt, Artificial Sequence
  Description of Artificial Sequence: Synthetic oligonucleotide
  Antisense strand to SEQ ID NO: 314006
aagccucucgaguauuugg

SEQ ID NO: 314008 - RNA, 19 nt, Artificial Sequence
  Description of Artificial Sequence: Synthetic oligonucleotide
  Sense strand starting at position 720 of SEQ ID NO: 4032
ggcacagcucggucuugua

SEQ ID NO: 314009 - RNA, 19 nt, Artificial Sequence
  Description of Artificial Sequence: Synthetic oligonucleotide
  Antisense strand to SEQ ID NO: 314008
uacaagaccgagcugugcc

SEQ ID NO: 314010 - RNA, 19 nt, Artificial Sequence
  Description of Artificial Sequence: Synthetic oligonucleotide
  Sense strand starting at position 741 of SEQ ID NO: 4032
gcguggaguugaucuggga

SEQ ID NO: 314011 - RNA, 19 nt, Artificial Sequence
  Description of Artificial Sequence: Synthetic oligonucleotide
  Antisense strand to SEQ ID NO: 314010
ucccagaucaacuccacgc

SEQ ID NO: 314012 - RNA, 19 nt, Artificial Sequence
  Description of Artificial Sequence: Synthetic oligonucleotide
  Sense strand starting at position 813 of SEQ ID NO: 4032
cgccguucucgcuaaacga

SEQ ID NO: 314013 - RNA, 19 nt, Artificial Sequence
  Description of Artificial Sequence: Synthetic oligonucleotide
  Antisense strand to SEQ ID NO: 314012
ucguuuagcgagaacggcg

SEQ ID NO: 314014 - RNA, 19 nt, Artificial Sequence
  Description of Artificial Sequence: Synthetic oligonucleotide
  Sense strand starting at position 828 of SEQ ID NO: 4032
acgagcggucccggaauuu

SEQ ID NO: 314015 - RNA, 19 nt, Artificial Sequence
  Description of Artificial Sequence: Synthetic oligonucleotide
  Antisense strand to SEQ ID NO: 314014
aaauuccgggaccgcucgu

SEQ ID NO: 314016 - RNA, 19 nt, Artificial Sequence
  Description of Artificial Sequence: Synthetic oligonucleotide
  Sense strand starting at position 837 of SEQ ID NO: 4032
cccggaauuuguucuccuu

SEQ ID NO: 314017 - RNA, 19 nt, Artificial Sequence
  Description of Artificial Sequence: Synthetic oligonucleotide
  Antisense strand to SEQ ID NO: 314016
aaggagaacaaauuccggg

SEQ ID NO: 314018 - RNA, 19 nt, Artificial Sequence
  Description of Artificial Sequence: Synthetic oligonucleotide
  Sense strand starting at position 839 of SEQ ID NO: 4032
cggaauuuguucuccuugu

SEQ ID NO: 314019 - RNA, 19 nt, Artificial Sequence
  Description of Artificial Sequence: Synthetic oligonucleotide
  Antisense strand to SEQ ID NO: 314018
acaaggagaacaaauuccg

SEQ ID NO: 314020 - RNA, 19 nt, Artificial Sequence
  Description of Artificial Sequence: Synthetic oligonucleotide
  Sense strand starting at position 840 of SEQ ID NO: 4032
ggaauuuguucuccuuguu

SEQ ID NO: 314021 - RNA, 19 nt, Artificial Sequence
  Description of Artificial Sequence: Synthetic oligonucleotide
  Antisense strand to SEQ ID NO: 314020
aacaaggagaacaaauucc

SEQ ID NO: 314022 - RNA, 19 nt, Artificial Sequence
  Description of Artificial Sequence: Synthetic oligonucleotide
  Sense strand starting at position 1027 of SEQ ID NO: 4032
cgagugccgucggaggaau

SEQ ID NO: 314023 - RNA, 19 nt, Artificial Sequence
  Description of Artificial Sequence: Synthetic oligonucleotide
  Antisense strand to SEQ ID NO: 314022
auuccuccgacggcacucg

SEQ ID NO: 314024 - RNA, 19 nt, Artificial Sequence
  Description of Artificial Sequence: Synthetic oligonucleotide
  Sense strand starting at position 1135 of SEQ ID NO: 4032
ggauuucucugucugccaa

SEQ ID NO: 314025 - RNA, 19 nt, Artificial Sequence
  Description of Artificial Sequence: Synthetic oligonucleotide
  Antisense strand to SEQ ID NO: 314024
uuggcagacagagaaaucc

SEQ ID NO: 314026 - RNA, 19 nt, Artificial Sequence
  Description of Artificial Sequence: Synthetic oligonucleotide
  Sense strand starting at position 1308 of SEQ ID NO: 4032
ccagcaagaucuugcugga

SEQ ID NO: 314027 - RNA, 19 nt, Artificial Sequence
  Description of Artificial Sequence: Synthetic oligonucleotide
  Antisense strand to SEQ ID NO: 314026
uccagcaagaucuugcugg

SEQ ID NO: 314028 - RNA, 19 nt, Artificial Sequence
  Description of Artificial Sequence: Synthetic oligonucleotide
  Sense strand starting at position 1364 of SEQ ID NO: 4032
gcuggguuucgacacguga

SEQ ID NO: 314029 - RNA, 19 nt, Artificial Sequence
  Description of Artificial Sequence: Synthetic oligonucleotide
  Antisense strand to SEQ ID NO: 314028
ucacgugucgaaacccagc

SEQ ID NO: 314030 - RNA, 19 nt, Artificial Sequence
  Description of Artificial Sequence: Synthetic oligonucleotide
  Sense strand starting at position 1366 of SEQ ID NO: 4032
uggguuucgacacgugauc

SEQ ID NO: 314031 - RNA, 19 nt, Artificial Sequence
  Description of Artificial Sequence: Synthetic oligonucleotide
  Antisense strand to SEQ ID NO: 314030
gaucacgugucgaaaccca

SEQ ID NO: 314032 - RNA, 19 nt, Artificial Sequence
  Description of Artificial Sequence: Synthetic oligonucleotide
  Sense strand starting at position 1664 of SEQ ID NO: 4032
acaagaagucgacaucgua

SEQ ID NO: 314033 - RNA, 19 nt, Artificial Sequence
  Description of Artificial Sequence: Synthetic oligonucleotide
  Antisense strand to SEQ ID NO: 314032
uacgaugucgacuucuugu

SEQ ID NO: 314034 - RNA, 19 nt, Artificial Sequence
  Description of Artificial Sequence: Synthetic oligonucleotide
  Sense strand starting at position 1667 of SEQ ID NO: 4032
agaagucgacaucguagaa

SEQ ID NO: 314035 - RNA, 19 nt, Artificial Sequence
  Description of Artificial Sequence: Synthetic oligonucleotide
  Antisense strand to SEQ ID NO: 314034
uucuacgaugucgacuucu

SEQ ID NO: 314036 - RNA, 19 nt, Artificial Sequence
  Description of Artificial Sequence: Synthetic oligonucleotide
  Sense strand starting at position 1691 of SEQ ID NO: 4032
acagaaguguggucgacau

SEQ ID NO: 314037 - RNA, 19 nt, Artificial Sequence
  Description of Artificial Sequence: Synthetic oligonucleotide
  Antisense strand to SEQ ID NO: 314036
augucgaccacacuucugu

SEQ ID NO: 314038 - RNA, 19 nt, Artificial Sequence
  Description of Artificial Sequence: Synthetic oligonucleotide
  Sense strand starting at position 1693 of SEQ ID NO: 4032
agaaguguggucgacaugu

SEQ ID NO: 314039 - RNA, 19 nt, Artificial Sequence
  Description of Artificial Sequence: Synthetic oligonucleotide
  Antisense strand to SEQ ID NO: 314038
acaugucgaccacacuucu

SEQ ID NO: 314040 - RNA, 19 nt, Artificial Sequence
  Description of Artificial Sequence: Synthetic oligonucleotide
  Sense strand starting at position 1695 of SEQ ID NO: 4032
aaguguggucgacauguuu

SEQ ID NO: 314041 - RNA, 19 nt, Artificial Sequence
  Description of Artificial Sequence: Synthetic oligonucleotide
  Antisense strand to SEQ ID NO: 314040
aaacaugucgaccacacuu

SEQ ID NO: 314042 - RNA, 19 nt, Artificial Sequence
  Description of Artificial Sequence: Synthetic oligonucleotide
  Sense strand starting at position 2378 of SEQ ID NO: 4032
cccuguucuccgaggcgga

SEQ ID NO: 314043 - RNA, 19 nt, Artificial Sequence
  Description of Artificial Sequence: Synthetic oligonucleotide
  Antisense strand to SEQ ID NO: 314042
uccgccucggagaacaggg

SEQ ID NO: 314044 - RNA, 19 nt, Artificial Sequence
  Description of Artificial Sequence: Synthetic oligonucleotide
  Sense strand starting at position 2455 of SEQ ID NO: 4032
gccagaauaucgcaaccau

SEQ ID NO: 314045 - RNA, 19 nt, Artificial Sequence
  Description of Artificial Sequence: Synthetic oligonucleotide
  Antisense strand to SEQ ID NO: 314044
augguugcgauauucuggc

SEQ ID NO: 314046 - RNA, 19 nt, Artificial Sequence
  Description of Artificial Sequence: Synthetic oligonucleotide
  Sense strand starting at position 300 of SEQ ID NO: 4033
ucccuagauguauagcuuu

SEQ ID NO: 314047 - RNA, 19 nt, Artificial Sequence
  Description of Artificial Sequence: Synthetic oligonucleotide
  Antisense strand to SEQ ID NO: 314046
aaagcuauacaucuaggga

SEQ ID NO: 314048 - RNA, 19 nt, Artificial Sequence
  Description of Artificial Sequence: Synthetic oligonucleotide
  Sense strand starting at position 323 of SEQ ID NO: 4033
guaauuuguugacauuauc

SEQ ID NO: 314049 - RNA, 19 nt, Artificial Sequence
  Description of Artificial Sequence: Synthetic oligonucleotide
  Antisense strand to SEQ ID NO: 314048
gauaaugucaacaaauuac

SEQ ID NO: 314050 - RNA, 19 nt, Artificial Sequence
  Description of Artificial Sequence: Synthetic oligonucleotide
  Sense strand starting at position 349 of SEQ ID NO: 4033
ugauauuacuuugugauac

SEQ ID NO: 314051 - RNA, 19 nt, Artificial Sequence
  Description of Artificial Sequence: Synthetic oligonucleotide
  Antisense strand to SEQ ID NO: 314050
guaucacaaaguaauauca

SEQ ID NO: 314052 - RNA, 19 nt, Artificial Sequence
  Description of Artificial Sequence: Synthetic oligonucleotide
  Sense strand starting at position 406 of SEQ ID NO: 4033
cgaagauuccagugaagaa

SEQ ID NO: 314053 - RNA, 19 nt, Artificial Sequence
  Description of Artificial Sequence: Synthetic oligonucleotide
  Antisense strand to SEQ ID NO: 314052
uucuucacuggaaucuucg

SEQ ID NO: 314054 - RNA, 19 nt, Artificial Sequence
  Description of Artificial Sequence: Synthetic oligonucleotide
  Sense strand starting at position 438 of SEQ ID NO: 4033
gcugcauuggaguaaagcu

SEQ ID NO: 314055 - RNA, 19 nt, Artificial Sequence
  Description of Artificial Sequence: Synthetic oligonucleotide
  Antisense strand to SEQ ID NO: 314054
agcuuuacuccaaugcagc

SEQ ID NO: 314056 - RNA, 19 nt, Artificial Sequence
  Description of Artificial Sequence: Synthetic oligonucleotide
  Sense strand starting at position 446 of SEQ ID NO: 4033
ggaguaaagcuagguaucu

SEQ ID NO: 314057 - RNA, 19 nt, Artificial Sequence
  Description of Artificial Sequence: Synthetic oligonucleotide
  Antisense strand to SEQ ID NO: 314056
agauaccuagcuuuacucc

SEQ ID NO: 314058 - RNA, 19 nt, Artificial Sequence
  Description of Artificial Sequence: Synthetic oligonucleotide
  Sense strand starting at position 447 of SEQ ID NO: 4033
gaguaaagcuagguaucuu

SEQ ID NO: 314059 - RNA, 19 nt, Artificial Sequence
  Description of Artificial Sequence: Synthetic oligonucleotide
  Antisense strand to SEQ ID NO: 314058
aagauaccuagcuuuacuc

SEQ ID NO: 314060 - RNA, 19 nt, Artificial Sequence
  Description of Artificial Sequence: Synthetic oligonucleotide
  Sense strand starting at position 473 of SEQ ID NO: 4033
accagugguuccucaccua

SEQ ID NO: 314061 - RNA, 19 nt, Artificial Sequence
  Description of Artificial Sequence: Synthetic oligonucleotide
  Antisense strand to SEQ ID NO: 314060
uaggugaggaaccacuggu

SEQ ID NO: 314062 - RNA, 19 nt, Artificial Sequence
  Description of Artificial Sequence: Synthetic oligonucleotide
  Sense strand starting at position 476 of SEQ ID NO: 4033
agugguuccucaccuauaa

SEQ ID NO: 314063 - RNA, 19 nt, Artificial Sequence
  Description of Artificial Sequence: Synthetic oligonucleotide
  Antisense strand to SEQ ID NO: 314062
uuauaggugaggaaccacu

SEQ ID NO: 314064 - RNA, 19 nt, Artificial Sequence
  Description of Artificial Sequence: Synthetic oligonucleotide
  Sense strand starting at position 480 of SEQ ID NO: 4033
guuccucaccuauaacgua

SEQ ID NO: 314065 - RNA, 19 nt, Artificial Sequence
  Description of Artificial Sequence: Synthetic oligonucleotide
  Antisense strand to SEQ ID NO: 314064
uacguuauaggugaggaac

SEQ ID NO: 314066 - RNA, 19 nt, Artificial Sequence
  Description of Artificial Sequence: Synthetic oligonucleotide
  Sense strand starting at position 495 of SEQ ID NO: 4033
cguaacacauuuggagaaa

SEQ ID NO: 314067 - RNA, 19 nt, Artificial Sequence
  Description of Artificial Sequence: Synthetic oligonucleotide
  Antisense strand to SEQ ID NO: 314066
uuucuccaaauguguuacg

SEQ ID NO: 314068 - RNA, 19 nt, Artificial Sequence
  Description of Artificial Sequence: Synthetic oligonucleotide
  Sense strand starting at position 496 of SEQ ID NO: 4033
guaacacauuuggagaaau

SEQ ID NO: 314069 - RNA, 19 nt, Artificial Sequence
  Description of Artificial Sequence: Synthetic oligonucleotide
  Antisense strand to SEQ ID NO: 314068
auuucuccaaauguguuac

SEQ ID NO: 314070 - RNA, 19 nt, Artificial Sequence
  Description of Artificial Sequence: Synthetic oligonucleotide
  Sense strand starting at position 530 of SEQ ID NO: 4033
ugacuauggccucaaacua

SEQ ID NO: 314071 - RNA, 19 nt, Artificial Sequence
  Description of Artificial Sequence: Synthetic oligonucleotide
  Antisense strand to SEQ ID NO: 314070
uaguuugaggccauaguca

SEQ ID NO: 314072 - RNA, 19 nt, Artificial Sequence
  Description of Artificial Sequence: Synthetic oligonucleotide
  Sense strand starting at position 556 of SEQ ID NO: 4033
gaacauaacugaggaauga

SEQ ID NO: 314073 - RNA, 19 nt, Artificial Sequence
  Description of Artificial Sequence: Synthetic oligonucleotide
  Antisense strand to SEQ ID NO: 314072
ucauuccucaguuauguuc

SEQ ID NO: 314074 - RNA, 19 nt, Artificial Sequence
  Description of Artificial Sequence: Synthetic oligonucleotide
  Sense strand starting at position 567 of SEQ ID NO: 4033
aggaaugaaugacaauuga

SEQ ID NO: 314075 - RNA, 19 nt, Artificial Sequence
  Description of Artificial Sequence: Synthetic oligonucleotide
  Antisense strand to SEQ ID NO: 314074
ucaauugucauucauuccu

SEQ ID NO: 314076 - RNA, 19 nt, Artificial Sequence
  Description of Artificial Sequence: Synthetic oligonucleotide
  Sense strand starting at position 595 of SEQ ID NO: 4033
ccuguuauacauggcuaaa

SEQ ID NO: 314077 - RNA, 19 nt, Artificial Sequence
  Description of Artificial Sequence: Synthetic oligonucleotide
  Antisense strand to SEQ ID NO: 314076
uuuagccauguauaacagg

SEQ ID NO: 314078 - RNA, 19 nt, Artificial Sequence
  Description of Artificial Sequence: Synthetic oligonucleotide
  Sense strand starting at position 615 of SEQ ID NO: 4033
ugaguuuaagcugaauaau

SEQ ID NO: 314079 - RNA, 19 nt, Artificial Sequence
  Description of Artificial Sequence: Synthetic oligonucleotide
  Antisense strand to SEQ ID NO: 314078
auuauucagcuuaaacuca

SEQ ID NO: 314080 - RNA, 19 nt, Artificial Sequence
  Description of Artificial Sequence: Synthetic oligonucleotide
  Sense strand starting at position 618 of SEQ ID NO: 4033
guuuaagcugaauaauuag

SEQ ID NO: 314081 - RNA, 19 nt, Artificial Sequence
  Description of Artificial Sequence: Synthetic oligonucleotide
  Antisense strand to SEQ ID NO: 314080
cuaauuauucagcuuaaac

SEQ ID NO: 314082 - RNA, 19 nt, Artificial Sequence
  Description of Artificial Sequence: Synthetic oligonucleotide
  Sense strand starting at position 641 of SEQ ID NO: 4033
uaauaagaaugaugggaau

SEQ ID NO: 314083 - RNA, 19 nt, Artificial Sequence
  Description of Artificial Sequence: Synthetic oligonucleotide
  Antisense strand to SEQ ID NO: 314082
auucccaucauucuuauua

SEQ ID NO: 314084 - RNA, 19 nt, Artificial Sequence
  Description of Artificial Sequence: Synthetic oligonucleotide
  Sense strand starting at position 668 of SEQ ID NO: 4033
gaaauugagucacagacaa

SEQ ID NO: 314085 - RNA, 19 nt, Artificial Sequence
  Description of Artificial Sequence: Synthetic oligonucleotide
  Antisense strand to SEQ ID NO: 314084
uugucugugacucaauuuc

SEQ ID NO: 314086 - RNA, 19 nt, Artificial Sequence
  Description of Artificial Sequence: Synthetic oligonucleotide
  Sense strand starting at position 1032 of SEQ ID NO: 4033
gcaaucugauagucccuau

SEQ ID NO: 314087 - RNA, 19 nt, Artificial Sequence
  Description of Artificial Sequence: Synthetic oligonucleotide
  Antisense strand to SEQ ID NO: 314086
auagggacuaucagauugc

SEQ ID NO: 314088 - RNA, 19 nt, Artificial Sequence
  Description of Artificial Sequence: Synthetic oligonucleotide
  Sense strand starting at position 1161 of SEQ ID NO: 4033
ugaauauuaucgcuguucu

SEQ ID NO: 314089 - RNA, 19 nt, Artificial Sequence
  Description of Artificial Sequence: Synthetic oligonucleotide
  Antisense strand to SEQ ID NO: 314088
agaacagcgauaauauuca

SEQ ID NO: 314090 - RNA, 19 nt, Artificial Sequence
  Description of Artificial Sequence: Synthetic oligonucleotide
  Sense strand starting at position 1315 of SEQ ID NO: 4033
gcuuaucuuccgggcagga

SEQ ID NO: 314091 - RNA, 19 nt, Artificial Sequence
  Description of Artificial Sequence: Synthetic oligonucleotide
  Antisense strand to SEQ ID NO: 314090
uccugcccggaagauaagc

SEQ ID NO: 314092 - RNA, 19 nt, Artificial Sequence
  Description of Artificial Sequence: Synthetic oligonucleotide
  Sense strand starting at position 1570 of SEQ ID NO: 4033
ggcgguuuguaaccuggaa

SEQ ID NO: 314093 - RNA, 19 nt, Artificial Sequence
  Description of Artificial Sequence: Synthetic oligonucleotide
  Antisense strand to SEQ ID NO: 314092
uuccagguuacaaaccgcc

SEQ ID NO: 314094 - RNA, 19 nt, Artificial Sequence
  Description of Artificial Sequence: Synthetic oligonucleotide
  Sense strand starting at position 1574 of SEQ ID NO: 4033
guuuguaaccuggaaggcu

SEQ ID NO: 314095 - RNA, 19 nt, Artificial Sequence
  Description of Artificial Sequence: Synthetic oligonucleotide
  Antisense strand to SEQ ID NO: 314094
agccuuccagguuacaaac

SEQ ID NO: 314096 - RNA, 19 nt, Artificial Sequence
  Description of Artificial Sequence: Synthetic oligonucleotide
  Sense strand starting at position 1596 of SEQ ID NO: 4033
gauggagcaucgucaugau

SEQ ID NO: 314097 - RNA, 19 nt, Artificial Sequence
  Description of Artificial Sequence: Synthetic oligonucleotide
  Antisense strand to SEQ ID NO: 314096
aucaugacgaugcuccauc

SEQ ID NO: 314098 - RNA, 19 nt, Artificial Sequence
  Description of Artificial Sequence: Synthetic oligonucleotide
  Sense strand starting at position 1846 of SEQ ID NO: 4033
gcgggagccgcaucucuau

SEQ ID NO: 314099 - RNA, 19 nt, Artificial Sequence
  Description of Artificial Sequence: Synthetic oligonucleotide
  Antisense strand to SEQ ID NO: 314098
auagagaugcggcucccgc

SEQ ID NO: 314100 - RNA, 19 nt, Artificial Sequence
  Description of Artificial Sequence: Synthetic oligonucleotide
  Sense strand starting at position 2723 of SEQ ID NO: 4033
uguagagagccuugaguac

SEQ ID NO: 314101 - RNA, 19 nt, Artificial Sequence
  Description of Artificial Sequence: Synthetic oligonucleotide
  Antisense strand to SEQ ID NO: 314100
guacucaaggcucucuaca

SEQ ID NO: 314102 - RNA, 19 nt, Artificial Sequence
  Description of Artificial Sequence: Synthetic oligonucleotide
  Sense strand starting at position 2738 of SEQ ID NO: 4033
guaccaggcugaguuuaua

SEQ ID NO: 314103 - RNA, 19 nt, Artificial Sequence
  Description of Artificial Sequence: Synthetic oligonucleotide
  Antisense strand to SEQ ID NO: 314102
uauaaacucagccugguac

SEQ ID NO: 314104 - RNA, 19 nt, Artificial Sequence
  Description of Artificial Sequence: Synthetic oligonucleotide
  Sense strand starting at position 2821 of SEQ ID NO: 4033
uggagcugaucccuaugau

SEQ ID NO: 314105 - RNA, 19 nt, Artificial Sequence
  Description of Artificial Sequence: Synthetic oligonucleotide
  Antisense strand to SEQ ID NO: 314104
aucauagggaucagcucca

SEQ ID NO: 314106 - RNA, 19 nt, Artificial Sequence
  Description of Artificial Sequence: Synthetic oligonucleotide
  Sense strand starting at position 2822 of SEQ ID NO: 4033
ggagcugaucccuaugaug

SEQ ID NO: 314107 - RNA, 19 nt, Artificial Sequence
  Description of Artificial Sequence: Synthetic oligonucleotide
  Antisense strand to SEQ ID NO: 314106
caucauagggaucagcucc

SEQ ID NO: 314108 - RNA, 19 nt, Artificial Sequence
  Description of Artificial Sequence: Synthetic oligonucleotide
  Sense strand starting at position 2824 of SEQ ID NO: 4033
agcugaucccuaugaugaa

SEQ ID NO: 314109 - RNA, 19 nt, Artificial Sequence
  Description of Artificial Sequence: Synthetic oligonucleotide
  Antisense strand to SEQ ID NO: 314108
uucaucauagggaucagcu

SEQ ID NO: 314110 - RNA, 19 nt, Artificial Sequence
  Description of Artificial Sequence: Synthetic oligonucleotide
  Sense strand starting at position 2927 of SEQ ID NO: 4033
acaguuuaggugggaggua

SEQ ID NO: 314111 - RNA, 19 nt, Artificial Sequence
  Description of Artificial Sequence: Synthetic oligonucleotide
  Antisense strand to SEQ ID NO: 314110
uaccucccaccuaaacugu

SEQ ID NO: 314112 - RNA, 19 nt, Artificial Sequence
  Description of Artificial Sequence: Synthetic oligonucleotide
  Sense strand starting at position 2950 of SEQ ID NO: 4033
aggucuaaacaagacguua

SEQ ID NO: 314113 - RNA, 19 nt, Artificial Sequence
  Description of Artificial Sequence: Synthetic oligonucleotide
  Antisense strand to SEQ ID NO: 314112
uaacgucuuguuuagaccu

SEQ ID NO: 314114 - RNA, 19 nt, Artificial Sequence
  Description of Artificial Sequence: Synthetic oligonucleotide
  Sense strand starting at position 3002 of SEQ ID NO: 4033
ggacauuacucauaacaag

SEQ ID NO: 314115 - RNA, 19 nt, Artificial Sequence
  Description of Artificial Sequence: Synthetic oligonucleotide
  Antisense strand to SEQ ID NO: 314114
cuuguuaugaguaaugucc

SEQ ID NO: 314116 - RNA, 19 nt, Artificial Sequence
  Description of Artificial Sequence: Synthetic oligonucleotide
  Sense strand starting at position 3125 of SEQ ID NO: 4033
auccauuacccugauguga

SEQ ID NO: 314117 - RNA, 19 nt, Artificial Sequence
  Description of Artificial Sequence: Synthetic oligonucleotide
  Antisense strand to SEQ ID NO: 314116
ucacaucaggguaauggau

SEQ ID NO: 314118 - RNA, 19 nt, Artificial Sequence
  Description of Artificial Sequence: Synthetic oligonucleotide
  Sense strand starting at position 3136 of SEQ ID NO: 4033
ugaugugaagccuguuuau

SEQ ID NO: 314119 - RNA, 19 nt, Artificial Sequence
  Description of Artificial Sequence: Synthetic oligonucleotide
  Antisense strand to SEQ ID NO: 314118
auaaacaggcuucacauca

SEQ ID NO: 314120 - RNA, 19 nt, Artificial Sequence
  Description of Artificial Sequence: Synthetic oligonucleotide
  Sense strand starting at position 3139 of SEQ ID NO: 4033
ugugaagccuguuuauaua

SEQ ID NO: 314121 - RNA, 19 nt, Artificial Sequence
  Description of Artificial Sequence: Synthetic oligonucleotide
  Antisense strand to SEQ ID NO: 314120
uauauaaacaggcuucaca

SEQ ID NO: 314122 - RNA, 19 nt, Artificial Sequence
  Description of Artificial Sequence: Synthetic oligonucleotide
  Sense strand starting at position 3182 of SEQ ID NO: 4033
cagacaugguccucuggua

SEQ ID NO: 314123 - RNA, 19 nt, Artificial Sequence
  Description of Artificial Sequence: Synthetic oligonucleotide
  Antisense strand to SEQ ID NO: 314122
uaccagaggaccaugucug

SEQ ID NO: 314124 - RNA, 19 nt, Artificial Sequence
  Description of Artificial Sequence: Synthetic oligonucleotide
  Sense strand starting at position 3300 of SEQ ID NO: 4033
gguauugacccacacagua

SEQ ID NO: 314125 - RNA, 19 nt, Artificial Sequence
  Description of Artificial Sequence: Synthetic oligonucleotide
  Antisense strand to SEQ ID NO: 314124
uacugugugggucaauacc

SEQ ID NO: 314126 - RNA, 19 nt, Artificial Sequence
  Description of Artificial Sequence: Synthetic oligonucleotide
  Sense strand starting at position 202 of SEQ ID NO: 4034
aucuauuucucuguagcuu

SEQ ID NO: 314127 - RNA, 19 nt, Artificial Sequence
  Description of Artificial Sequence: Synthetic oligonucleotide
  Antisense strand to SEQ ID NO: 314126
aagcuacagagaaauagau

SEQ ID NO: 314128 - RNA, 19 nt, Artificial Sequence
  Description of Artificial Sequence: Synthetic oligonucleotide
  Sense strand starting at position 203 of SEQ ID NO: 4034
ucuauuucucuguagcuuu

SEQ ID NO: 314129 - RNA, 19 nt, Artificial Sequence
  Description of Artificial Sequence: Synthetic oligonucleotide
  Antisense strand to SEQ ID NO: 314128
aaagcuacagagaaauaga

SEQ ID NO: 314130 - RNA, 19 nt, Artificial Sequence
  Description of Artificial Sequence: Synthetic oligonucleotide
  Sense strand starting at position 231 of SEQ ID NO: 4034
ggacaagcuucugcuuauu

SEQ ID NO: 314131 - RNA, 19 nt, Artificial Sequence
  Description of Artificial Sequence: Synthetic oligonucleotide
  Antisense strand to SEQ ID NO: 314130
aauaagcagaagcuugucc

SEQ ID NO: 314132 - RNA, 19 nt, Artificial Sequence
  Description of Artificial Sequence: Synthetic oligonucleotide
  Sense strand starting at position 260 of SEQ ID NO: 4034
cuguaacugcuaugauacu

SEQ ID NO: 314133 - RNA, 19 nt, Artificial Sequence
  Description of Artificial Sequence: Synthetic oligonucleotide
  Antisense strand to SEQ ID NO: 314132
aguaucauagcaguuacag

SEQ ID NO: 314134 - RNA, 19 nt, Artificial Sequence
  Description of Artificial Sequence: Synthetic oligonucleotide
  Sense strand starting at position 449 of SEQ ID NO: 4034
agauguccauguccuguaa

SEQ ID NO: 314135 - RNA, 19 nt, Artificial Sequence
  Description of Artificial Sequence: Synthetic oligonucleotide
  Antisense strand to SEQ ID NO: 314134
uuacaggacauggacaucu

SEQ ID NO: 314136 - RNA, 19 nt, Artificial Sequence
  Description of Artificial Sequence: Synthetic oligonucleotide
  Sense strand starting at position 493 of SEQ ID NO: 4034
uguauugcauucuuccaga

SEQ ID NO: 314137 - RNA, 19 nt, Artificial Sequence
  Description of Artificial Sequence: Synthetic oligonucleotide
  Antisense strand to SEQ ID NO: 314136
ucuggaagaaugcaauaca

SEQ ID NO: 314138 - RNA, 19 nt, Artificial Sequence
  Description of Artificial Sequence: Synthetic oligonucleotide
  Sense strand starting at position 622 of SEQ ID NO: 4034
acauuuguaucagauguuu

SEQ ID NO: 314139 - RNA, 19 nt, Artificial Sequence
  Description of Artificial Sequence: Synthetic oligonucleotide
  Antisense strand to SEQ ID NO: 314138
aaacaucugauacaaaugu

SEQ ID NO: 314140 - RNA, 19 nt, Artificial Sequence
  Description of Artificial Sequence: Synthetic oligonucleotide
  Sense strand starting at position 732 of SEQ ID NO: 4034
cagugucaucuguauccuu

SEQ ID NO: 314141 - RNA, 19 nt, Artificial Sequence
  Description of Artificial Sequence: Synthetic oligonucleotide
  Antisense strand to SEQ ID NO: 314140
aaggauacagaugacacug

SEQ ID NO: 314142 - RNA, 19 nt, Artificial Sequence
  Description of Artificial Sequence: Synthetic oligonucleotide
  Sense strand starting at position 940 of SEQ ID NO: 4034
uacugagucuuguccugau

SEQ ID NO: 314143 - RNA, 19 nt, Artificial Sequence
  Description of Artificial Sequence: Synthetic oligonucleotide
  Antisense strand to SEQ ID NO: 314142
aucaggacaagacucagua

SEQ ID NO: 314144 - RNA, 19 nt, Artificial Sequence
  Description of Artificial Sequence: Synthetic oligonucleotide
  Sense strand starting at position 944 of SEQ ID NO: 4034
gagucuuguccugauucuc

SEQ ID NO: 314145 - RNA, 19 nt, Artificial Sequence
  Description of Artificial Sequence: Synthetic oligonucleotide
  Antisense strand to SEQ ID NO: 314144
gagaaucaggacaagacuc

SEQ ID NO: 314146 - RNA, 19 nt, Artificial Sequence
  Description of Artificial Sequence: Synthetic oligonucleotide
  Sense strand starting at position 1017 of SEQ ID NO: 4034
guuccugcauuucuguaaa

SEQ ID NO: 314147 - RNA, 19 nt, Artificial Sequence
  Description of Artificial Sequence: Synthetic oligonucleotide
  Antisense strand to SEQ ID NO: 314146
uuuacagaaaugcaggaac

SEQ ID NO: 314148 - RNA, 19 nt, Artificial Sequence
  Description of Artificial Sequence: Synthetic oligonucleotide
  Sense strand starting at position 2020 of SEQ ID NO: 4034
ggaauuugauucugagagc

SEQ ID NO: 314149 - RNA, 19 nt, Artificial Sequence
  Description of Artificial Sequence: Synthetic oligonucleotide
  Antisense strand to SEQ ID NO: 314148
gcucucagaaucaaauucc

SEQ ID NO: 314150 - RNA, 19 nt, Artificial Sequence
  Description of Artificial Sequence: Synthetic oligonucleotide
  Sense strand starting at position 2021 of SEQ ID NO: 4034
gaauuugauucugagagca

SEQ ID NO: 314151 - RNA, 19 nt, Artificial Sequence
  Description of Artificial Sequence: Synthetic oligonucleotide
  Antisense strand to SEQ ID NO: 314150
ugcucucagaaucaaauuc

SEQ ID NO: 314152 - RNA, 19 nt, Artificial Sequence
  Description of Artificial Sequence: Synthetic oligonucleotide
  Sense strand starting at position 2210 of SEQ ID NO: 4034
gagagcuuucgacauugau

SEQ ID NO: 314153 - RNA, 19 nt, Artificial Sequence
  Description of Artificial Sequence: Synthetic oligonucleotide
  Antisense strand to SEQ ID NO: 314152
aucaaugucgaaagcucuc

SEQ ID NO: 314154 - RNA, 19 nt, Artificial Sequence
  Description of Artificial Sequence: Synthetic oligonucleotide
  Sense strand starting at position 2310 of SEQ ID NO: 4034
gcuacaucucagggaagac

SEQ ID NO: 314155 - RNA, 19 nt, Artificial Sequence
  Description of Artificial Sequence: Synthetic oligonucleotide
  Antisense strand to SEQ ID NO: 314154
gucuucccugagauguagc

SEQ ID NO: 314156 - RNA, 19 nt, Artificial Sequence
  Description of Artificial Sequence: Synthetic oligonucleotide
  Sense strand starting at position 2454 of SEQ ID NO: 4034
ugggccaccugagauauuu

SEQ ID NO: 314157 - RNA, 19 nt, Artificial Sequence
  Description of Artificial Sequence: Synthetic oligonucleotide
  Antisense strand to SEQ ID NO: 314156
aaauaucucagguggccca

SEQ ID NO: 314158 - RNA, 19 nt, Artificial Sequence
  Description of Artificial Sequence: Synthetic oligonucleotide
  Sense strand starting at position 2492 of SEQ ID NO: 4034
guaauaaucucaucaggac

SEQ ID NO: 314159 - RNA, 19 nt, Artificial Sequence
  Description of Artificial Sequence: Synthetic oligonucleotide
  Antisense strand to SEQ ID NO: 314158
guccugaugagauuauuac

SEQ ID NO: 314160 - RNA, 19 nt, Artificial Sequence
  Description of Artificial Sequence: Synthetic oligonucleotide
  Sense strand starting at position 2593 of SEQ ID NO: 4034
acaauauuauuggcuguaa

SEQ ID NO: 314161 - RNA, 19 nt, Artificial Sequence
  Description of Artificial Sequence: Synthetic oligonucleotide
  Antisense strand to SEQ ID NO: 314160
uuacagccaauaauauugu

SEQ ID NO: 314162 - RNA, 19 nt, Artificial Sequence
  Description of Artificial Sequence: Synthetic oligonucleotide
  Sense strand starting at position 2604 of SEQ ID NO: 4034
ggcuguaauuacucugaug

SEQ ID NO: 314163 - RNA, 19 nt, Artificial Sequence
  Description of Artificial Sequence: Synthetic oligonucleotide
  Antisense strand to SEQ ID NO: 314162
caucagaguaauuacagcc

SEQ ID NO: 314164 - RNA, 19 nt, Artificial Sequence
  Description of Artificial Sequence: Synthetic oligonucleotide
  Sense strand starting at position 2606 of SEQ ID NO: 4034
cuguaauuacucugaugug

SEQ ID NO: 314165 - RNA, 19 nt, Artificial Sequence
  Description of Artificial Sequence: Synthetic oligonucleotide
  Antisense strand to SEQ ID NO: 314164
cacaucagaguaauuacag

SEQ ID NO: 314166 - RNA, 19 nt, Artificial Sequence
  Description of Artificial Sequence: Synthetic oligonucleotide
  Sense strand starting at position 2875 of SEQ ID NO: 4034
gaggcaguauguucuauaa

SEQ ID NO: 314167 - RNA, 19 nt, Artificial Sequence
  Description of Artificial Sequence: Synthetic oligonucleotide
  Antisense strand to SEQ ID NO: 314166
uuauagaacauacugccuc

SEQ ID NO: 314168 - RNA, 19 nt, Artificial Sequence
  Description of Artificial Sequence: Synthetic oligonucleotide
  Sense strand starting at position 2938 of SEQ ID NO: 4034
auuaacuauggccgggaaa

SEQ ID NO: 314169 - RNA, 19 nt, Artificial Sequence
  Description of Artificial Sequence: Synthetic oligonucleotide
  Antisense strand to SEQ ID NO: 314168
uuucccggccauaguuaau

SEQ ID NO: 314170 - RNA, 19 nt, Artificial Sequence
  Description of Artificial Sequence: Synthetic oligonucleotide
  Sense strand starting at position 3009 of SEQ ID NO: 4034
gugugaucuaaacagugaa

SEQ ID NO: 314171 - RNA, 19 nt, Artificial Sequence
  Description of Artificial Sequence: Synthetic oligonucleotide
  Antisense strand to SEQ ID NO: 314170
uucacuguuuagaucacac

SEQ ID NO: 314172 - RNA, 19 nt, Artificial Sequence
  Description of Artificial Sequence: Synthetic oligonucleotide
  Sense strand starting at position 3021 of SEQ ID NO: 4034
cagugaauaguacaugcaa

SEQ ID NO: 314173 - RNA, 19 nt, Artificial Sequence
  Description of Artificial Sequence: Synthetic oligonucleotide
  Antisense strand to SEQ ID NO: 314172
uugcauguacuauucacug

SEQ ID NO: 314174 - RNA, 19 nt, Artificial Sequence
  Description of Artificial Sequence: Synthetic oligonucleotide
  Sense strand starting at position 3023 of SEQ ID NO: 4034
gugaauaguacaugcaaag

SEQ ID NO: 314175 - RNA, 19 nt, Artificial Sequence
  Description of Artificial Sequence: Synthetic oligonucleotide
  Antisense strand to SEQ ID NO: 314174
cuuugcauguacuauucac

SEQ ID NO: 314176 - RNA, 19 nt, Artificial Sequence
  Description of Artificial Sequence: Synthetic oligonucleotide
  Sense strand starting at position 3081 of SEQ ID NO: 4034
aaaugaaugccuuguggau

SEQ ID NO: 314177 - RNA, 19 nt, Artificial Sequence
  Description of Artificial Sequence: Synthetic oligonucleotide
  Antisense strand to SEQ ID NO: 314176
auccacaaggcauucauuu

SEQ ID NO: 314178 - RNA, 19 nt, Artificial Sequence
  Description of Artificial Sequence: Synthetic oligonucleotide
  Sense strand starting at position 3087 of SEQ ID NO: 4034
augccuuguggaugagguu

SEQ ID NO: 314179 - RNA, 19 nt, Artificial Sequence
  Description of Artificial Sequence: Synthetic oligonucleotide
  Antisense strand to SEQ ID NO: 314178
aaccucauccacaaggcau

SEQ ID NO: 314180 - RNA, 19 nt, Artificial Sequence
  Description of Artificial Sequence: Synthetic oligonucleotide
  Sense strand starting at position 3172 of SEQ ID NO: 4034
uggaccuuccuaggagauu

SEQ ID NO: 314181 - RNA, 19 nt, Artificial Sequence
  Description of Artificial Sequence: Synthetic oligonucleotide
  Antisense strand to SEQ ID NO: 314180
aaucuccuaggaaggucca

SEQ ID NO: 314182 - RNA, 19 nt, Artificial Sequence
  Description of Artificial Sequence: Synthetic oligonucleotide
  Sense strand starting at position 3185 of SEQ ID NO: 4034
gagauuagagcuugauuaa

SEQ ID NO: 314183 - RNA, 19 nt, Artificial Sequence
  Description of Artificial Sequence: Synthetic oligonucleotide
  Antisense strand to SEQ ID NO: 314182
uuaaucaagcucuaaucuc

SEQ ID NO: 314184 - RNA, 19 nt, Artificial Sequence
  Description of Artificial Sequence: Synthetic oligonucleotide
  Sense strand starting at position 3188 of SEQ ID NO: 4034
auuagagcuugauuaaagu

SEQ ID NO: 314185 - RNA, 19 nt, Artificial Sequence
  Description of Artificial Sequence: Synthetic oligonucleotide
  Antisense strand to SEQ ID NO: 314184
acuuuaaucaagcucuaau

SEQ ID NO: 314186 - RNA, 19 nt, Artificial Sequence
  Description of Artificial Sequence: Synthetic oligonucleotide
  Sense strand starting at position 3275 of SEQ ID NO: 4034
ccuuauacugaggguggaa

SEQ ID NO: 314187 - RNA, 19 nt, Artificial Sequence
  Description of Artificial Sequence: Synthetic oligonucleotide
  Antisense strand to SEQ ID NO: 314186
uuccacccucaguauaagg

SEQ ID NO: 314188 - RNA, 19 nt, Artificial Sequence
  Description of Artificial Sequence: Synthetic oligonucleotide
  Sense strand starting at position 3388 of SEQ ID NO: 4034
ggaaguuuaugugcucuag

SEQ ID NO: 314189 - RNA, 19 nt, Artificial Sequence
  Description of Artificial Sequence: Synthetic oligonucleotide
  Antisense strand to SEQ ID NO: 314188
cuagagcacauaaacuucc

SEQ ID NO: 314190 - RNA, 19 nt, Artificial Sequence
  Description of Artificial Sequence: Synthetic oligonucleotide
  Sense strand starting at position 3390 of SEQ ID NO: 4034
aaguuuaugugcucuagga

SEQ ID NO: 314191 - RNA, 19 nt, Artificial Sequence
  Description of Artificial Sequence: Synthetic oligonucleotide
  Antisense strand to SEQ ID NO: 314190
uccuagagcacauaaacuu

SEQ ID NO: 314192 - RNA, 19 nt, Artificial Sequence
  Description of Artificial Sequence: Synthetic oligonucleotide
  Sense strand starting at position 3392 of SEQ ID NO: 4034
guuuaugugcucuaggauu

SEQ ID NO: 314193 - RNA, 19 nt, Artificial Sequence
  Description of Artificial Sequence: Synthetic oligonucleotide
  Antisense strand to SEQ ID NO: 314192
aauccuagagcacauaaac

SEQ ID NO: 314194 - RNA, 19 nt, Artificial Sequence
  Description of Artificial Sequence: Synthetic oligonucleotide
  Sense strand starting at position 3811 of SEQ ID NO: 4034
ucaucaguguguuuauaaa

SEQ ID NO: 314195 - RNA, 19 nt, Artificial Sequence
  Description of Artificial Sequence: Synthetic oligonucleotide
  Antisense strand to SEQ ID NO: 314194
uuuauaaacacacugauga

SEQ ID NO: 314196 - RNA, 19 nt, Artificial Sequence
  Description of Artificial Sequence: Synthetic oligonucleotide
  Sense strand starting at position 3873 of SEQ ID NO: 4034
ggcuguuuaggccaucuaa

SEQ ID NO: 314197 - RNA, 19 nt, Artificial Sequence
  Description of Artificial Sequence: Synthetic oligonucleotide
  Antisense strand to SEQ ID NO: 314196
uuagauggccuaaacagcc

SEQ ID NO: 314198 - RNA, 19 nt, Artificial Sequence
  Description of Artificial Sequence: Synthetic oligonucleotide
  Sense strand starting at position 3885 of SEQ ID NO: 4034
caucuaaucggccauguua

SEQ ID NO: 314199 - RNA, 19 nt, Artificial Sequence
  Description of Artificial Sequence: Synthetic oligonucleotide
  Antisense strand to SEQ ID NO: 314198
uaacauggccgauuagaug

SEQ ID NO: 314200 - RNA, 19 nt, Artificial Sequence
  Description of Artificial Sequence: Synthetic oligonucleotide
  Sense strand starting at position 3894 of SEQ ID NO: 4034
ggccauguuacugggaaga

SEQ ID NO: 314201 - RNA, 19 nt, Artificial Sequence
  Description of Artificial Sequence: Synthetic oligonucleotide
  Antisense strand to SEQ ID NO: 314200
ucuucccaguaacauggcc

SEQ ID NO: 314202 - RNA, 19 nt, Artificial Sequence
  Description of Artificial Sequence: Synthetic oligonucleotide
  Sense strand starting at position 3905 of SEQ ID NO: 4034
ugggaagauuaagagaauu

SEQ ID NO: 314203 - RNA, 19 nt, Artificial Sequence
  Description of Artificial Sequence: Synthetic oligonucleotide
  Antisense strand to SEQ ID NO: 314202
aauucucuuaaucuuccca

SEQ ID NO: 314204 - RNA, 19 nt, Artificial Sequence
  Description of Artificial Sequence: Synthetic oligonucleotide
  Sense strand starting at position 3970 of SEQ ID NO: 4034
gcagccaagaagugacaua

SEQ ID NO: 314205 - RNA, 19 nt, Artificial Sequence
  Description of Artificial Sequence: Synthetic oligonucleotide
  Antisense strand to SEQ ID NO: 314204
uaugucacuucuuggcugc

SEQ ID NO: 314206 - RNA, 19 nt, Artificial Sequence
  Description of Artificial Sequence: Synthetic oligonucleotide
  Sense strand starting at position 297 of SEQ ID NO: 4036
agaccauaucucuaguucu

SEQ ID NO: 314207 - RNA, 19 nt, Artificial Sequence
  Description of Artificial Sequence: Synthetic oligonucleotide
  Antisense strand to SEQ ID NO: 314206
agaacuagagauauggucu

SEQ ID NO: 314208 - RNA, 19 nt, Artificial Sequence
  Description of Artificial Sequence: Synthetic oligonucleotide
  Sense strand starting at position 330 of SEQ ID NO: 4036
ugucaauugcaacaaguga

SEQ ID NO: 314209 - RNA, 19 nt, Artificial Sequence
  Description of Artificial Sequence: Synthetic oligonucleotide
  Antisense strand to SEQ ID NO: 314208
ucacuuguugcaauugaca

SEQ ID NO: 314210 - RNA, 19 nt, Artificial Sequence
  Description of Artificial Sequence: Synthetic oligonucleotide
  Sense strand starting at position 338 of SEQ ID NO: 4036
gcaacaagugaggauuguu

SEQ ID NO: 314211 - RNA, 19 nt, Artificial Sequence
  Description of Artificial Sequence: Synthetic oligonucleotide
  Antisense strand to SEQ ID NO: 314210
aacaauccucacuuguugc

SEQ ID NO: 314212 - RNA, 19 nt, Artificial Sequence
  Description of Artificial Sequence: Synthetic oligonucleotide
  Sense strand starting at position 383 of SEQ ID NO: 4036
cugccauacaugugaagga

SEQ ID NO: 314213 - RNA, 19 nt, Artificial Sequence
  Description of Artificial Sequence: Synthetic oligonucleotide
  Antisense strand to SEQ ID NO: 314212
uccuucacauguauggcag

SEQ ID NO: 314214 - RNA, 19 nt, Artificial Sequence
  Description of Artificial Sequence: Synthetic oligonucleotide
  Sense strand starting at position 418 of SEQ ID NO: 4036
accugagugcaccauagaa

SEQ ID NO: 314215 - RNA, 19 nt, Artificial Sequence
  Description of Artificial Sequence: Synthetic oligonucleotide
  Antisense strand to SEQ ID NO: 314214
uucuauggugcacucaggu

SEQ ID NO: 314216 - RNA, 19 nt, Artificial Sequence
  Description of Artificial Sequence: Synthetic oligonucleotide
  Sense strand starting at position 420 of SEQ ID NO: 4036
cugagugcaccauagaauu

SEQ ID NO: 314217 - RNA, 19 nt, Artificial Sequence
  Description of Artificial Sequence: Synthetic oligonucleotide
  Antisense strand to SEQ ID NO: 314216
aauucuauggugcacucag

SEQ ID NO: 314218 - RNA, 19 nt, Artificial Sequence
  Description of Artificial Sequence: Synthetic oligonucleotide
  Sense strand starting at position 715 of SEQ ID NO: 4036
cuaaaucagguauguaaua

SEQ ID NO: 314219 - RNA, 19 nt, Artificial Sequence
  Description of Artificial Sequence: Synthetic oligonucleotide
  Antisense strand to SEQ ID NO: 314218
uauuacauaccugauuuag

SEQ ID NO: 314220 - RNA, 19 nt, Artificial Sequence
  Description of Artificial Sequence: Synthetic oligonucleotide
  Sense strand starting at position 1193 of SEQ ID NO: 4036
cuuaccugguuuccagaga

SEQ ID NO: 314221 - RNA, 19 nt, Artificial Sequence
  Description of Artificial Sequence: Synthetic oligonucleotide
  Antisense strand to SEQ ID NO: 314220
ucucuggaaaccagguaag

SEQ ID NO: 314222 - RNA, 19 nt, Artificial Sequence
  Description of Artificial Sequence: Synthetic oligonucleotide
  Sense strand starting at position 1239 of SEQ ID NO: 4036
acaugaaaccauugagcuu

SEQ ID NO: 314223 - RNA, 19 nt, Artificial Sequence
  Description of Artificial Sequence: Synthetic oligonucleotide
  Antisense strand to SEQ ID NO: 314222
aagcucaaugguuucaugu

SEQ ID NO: 314224 - RNA, 19 nt, Artificial Sequence
  Description of Artificial Sequence: Synthetic oligonucleotide
  Sense strand starting at position 1252 of SEQ ID NO: 4036
gagcuuugacgugaacuag

SEQ ID NO: 314225 - RNA, 19 nt, Artificial Sequence
  Description of Artificial Sequence: Synthetic oligonucleotide
  Antisense strand to SEQ ID NO: 314224
cuaguucacgucaaagcuc

SEQ ID NO: 314226 - RNA, 19 nt, Artificial Sequence
  Description of Artificial Sequence: Synthetic oligonucleotide
  Sense strand starting at position 1260 of SEQ ID NO: 4036
acgugaacuagauggaaca

SEQ ID NO: 314227 - RNA, 19 nt, Artificial Sequence
  Description of Artificial Sequence: Synthetic oligonucleotide
  Antisense strand to SEQ ID NO: 314226
uguuccaucuaguucacgu

SEQ ID NO: 314228 - RNA, 19 nt, Artificial Sequence
  Description of Artificial Sequence: Synthetic oligonucleotide
  Sense strand starting at position 1287 of SEQ ID NO: 4036
ugaaauggugccuaucaua

SEQ ID NO: 314229 - RNA, 19 nt, Artificial Sequence
  Description of Artificial Sequence: Synthetic oligonucleotide
  Antisense strand to SEQ ID NO: 314228
uaugauaggcaccauuuca

SEQ ID NO: 314230 - RNA, 19 nt, Artificial Sequence
  Description of Artificial Sequence: Synthetic oligonucleotide
  Sense strand starting at position 1312 of SEQ ID NO: 4036
augugacaagagugcaaau

SEQ ID NO: 314231 - RNA, 19 nt, Artificial Sequence
  Description of Artificial Sequence: Synthetic oligonucleotide
  Antisense strand to SEQ ID NO: 314230
auuugcacucuugucacau

SEQ ID NO: 314232 - RNA, 19 nt, Artificial Sequence
  Description of Artificial Sequence: Synthetic oligonucleotide
  Sense strand starting at position 1375 of SEQ ID NO: 4036
ugucaaucugaauguggau

SEQ ID NO: 314233 - RNA, 19 nt, Artificial Sequence
  Description of Artificial Sequence: Synthetic oligonucleotide
  Antisense strand to SEQ ID NO: 314232
auccacauucagauugaca

SEQ ID NO: 314234 - RNA, 19 nt, Artificial Sequence
  Description of Artificial Sequence: Synthetic oligonucleotide
  Sense strand starting at position 1384 of SEQ ID NO: 4036
gaauguggauucuuggaca

SEQ ID NO: 314235 - RNA, 19 nt, Artificial Sequence
  Description of Artificial Sequence: Synthetic oligonucleotide
  Antisense strand to SEQ ID NO: 314234
uguccaagaauccacauuc

SEQ ID NO: 314236 - RNA, 19 nt, Artificial Sequence
  Description of Artificial Sequence: Synthetic oligonucleotide
  Sense strand starting at position 1603 of SEQ ID NO: 4036
ggcucaguaguacaaauga

SEQ ID NO: 314237 - RNA, 19 nt, Artificial Sequence
  Description of Artificial Sequence: Synthetic oligonucleotide
  Antisense strand to SEQ ID NO: 314236
ucauuuguacuacugagcc

SEQ ID NO: 314238 - RNA, 19 nt, Artificial Sequence
  Description of Artificial Sequence: Synthetic oligonucleotide
  Sense strand starting at position 1846 of SEQ ID NO: 4036
gcauuugagcacuguacga

SEQ ID NO: 314239 - RNA, 19 nt, Artificial Sequence
  Description of Artificial Sequence: Synthetic oligonucleotide
  Antisense strand to SEQ ID NO: 314238
ucguacagugcucaaaugc

SEQ ID NO: 314240 - RNA, 19 nt, Artificial Sequence
  Description of Artificial Sequence: Synthetic oligonucleotide
  Sense strand starting at position 1906 of SEQ ID NO: 4036
ggugcucccgugaaaugug

SEQ ID NO: 314241 - RNA, 19 nt, Artificial Sequence
  Description of Artificial Sequence: Synthetic oligonucleotide
  Antisense strand to SEQ ID NO: 314240
cacauuucacgggagcacc

SEQ ID NO: 314242 - RNA, 19 nt, Artificial Sequence
  Description of Artificial Sequence: Synthetic oligonucleotide
  Sense strand starting at position 1948 of SEQ ID NO: 4036
agugcuucugaacaaauca

SEQ ID NO: 314243 - RNA, 19 nt, Artificial Sequence
  Description of Artificial Sequence: Synthetic oligonucleotide
  Antisense strand to SEQ ID NO: 314242
ugauuuguucagaagcacu

SEQ ID NO: 314244 - RNA, 19 nt, Artificial Sequence
  Description of Artificial Sequence: Synthetic oligonucleotide
  Sense strand starting at position 1973 of SEQ ID NO: 4036
cuguaauugccgcuuagcu

SEQ ID NO: 314245 - RNA, 19 nt, Artificial Sequence
  Description of Artificial Sequence: Synthetic oligonucleotide
  Antisense strand to SEQ ID NO: 314244
agcuaagcggcaauuacag

SEQ ID NO: 314246 - RNA, 19 nt, Artificial Sequence
  Description of Artificial Sequence: Synthetic oligonucleotide
  Sense strand starting at position 1980 of SEQ ID NO: 4036
ugccgcuuagcucuaauua

SEQ ID NO: 314247 - RNA, 19 nt, Artificial Sequence
  Description of Artificial Sequence: Synthetic oligonucleotide
  Antisense strand to SEQ ID NO: 314246
uaauuagagcuaagcggca

SEQ ID NO: 314248 - RNA, 19 nt, Artificial Sequence
  Description of Artificial Sequence: Synthetic oligonucleotide
  Sense strand starting at position 2264 of SEQ ID NO: 4036
cuuauaugucaagggauua

SEQ ID NO: 314249 - RNA, 19 nt, Artificial Sequence
  Description of Artificial Sequence: Synthetic oligonucleotide
  Antisense strand to SEQ ID NO: 314248
uaaucccuugacauauaag

SEQ ID NO: 314250 - RNA, 19 nt, Artificial Sequence
  Description of Artificial Sequence: Synthetic oligonucleotide
  Sense strand starting at position 2333 of SEQ ID NO: 4036
agagaaauguguucucaca

SEQ ID NO: 314251 - RNA, 19 nt, Artificial Sequence
  Description of Artificial Sequence: Synthetic oligonucleotide
  Antisense strand to SEQ ID NO: 314250
ugugagaacacauuucucu

SEQ ID NO: 314252 - RNA, 19 nt, Artificial Sequence
  Description of Artificial Sequence: Synthetic oligonucleotide
  Sense strand starting at position 2341 of SEQ ID NO: 4036
guguucucacaacaaacuu

SEQ ID NO: 314253 - RNA, 19 nt, Artificial Sequence
  Description of Artificial Sequence: Synthetic oligonucleotide
  Antisense strand to SEQ ID NO: 314252
aaguuuguugugagaacac

SEQ ID NO: 314254 - RNA, 19 nt, Artificial Sequence
  Description of Artificial Sequence: Synthetic oligonucleotide
  Sense strand starting at position 2397 of SEQ ID NO: 4036
uucuauuaggccugaagaa

SEQ ID NO: 314255 - RNA, 19 nt, Artificial Sequence
  Description of Artificial Sequence: Synthetic oligonucleotide
  Antisense strand to SEQ ID NO: 314254
uucuucaggccuaauagaa

SEQ ID NO: 314256 - RNA, 19 nt, Artificial Sequence
  Description of Artificial Sequence: Synthetic oligonucleotide
  Sense strand starting at position 2506 of SEQ ID NO: 4036
aauuaauagggacguguau

SEQ ID NO: 314257 - RNA, 19 nt, Artificial Sequence
  Description of Artificial Sequence: Synthetic oligonucleotide
  Antisense strand to SEQ ID NO: 314256
auacacgucccuauuaauu

SEQ ID NO: 314258 - RNA, 19 nt, Artificial Sequence
  Description of Artificial Sequence: Synthetic oligonucleotide
  Sense strand starting at position 2683 of SEQ ID NO: 4036
cugauauauccauguuaca

SEQ ID NO: 314259 - RNA, 19 nt, Artificial Sequence
  Description of Artificial Sequence: Synthetic oligonucleotide
  Antisense strand to SEQ ID NO: 314258
uguaacauggauauaucag

SEQ ID NO: 314260 - RNA, 19 nt, Artificial Sequence
  Description of Artificial Sequence: Synthetic oligonucleotide
  Sense strand starting at position 2749 of SEQ ID NO: 4036
gucauugauacugaugagu

SEQ ID NO: 314261 - RNA, 19 nt, Artificial Sequence
  Description of Artificial Sequence: Synthetic oligonucleotide
  Antisense strand to SEQ ID NO: 314260
acucaucaguaucaaugac

SEQ ID NO: 314262 - RNA, 19 nt, Artificial Sequence
  Description of Artificial Sequence: Synthetic oligonucleotide
  Sense strand starting at position 2800 of SEQ ID NO: 4036
acuugaaaugacugaugcu

SEQ ID NO: 314263 - RNA, 19 nt, Artificial Sequence
  Description of Artificial Sequence: Synthetic oligonucleotide
  Antisense strand to SEQ ID NO: 314262
agcaucagucauuucaagu

SEQ ID NO: 314264 - RNA, 19 nt, Artificial Sequence
  Description of Artificial Sequence: Synthetic oligonucleotide
  Sense strand starting at position 2887 of SEQ ID NO: 4036
acuuuagugacguacagaa

SEQ ID NO: 314265 - RNA, 19 nt, Artificial Sequence
  Description of Artificial Sequence: Synthetic oligonucleotide
  Antisense strand to SEQ ID NO: 314264
uucuguacgucacuaaagu

SEQ ID NO: 314266 - RNA, 19 nt, Artificial Sequence
  Description of Artificial Sequence: Synthetic oligonucleotide
  Sense strand starting at position 3156 of SEQ ID NO: 4036
cugggcauuccuuaugauu

SEQ ID NO: 314267 - RNA, 19 nt, Artificial Sequence
  Description of Artificial Sequence: Synthetic oligonucleotide
  Antisense strand to SEQ ID NO: 314266
aaucauaaggaaugcccag

SEQ ID NO: 314268 - RNA, 19 nt, Artificial Sequence
  Description of Artificial Sequence: Synthetic oligonucleotide
  Sense strand starting at position 3250 of SEQ ID NO: 4036
accucugcucuguagagau

SEQ ID NO: 314269 - RNA, 19 nt, Artificial Sequence
  Description of Artificial Sequence: Synthetic oligonucleotide
  Antisense strand to SEQ ID NO: 314268
aucucuacagagcagaggu

SEQ ID NO: 314270 - RNA, 19 nt, Artificial Sequence
  Description of Artificial Sequence: Synthetic oligonucleotide
  Sense strand starting at position 3252 of SEQ ID NO: 4036
cucugcucuguagagauua

SEQ ID NO: 314271 - RNA, 19 nt, Artificial Sequence
  Description of Artificial Sequence: Synthetic oligonucleotide
  Antisense strand to SEQ ID NO: 314270
uaaucucuacagagcagag

SEQ ID NO: 314272 - RNA, 19 nt, Artificial Sequence
  Description of Artificial Sequence: Synthetic oligonucleotide
  Sense strand starting at position 3260 of SEQ ID NO: 4036
uguagagauuauguugaug

SEQ ID NO: 314273 - RNA, 19 nt, Artificial Sequence
  Description of Artificial Sequence: Synthetic oligonucleotide
  Antisense strand to SEQ ID NO: 314272
caucaacauaaucucuaca

SEQ ID NO: 314274 - RNA, 19 nt, Artificial Sequence
  Description of Artificial Sequence: Synthetic oligonucleotide
  Sense strand starting at position 3335 of SEQ ID NO: 4036
guugaaucaugacugauuc

SEQ ID NO: 314275 - RNA, 19 nt, Artificial Sequence
  Description of Artificial Sequence: Synthetic oligonucleotide
  Antisense strand to SEQ ID NO: 314274
gaaucagucaugauucaac

SEQ ID NO: 314276 - RNA, 19 nt, Artificial Sequence
  Description of Artificial Sequence: Synthetic oligonucleotide
  Sense strand starting at position 3336 of SEQ ID NO: 4036
uugaaucaugacugauucu

SEQ ID NO: 314277 - RNA, 19 nt, Artificial Sequence
  Description of Artificial Sequence: Synthetic oligonucleotide
  Antisense strand to SEQ ID NO: 314276
agaaucagucaugauucaa

SEQ ID NO: 314278 - RNA, 19 nt, Artificial Sequence
  Description of Artificial Sequence: Synthetic oligonucleotide
  Sense strand starting at position 3342 of SEQ ID NO: 4036
caugacugauucuuggagu

SEQ ID NO: 314279 - RNA, 19 nt, Artificial Sequence
  Description of Artificial Sequence: Synthetic oligonucleotide
  Antisense strand to SEQ ID NO: 314278
acuccaagaaucagucaug

SEQ ID NO: 314280 - RNA, 19 nt, Artificial Sequence
  Description of Artificial Sequence: Synthetic oligonucleotide
  Sense strand starting at position 3418 of SEQ ID NO: 4036
ucuuuauuuguacgucuca

SEQ ID NO: 314281 - RNA, 19 nt, Artificial Sequence
  Description of Artificial Sequence: Synthetic oligonucleotide
  Antisense strand to SEQ ID NO: 314280
ugagacguacaaauaaaga

SEQ ID NO: 314282 - RNA, 19 nt, Artificial Sequence
  Description of Artificial Sequence: Synthetic oligonucleotide
  Sense strand starting at position 3618 of SEQ ID NO: 4036
acaugcugauguuugagaa

SEQ ID NO: 314283 - RNA, 19 nt, Artificial Sequence
  Description of Artificial Sequence: Synthetic oligonucleotide
  Antisense strand to SEQ ID NO: 314282
uucucaaacaucagcaugu

SEQ ID NO: 314284 - RNA, 19 nt, Artificial Sequence
  Description of Artificial Sequence: Synthetic oligonucleotide
  Sense strand starting at position 3735 of SEQ ID NO: 4036
uccacagagaggugacauu

SEQ ID NO: 314285 - RNA, 19 nt, Artificial Sequence
  Description of Artificial Sequence: Synthetic oligonucleotide
  Antisense strand to SEQ ID NO: 314284
aaugucaccucucugugga

SEQ ID NO: 314286 - RNA, 19 nt, Artificial Sequence
  Description of Artificial Sequence: Synthetic oligonucleotide
  Sense strand starting at position 107 of SEQ ID NO: 4037
guguacacauuguugaaga

SEQ ID NO: 314287 - RNA, 19 nt, Artificial Sequence
  Description of Artificial Sequence: Synthetic oligonucleotide
  Antisense strand to SEQ ID NO: 314286
ucuucaacaauguguacac

SEQ ID NO: 314288 - RNA, 19 nt, Artificial Sequence
  Description of Artificial Sequence: Synthetic oligonucleotide
  Sense strand starting at position 190 of SEQ ID NO: 4037
auuacauuagagcagaguu

SEQ ID NO: 314289 - RNA, 19 nt, Artificial Sequence
  Description of Artificial Sequence: Synthetic oligonucleotide
  Antisense strand to SEQ ID NO: 314288
aacucugcucuaauguaau

SEQ ID NO: 314290 - RNA, 19 nt, Artificial Sequence
  Description of Artificial Sequence: Synthetic oligonucleotide
  Sense strand starting at position 262 of SEQ ID NO: 4037
ugcuaugcacuguagaaua

SEQ ID NO: 314291 - RNA, 19 nt, Artificial Sequence
  Description of Artificial Sequence: Synthetic oligonucleotide
  Antisense strand to SEQ ID NO: 314290
uauucuacagugcauagca

SEQ ID NO: 314292 - RNA, 19 nt, Artificial Sequence
  Description of Artificial Sequence: Synthetic oligonucleotide
  Sense strand starting at position 264 of SEQ ID NO: 4037
cuaugcacuguagaauauu

SEQ ID NO: 314293 - RNA, 19 nt, Artificial Sequence
  Description of Artificial Sequence: Synthetic oligonucleotide
  Antisense strand to SEQ ID NO: 314292
aauauucuacagugcauag

SEQ ID NO: 314294 - RNA, 19 nt, Artificial Sequence
  Description of Artificial Sequence: Synthetic oligonucleotide
  Sense strand starting at position 267 of SEQ ID NO: 4037
ugcacuguagaauauuaua

SEQ ID NO: 314295 - RNA, 19 nt, Artificial Sequence
  Description of Artificial Sequence: Synthetic oligonucleotide
  Antisense strand to SEQ ID NO: 314294
uauaauauucuacagugca

SEQ ID NO: 314296 - RNA, 19 nt, Artificial Sequence
  Description of Artificial Sequence: Synthetic oligonucleotide
  Sense strand starting at position 556 of SEQ ID NO: 4037
ucacaaaggccugaaaguu

SEQ ID NO: 314297 - RNA, 19 nt, Artificial Sequence
  Description of Artificial Sequence: Synthetic oligonucleotide
  Antisense strand to SEQ ID NO: 314296
aacuuucaggccuuuguga

SEQ ID NO: 314298 - RNA, 19 nt, Artificial Sequence
  Description of Artificial Sequence: Synthetic oligonucleotide
  Sense strand starting at position 622 of SEQ ID NO: 4037
caggaaggccucugagcau

SEQ ID NO: 314299 - RNA, 19 nt, Artificial Sequence
  Description of Artificial Sequence: Synthetic oligonucleotide
  Antisense strand to SEQ ID NO: 314298
augcucagaggccuuccug

SEQ ID NO: 314300 - RNA, 19 nt, Artificial Sequence
  Description of Artificial Sequence: Synthetic oligonucleotide
  Sense strand starting at position 640 of SEQ ID NO: 4037
ugugcaaagacucagaguu

SEQ ID NO: 314301 - RNA, 19 nt, Artificial Sequence
  Description of Artificial Sequence: Synthetic oligonucleotide
  Antisense strand to SEQ ID NO: 314300
aacucugagucuuugcaca

SEQ ID NO: 314302 - RNA, 19 nt, Artificial Sequence
  Description of Artificial Sequence: Synthetic oligonucleotide
  Sense strand starting at position 655 of SEQ ID NO: 4037
aguuuauaaugaguacaac

SEQ ID NO: 314303 - RNA, 19 nt, Artificial Sequence
  Description of Artificial Sequence: Synthetic oligonucleotide
  Antisense strand to SEQ ID NO: 314302
guuguacucauuauaaacu

SEQ ID NO: 314304 - RNA, 19 nt, Artificial Sequence
  Description of Artificial Sequence: Synthetic oligonucleotide
  Sense strand starting at position 684 of SEQ ID NO: 4037
gacuaaagguggcuuagaa

SEQ ID NO: 314305 - RNA, 19 nt, Artificial Sequence
  Description of Artificial Sequence: Synthetic oligonucleotide
  Antisense strand to SEQ ID NO: 314304
uucuaagccaccuuuaguc

SEQ ID NO: 314306 - RNA, 19 nt, Artificial Sequence
  Description of Artificial Sequence: Synthetic oligonucleotide
  Sense strand starting at position 823 of SEQ ID NO: 4037
gggacaaccagguguagau

SEQ ID NO: 314307 - RNA, 19 nt, Artificial Sequence
  Description of Artificial Sequence: Synthetic oligonucleotide
  Antisense strand to SEQ ID NO: 314306
aucuacaccugguuguccc

SEQ ID NO: 314308 - RNA, 19 nt, Artificial Sequence
  Description of Artificial Sequence: Synthetic oligonucleotide
  Sense strand starting at position 923 of SEQ ID NO: 4037
augccauauguauaaauga

SEQ ID NO: 314309 - RNA, 19 nt, Artificial Sequence
  Description of Artificial Sequence: Synthetic oligonucleotide
  Antisense strand to SEQ ID NO: 314308
ucauuuauacauauggcau

SEQ ID NO: 314310 - RNA, 19 nt, Artificial Sequence
  Description of Artificial Sequence: Synthetic oligonucleotide
  Sense strand starting at position 1023 of SEQ ID NO: 4037
cagggcaguccugauguca

SEQ ID NO: 314311 - RNA, 19 nt, Artificial Sequence
  Description of Artificial Sequence: Synthetic oligonucleotide
  Antisense strand to SEQ ID NO: 314310
ugacaucaggacugcccug

SEQ ID NO: 314312 - RNA, 19 nt, Artificial Sequence
  Description of Artificial Sequence: Synthetic oligonucleotide
  Sense strand starting at position 1076 of SEQ ID NO: 4037
uagcauaaaggucaaguaa

SEQ ID NO: 314313 - RNA, 19 nt, Artificial Sequence
  Description of Artificial Sequence: Synthetic oligonucleotide
  Antisense strand to SEQ ID NO: 314312
uuacuugaccuuuaugcua

SEQ ID NO: 314314 - RNA, 19 nt, Artificial Sequence
  Description of Artificial Sequence: Synthetic oligonucleotide
  Sense strand starting at position 1145 of SEQ ID NO: 4037
ugaccuuugccagaaguac

SEQ ID NO: 314315 - RNA, 19 nt, Artificial Sequence
  Description of Artificial Sequence: Synthetic oligonucleotide
  Antisense strand to SEQ ID NO: 314314
guacuucuggcaaagguca

SEQ ID NO: 314316 - RNA, 19 nt, Artificial Sequence
  Description of Artificial Sequence: Synthetic oligonucleotide
  Sense strand starting at position 1154 of SEQ ID NO: 4037
ccagaaguaccuuauuggu

SEQ ID NO: 314317 - RNA, 19 nt, Artificial Sequence
  Description of Artificial Sequence: Synthetic oligonucleotide
  Antisense strand to SEQ ID NO: 314316
accaauaagguacuucugg

SEQ ID NO: 314318 - RNA, 19 nt, Artificial Sequence
  Description of Artificial Sequence: Synthetic oligonucleotide
  Sense strand starting at position 1241 of SEQ ID NO: 4037
caagacauuuggcagaaag

SEQ ID NO: 314319 - RNA, 19 nt, Artificial Sequence
  Description of Artificial Sequence: Synthetic oligonucleotide
  Antisense strand to SEQ ID NO: 314318
cuuucugccaaaugucuug

SEQ ID NO: 314320 - RNA, 19 nt, Artificial Sequence
  Description of Artificial Sequence: Synthetic oligonucleotide
  Sense strand starting at position 1274 of SEQ ID NO: 4037
aaagacagugcuuauggua

SEQ ID NO: 314321 - RNA, 19 nt, Artificial Sequence
  Description of Artificial Sequence: Synthetic oligonucleotide
  Antisense strand to SEQ ID NO: 314320
uaccauaagcacugucuuu

SEQ ID NO: 314322 - RNA, 19 nt, Artificial Sequence
  Description of Artificial Sequence: Synthetic oligonucleotide
  Sense strand starting at position 1300 of SEQ ID NO: 4037
uaacaaaugugcccagagu

SEQ ID NO: 314323 - RNA, 19 nt, Artificial Sequence
  Description of Artificial Sequence: Synthetic oligonucleotide
  Antisense strand to SEQ ID NO: 314322
acucugggcacauuuguua

SEQ ID NO: 314324 - RNA, 19 nt, Artificial Sequence
  Description of Artificial Sequence: Synthetic oligonucleotide
  Sense strand starting at position 1301 of SEQ ID NO: 4037
aacaaaugugcccagagua

SEQ ID NO: 314325 - RNA, 19 nt, Artificial Sequence
  Description of Artificial Sequence: Synthetic oligonucleotide
  Antisense strand to SEQ ID NO: 314324
uacucugggcacauuuguu

SEQ ID NO: 314326 - RNA, 19 nt, Artificial Sequence
  Description of Artificial Sequence: Synthetic oligonucleotide
  Sense strand starting at position 1353 of SEQ ID NO: 4037
agguuauguggauacuguu

SEQ ID NO: 314327 - RNA, 19 nt, Artificial Sequence
  Description of Artificial Sequence: Synthetic oligonucleotide
  Antisense strand to SEQ ID NO: 314326
aacaguauccacauaaccu

SEQ ID NO: 314328 - RNA, 19 nt, Artificial Sequence
  Description of Artificial Sequence: Synthetic oligonucleotide
  Sense strand starting at position 1431 of SEQ ID NO: 4037
cauggaauuucugaaugua

SEQ ID NO: 314329 - RNA, 19 nt, Artificial Sequence
  Description of Artificial Sequence: Synthetic oligonucleotide
  Antisense strand to SEQ ID NO: 314328
uacauucagaaauuccaug

SEQ ID NO: 314330 - RNA, 19 nt, Artificial Sequence
  Description of Artificial Sequence: Synthetic oligonucleotide
  Sense strand starting at position 1511 of SEQ ID NO: 4037
guaccuauuuacuugccua

SEQ ID NO: 314331 - RNA, 19 nt, Artificial Sequence
  Description of Artificial Sequence: Synthetic oligonucleotide
  Antisense strand to SEQ ID NO: 314330
uaggcaaguaaauagguac

SEQ ID NO: 314332 - RNA, 19 nt, Artificial Sequence
  Description of Artificial Sequence: Synthetic oligonucleotide
  Sense strand starting at position 1652 of SEQ ID NO: 4037
gccauuauaucugucaaga

SEQ ID NO: 314333 - RNA, 19 nt, Artificial Sequence
  Description of Artificial Sequence: Synthetic oligonucleotide
  Antisense strand to SEQ ID NO: 314332
ucuugacagauauaauggc

SEQ ID NO: 314334 - RNA, 19 nt, Artificial Sequence
  Description of Artificial Sequence: Synthetic oligonucleotide
  Sense strand starting at position 1741 of SEQ ID NO: 4037
ucuaacagucuuggaauaa

SEQ ID NO: 314335 - RNA, 19 nt, Artificial Sequence
  Description of Artificial Sequence: Synthetic oligonucleotide
  Antisense strand to SEQ ID NO: 314334
uuauuccaagacuguuaga

SEQ ID NO: 314336 - RNA, 19 nt, Artificial Sequence
  Description of Artificial Sequence: Synthetic oligonucleotide
  Sense strand starting at position 1833 of SEQ ID NO: 4037
gugauuugauaggaaucac

SEQ ID NO: 314337 - RNA, 19 nt, Artificial Sequence
  Description of Artificial Sequence: Synthetic oligonucleotide
  Antisense strand to SEQ ID NO: 314336
gugauuccuaucaaaucac

SEQ ID NO: 314338 - RNA, 19 nt, Artificial Sequence
  Description of Artificial Sequence: Synthetic oligonucleotide
  Sense strand starting at position 1918 of SEQ ID NO: 4037
ccauguaccucuguaauag

SEQ ID NO: 314339 - RNA, 19 nt, Artificial Sequence
  Description of Artificial Sequence: Synthetic oligonucleotide
  Antisense strand to SEQ ID NO: 314338
cuauuacagagguacaugg

SEQ ID NO: 314340 - RNA, 19 nt, Artificial Sequence
  Description of Artificial Sequence: Synthetic oligonucleotide
  Sense strand starting at position 1985 of SEQ ID NO: 4037
uugcaagaaugaucucucu

SEQ ID NO: 314341 - RNA, 19 nt, Artificial Sequence
  Description of Artificial Sequence: Synthetic oligonucleotide
  Antisense strand to SEQ ID NO: 314340
agagagaucauucuugcaa

SEQ ID NO: 314342 - RNA, 19 nt, Artificial Sequence
  Description of Artificial Sequence: Synthetic oligonucleotide
  Sense strand starting at position 2432 of SEQ ID NO: 4037
acugucacuuccuugaaga

SEQ ID NO: 314343 - RNA, 19 nt, Artificial Sequence
  Description of Artificial Sequence: Synthetic oligonucleotide
  Antisense strand to SEQ ID NO: 314342
ucuucaaggaagugacagu

SEQ ID NO: 314344 - RNA, 19 nt, Artificial Sequence
  Description of Artificial Sequence: Synthetic oligonucleotide
  Sense strand starting at position 2508 of SEQ ID NO: 4037
guaguaucuguuuaaagga

SEQ ID NO: 314345 - RNA, 19 nt, Artificial Sequence
  Description of Artificial Sequence: Synthetic oligonucleotide
  Antisense strand to SEQ ID NO: 314344
uccuuuaaacagauacuac

SEQ ID NO: 314346 - RNA, 19 nt, Artificial Sequence
  Description of Artificial Sequence: Synthetic oligonucleotide
  Sense strand starting at position 2602 of SEQ ID NO: 4037
ucaucuaaugaguggcuaa

SEQ ID NO: 314347 - RNA, 19 nt, Artificial Sequence
  Description of Artificial Sequence: Synthetic oligonucleotide
  Antisense strand to SEQ ID NO: 314346
uuagccacucauuagauga

SEQ ID NO: 314348 - RNA, 19 nt, Artificial Sequence
  Description of Artificial Sequence: Synthetic oligonucleotide
  Sense strand starting at position 2770 of SEQ ID NO: 4037
guaaauauuuaaugaggag

SEQ ID NO: 314349 - RNA, 19 nt, Artificial Sequence
  Description of Artificial Sequence: Synthetic oligonucleotide
  Antisense strand to SEQ ID NO: 314348
cuccucauuaaauauuuac

SEQ ID NO: 314350 - RNA, 19 nt, Artificial Sequence
  Description of Artificial Sequence: Synthetic oligonucleotide
  Sense strand starting at position 2810 of SEQ ID NO: 4037
aagaaacagugagcuagau

SEQ ID NO: 314351 - RNA, 19 nt, Artificial Sequence
  Description of Artificial Sequence: Synthetic oligonucleotide
  Antisense strand to SEQ ID NO: 314350
aucuagcucacuguuucuu

SEQ ID NO: 314352 - RNA, 19 nt, Artificial Sequence
  Description of Artificial Sequence: Synthetic oligonucleotide
  Sense strand starting at position 2814 of SEQ ID NO: 4037
aacagugagcuagaucauu

SEQ ID NO: 314353 - RNA, 19 nt, Artificial Sequence
  Description of Artificial Sequence: Synthetic oligonucleotide
  Antisense strand to SEQ ID NO: 314352
aaugaucuagcucacuguu

SEQ ID NO: 314354 - RNA, 19 nt, Artificial Sequence
  Description of Artificial Sequence: Synthetic oligonucleotide
  Sense strand starting at position 3208 of SEQ ID NO: 4037
ccugguugaccuuaccaau

SEQ ID NO: 314355 - RNA, 19 nt, Artificial Sequence
  Description of Artificial Sequence: Synthetic oligonucleotide
  Antisense strand to SEQ ID NO: 314354
auugguaaggucaaccagg

SEQ ID NO: 314356 - RNA, 19 nt, Artificial Sequence
  Description of Artificial Sequence: Synthetic oligonucleotide
  Sense strand starting at position 3301 of SEQ ID NO: 4037
acauucuuguuggcagaag

SEQ ID NO: 314357 - RNA, 19 nt, Artificial Sequence
  Description of Artificial Sequence: Synthetic oligonucleotide
  Antisense strand to SEQ ID NO: 314356
cuucugccaacaagaaugu

SEQ ID NO: 314358 - RNA, 19 nt, Artificial Sequence
  Description of Artificial Sequence: Synthetic oligonucleotide
  Sense strand starting at position 3458 of SEQ ID NO: 4037
agaauuaugugacuaagug

SEQ ID NO: 314359 - RNA, 19 nt, Artificial Sequence
  Description of Artificial Sequence: Synthetic oligonucleotide
  Antisense strand to SEQ ID NO: 314358
cacuuagucacauaauucu

SEQ ID NO: 314360 - RNA, 19 nt, Artificial Sequence
  Description of Artificial Sequence: Synthetic oligonucleotide
  Sense strand starting at position 3699 of SEQ ID NO: 4037
ugcagagacuaucucagau

SEQ ID NO: 314361 - RNA, 19 nt, Artificial Sequence
  Description of Artificial Sequence: Synthetic oligonucleotide
  Antisense strand to SEQ ID NO: 314360
aucugagauagucucugca

SEQ ID NO: 314362 - RNA, 19 nt, Artificial Sequence
  Description of Artificial Sequence: Synthetic oligonucleotide
  Sense strand starting at position 3720 of SEQ ID NO: 4037
aggcuaauuucuguuguuu

SEQ ID NO: 314363 - RNA, 19 nt, Artificial Sequence
  Description of Artificial Sequence: Synthetic oligonucleotide
  Antisense strand to SEQ ID NO: 314362
aaacaacagaaauuagccu

SEQ ID NO: 314364 - RNA, 19 nt, Artificial Sequence
  Description of Artificial Sequence: Synthetic oligonucleotide
  Sense strand starting at position 3725 of SEQ ID NO: 4037
aauuucuguuguuuaggua

SEQ ID NO: 314365 - RNA, 19 nt, Artificial Sequence
  Description of Artificial Sequence: Synthetic oligonucleotide
  Antisense strand to SEQ ID NO: 314364
uaccuaaacaacagaaauu

SEQ ID NO: 314366 - RNA, 19 nt, Artificial Sequence
  Description of Artificial Sequence: Synthetic oligonucleotide
  Sense strand starting at position 7 of SEQ ID NO: 4035
ugcauaauauggccaacau

SEQ ID NO: 314367 - RNA, 19 nt, Artificial Sequence
  Description of Artificial Sequence: Synthetic oligonucleotide
  Antisense strand to SEQ ID NO: 314366
auguuggccauauuaugca

SEQ ID NO: 314368 - RNA, 19 nt, Artificial Sequence
  Description of Artificial Sequence: Synthetic oligonucleotide
  Sense strand starting at position 8 of SEQ ID NO: 4035
gcauaauauggccaacauu

SEQ ID NO: 314369 - RNA, 19 nt, Artificial Sequence
  Description of Artificial Sequence: Synthetic oligonucleotide
  Antisense strand to SEQ ID NO: 314368
aauguuggccauauuaugc

SEQ ID NO: 314370 - RNA, 19 nt, Artificial Sequence
  Description of Artificial Sequence: Synthetic oligonucleotide
  Sense strand starting at position 171 of SEQ ID NO: 4035
aaaggaacuugagagaaau

SEQ ID NO: 314371 - RNA, 19 nt, Artificial Sequence
  Description of Artificial Sequence: Synthetic oligonucleotide
  Antisense strand to SEQ ID NO: 314370
auuucucucaaguuccuuu

SEQ ID NO: 314372 - RNA, 19 nt, Artificial Sequence
  Description of Artificial Sequence: Synthetic oligonucleotide
  Sense strand starting at position 220 of SEQ ID NO: 4035
aagguaagagucuauucuu

SEQ ID NO: 314373 - RNA, 19 nt, Artificial Sequence
  Description of Artificial Sequence: Synthetic oligonucleotide
  Antisense strand to SEQ ID NO: 314372
aagaauagacucuuaccuu

SEQ ID NO: 314374 - RNA, 19 nt, Artificial Sequence
  Description of Artificial Sequence: Synthetic oligonucleotide
  Sense strand starting at position 223 of SEQ ID NO: 4035
guaagagucuauucuugag

SEQ ID NO: 314375 - RNA, 19 nt, Artificial Sequence
  Description of Artificial Sequence: Synthetic oligonucleotide
  Antisense strand to SEQ ID NO: 314374
cucaagaauagacucuuac

SEQ ID NO: 314376 - RNA, 19 nt, Artificial Sequence
  Description of Artificial Sequence: Synthetic oligonucleotide
  Sense strand starting at position 230 of SEQ ID NO: 4035
ucuauucuugagggucuaa

SEQ ID NO: 314377 - RNA, 19 nt, Artificial Sequence
  Description of Artificial Sequence: Synthetic oligonucleotide
  Antisense strand to SEQ ID NO: 314376
uuagacccucaagaauaga

SEQ ID NO: 314378 - RNA, 19 nt, Artificial Sequence
  Description of Artificial Sequence: Synthetic oligonucleotide
  Sense strand starting at position 467 of SEQ ID NO: 4035
gggacuugccgagacagau

SEQ ID NO: 314379 - RNA, 19 nt, Artificial Sequence
  Description of Artificial Sequence: Synthetic oligonucleotide
  Antisense strand to SEQ ID NO: 314378
aucugucucggcaaguccc

SEQ ID NO: 314380 - RNA, 19 nt, Artificial Sequence
  Description of Artificial Sequence: Synthetic oligonucleotide
  Sense strand starting at position 940 of SEQ ID NO: 4035
caagcaugaugaucuagua

SEQ ID NO: 314381 - RNA, 19 nt, Artificial Sequence
  Description of Artificial Sequence: Synthetic oligonucleotide
  Antisense strand to SEQ ID NO: 314380
uacuagaucaucaugcuug

SEQ ID NO: 314382 - RNA, 19 nt, Artificial Sequence
  Description of Artificial Sequence: Synthetic oligonucleotide
  Sense strand starting at position 1092 of SEQ ID NO: 4035
gcacacagucguuagaaau

SEQ ID NO: 314383 - RNA, 19 nt, Artificial Sequence
  Description of Artificial Sequence: Synthetic oligonucleotide
  Antisense strand to SEQ ID NO: 314382
auuucuaacgacugugugc

SEQ ID NO: 314384 - RNA, 19 nt, Artificial Sequence
  Description of Artificial Sequence: Synthetic oligonucleotide
  Sense strand starting at position 1120 of SEQ ID NO: 4035
uugguuguccaguacauga

SEQ ID NO: 314385 - RNA, 19 nt, Artificial Sequence
  Description of Artificial Sequence: Synthetic oligonucleotide
  Antisense strand to SEQ ID NO: 314384
ucauguacuggacaaccaa

SEQ ID NO: 314386 - RNA, 19 nt, Artificial Sequence
  Description of Artificial Sequence: Synthetic oligonucleotide
  Sense strand starting at position 1183 of SEQ ID NO: 4035
ugucaacuccaguauguaa

SEQ ID NO: 314387 - RNA, 19 nt, Artificial Sequence
  Description of Artificial Sequence: Synthetic oligonucleotide
  Antisense strand to SEQ ID NO: 314386
uuacauacuggaguugaca

SEQ ID NO: 314388 - RNA, 19 nt, Artificial Sequence
  Description of Artificial Sequence: Synthetic oligonucleotide
  Sense strand starting at position 1194 of SEQ ID NO: 4035
guauguaauccacaucacu

SEQ ID NO: 314389 - RNA, 19 nt, Artificial Sequence
  Description of Artificial Sequence: Synthetic oligonucleotide
  Antisense strand to SEQ ID NO: 314388
agugauguggauuacauac

SEQ ID NO: 314390 - RNA, 19 nt, Artificial Sequence
  Description of Artificial Sequence: Synthetic oligonucleotide
  Sense strand starting at position 1219 of SEQ ID NO: 4035
cuuaguuaucucgaaacau

SEQ ID NO: 314391 - RNA, 19 nt, Artificial Sequence
  Description of Artificial Sequence: Synthetic oligonucleotide
  Antisense strand to SEQ ID NO: 314390
auguuucgagauaacuaag

SEQ ID NO: 314392 - RNA, 19 nt, Artificial Sequence
  Description of Artificial Sequence: Synthetic oligonucleotide
  Sense strand starting at position 1369 of SEQ ID NO: 4035
gcauaauaucacugacuug

SEQ ID NO: 314393 - RNA, 19 nt, Artificial Sequence
  Description of Artificial Sequence: Synthetic oligonucleotide
  Antisense strand to SEQ ID NO: 314392
caagucagugauauuaugc

SEQ ID NO: 314394 - RNA, 19 nt, Artificial Sequence
  Description of Artificial Sequence: Synthetic oligonucleotide
  Sense strand starting at position 1749 of SEQ ID NO: 4035
uccaguaugugaccaggau

SEQ ID NO: 314395 - RNA, 19 nt, Artificial Sequence
  Description of Artificial Sequence: Synthetic oligonucleotide
  Antisense strand to SEQ ID NO: 314394
auccuggucacauacugga

SEQ ID NO: 314396 - RNA, 19 nt, Artificial Sequence
  Description of Artificial Sequence: Synthetic oligonucleotide
  Sense strand starting at position 1801 of SEQ ID NO: 4035
cugauuaucugugugacag

SEQ ID NO: 314397 - RNA, 19 nt, Artificial Sequence
  Description of Artificial Sequence: Synthetic oligonucleotide
  Antisense strand to SEQ ID NO: 314396
cugucacacagauaaucag

SEQ ID NO: 314398 - RNA, 19 nt, Artificial Sequence
  Description of Artificial Sequence: Synthetic oligonucleotide
  Sense strand starting at position 1964 of SEQ ID NO: 4035
auucuauaucuccaugugu

SEQ ID NO: 314399 - RNA, 19 nt, Artificial Sequence
  Description of Artificial Sequence: Synthetic oligonucleotide
  Antisense strand to SEQ ID NO: 314398
acacauggagauauagaau

SEQ ID NO: 314400 - RNA, 19 nt, Artificial Sequence
  Description of Artificial Sequence: Synthetic oligonucleotide
  Sense strand starting at position 2023 of SEQ ID NO: 4035
gauuuaugcugagaaacag

SEQ ID NO: 314401 - RNA, 19 nt, Artificial Sequence
  Description of Artificial Sequence: Synthetic oligonucleotide
  Antisense strand to SEQ ID NO: 314400
cuguuucucagcauaaauc

SEQ ID NO: 314402 - RNA, 19 nt, Artificial Sequence
  Description of Artificial Sequence: Synthetic oligonucleotide
  Sense strand starting at position 2070 of SEQ ID NO: 4035
gaaaucagccacugugauc

SEQ ID NO: 314403 - RNA, 19 nt, Artificial Sequence
  Description of Artificial Sequence: Synthetic oligonucleotide
  Antisense strand to SEQ ID NO: 314402
gaucacaguggcugauuuc

SEQ ID NO: 314404 - RNA, 19 nt, Artificial Sequence
  Description of Artificial Sequence: Synthetic oligonucleotide
  Sense strand starting at position 2119 of SEQ ID NO: 4035
uuaugaaagucuccacaga

SEQ ID NO: 314405 - RNA, 19 nt, Artificial Sequence
  Description of Artificial Sequence: Synthetic oligonucleotide
  Antisense strand to SEQ ID NO: 314404
ucuguggagacuuucauaa

SEQ ID NO: 314406 - RNA, 19 nt, Artificial Sequence
  Description of Artificial Sequence: Synthetic oligonucleotide
  Sense strand starting at position 2235 of SEQ ID NO: 4035
agaaaucaguagucuauau

SEQ ID NO: 314407 - RNA, 19 nt, Artificial Sequence
  Description of Artificial Sequence: Synthetic oligonucleotide
  Antisense strand to SEQ ID NO: 314406
auauagacuacugauuucu

SEQ ID NO: 314408 - RNA, 19 nt, Artificial Sequence
  Description of Artificial Sequence: Synthetic oligonucleotide
  Sense strand starting at position 2247 of SEQ ID NO: 4035
ucuauauuacgaggacuua

SEQ ID NO: 314409 - RNA, 19 nt, Artificial Sequence
  Description of Artificial Sequence: Synthetic oligonucleotide
  Antisense strand to SEQ ID NO: 314408
uaaguccucguaauauaga

SEQ ID NO: 314410 - RNA, 19 nt, Artificial Sequence
  Description of Artificial Sequence: Synthetic oligonucleotide
  Sense strand starting at position 2261 of SEQ ID NO: 4035
acuuauaaaggcugcauaa

SEQ ID NO: 314411 - RNA, 19 nt, Artificial Sequence
  Description of Artificial Sequence: Synthetic oligonucleotide
  Antisense strand to SEQ ID NO: 314410
uuaugcagccuuuauaagu

SEQ ID NO: 314412 - RNA, 19 nt, Artificial Sequence
  Description of Artificial Sequence: Synthetic oligonucleotide
  Sense strand starting at position 2263 of SEQ ID NO: 4035
uuauaaaggcugcauaaau

SEQ ID NO: 314413 - RNA, 19 nt, Artificial Sequence
  Description of Artificial Sequence: Synthetic oligonucleotide
  Antisense strand to SEQ ID NO: 314412
auuuaugcagccuuuauaa

SEQ ID NO: 314414 - RNA, 19 nt, Artificial Sequence
  Description of Artificial Sequence: Synthetic oligonucleotide
  Sense strand starting at position 2300 of SEQ ID NO: 4035
cugggacuucgcuauagac

SEQ ID NO: 314415 - RNA, 19 nt, Artificial Sequence
  Description of Artificial Sequence: Synthetic oligonucleotide
  Antisense strand to SEQ ID NO: 314414
gucuauagcgaagucccag

SEQ ID NO: 314416 - RNA, 19 nt, Artificial Sequence
  Description of Artificial Sequence: Synthetic oligonucleotide
  Sense strand starting at position 2302 of SEQ ID NO: 4035
gggacuucgcuauagacaa

SEQ ID NO: 314417 - RNA, 19 nt, Artificial Sequence
  Description of Artificial Sequence: Synthetic oligonucleotide
  Antisense strand to SEQ ID NO: 314416
uugucuauagcgaaguccc

SEQ ID NO: 314418 - RNA, 19 nt, Artificial Sequence
  Description of Artificial Sequence: Synthetic oligonucleotide
  Sense strand starting at position 2372 of SEQ ID NO: 4035
ugacauagauguccauuaa

SEQ ID NO: 314419 - RNA, 19 nt, Artificial Sequence
  Description of Artificial Sequence: Synthetic oligonucleotide
  Antisense strand to SEQ ID NO: 314418
uuaauggacaucuauguca

SEQ ID NO: 314420 - RNA, 19 nt, Artificial Sequence
  Description of Artificial Sequence: Synthetic oligonucleotide
  Sense strand starting at position 2540 of SEQ ID NO: 4035
aucuauucuguguaacaau

SEQ ID NO: 314421 - RNA, 19 nt, Artificial Sequence
  Description of Artificial Sequence: Synthetic oligonucleotide
  Antisense strand to SEQ ID NO: 314420
auuguuacacagaauagau

SEQ ID NO: 314422 - RNA, 19 nt, Artificial Sequence
  Description of Artificial Sequence: Synthetic oligonucleotide
  Sense strand starting at position 2725 of SEQ ID NO: 4035
uggacaucgucuuuagaag

SEQ ID NO: 314423 - RNA, 19 nt, Artificial Sequence
  Description of Artificial Sequence: Synthetic oligonucleotide
  Antisense strand to SEQ ID NO: 314422
cuucuaaagacgaugucca

SEQ ID NO: 314424 - RNA, 19 nt, Artificial Sequence
  Description of Artificial Sequence: Synthetic oligonucleotide
  Sense strand starting at position 2731 of SEQ ID NO: 4035
ucgucuuuagaagacacaa

SEQ ID NO: 314425 - RNA, 19 nt, Artificial Sequence
  Description of Artificial Sequence: Synthetic oligonucleotide
  Antisense strand to SEQ ID NO: 314424
uugugucuucuaaagacga

SEQ ID NO: 314426 - RNA, 19 nt, Artificial Sequence
  Description of Artificial Sequence: Synthetic oligonucleotide
  Sense strand starting at position 2751 of SEQ ID NO: 4035
gucagaaagcaguauuaga

SEQ ID NO: 314427 - RNA, 19 nt, Artificial Sequence
  Description of Artificial Sequence: Synthetic oligonucleotide
  Antisense strand to SEQ ID NO: 314426
ucuaauacugcuuucugac

SEQ ID NO: 314428 - RNA, 19 nt, Artificial Sequence
  Description of Artificial Sequence: Synthetic oligonucleotide
  Sense strand starting at position 2975 of SEQ ID NO: 4035
uuagguucucauugagacu

SEQ ID NO: 314429 - RNA, 19 nt, Artificial Sequence
  Description of Artificial Sequence: Synthetic oligonucleotide
  Antisense strand to SEQ ID NO: 314428
agucucaaugagaaccuaa

SEQ ID NO: 314430 - RNA, 19 nt, Artificial Sequence
  Description of Artificial Sequence: Synthetic oligonucleotide
  Sense strand starting at position 3102 of SEQ ID NO: 4035
uuuagaagugucuacaaua

SEQ ID NO: 314431 - RNA, 19 nt, Artificial Sequence
  Description of Artificial Sequence: Synthetic oligonucleotide
  Antisense strand to SEQ ID NO: 314430
uauuguagacacuucuaaa

SEQ ID NO: 314432 - RNA, 19 nt, Artificial Sequence
  Description of Artificial Sequence: Synthetic oligonucleotide
  Sense strand starting at position 3165 of SEQ ID NO: 4035
agcauucuggagcaacauu

SEQ ID NO: 314433 - RNA, 19 nt, Artificial Sequence
  Description of Artificial Sequence: Synthetic oligonucleotide
  Antisense strand to SEQ ID NO: 314432
aauguugcuccagaaugcu

SEQ ID NO: 314434 - RNA, 19 nt, Artificial Sequence
  Description of Artificial Sequence: Synthetic oligonucleotide
  Sense strand starting at position 3224 of SEQ ID NO: 4035
auggaaaguugacuccuua

SEQ ID NO: 314435 - RNA, 19 nt, Artificial Sequence
  Description of Artificial Sequence: Synthetic oligonucleotide
  Antisense strand to SEQ ID NO: 314434
uaaggagucaacuuuccau

SEQ ID NO: 314436 - RNA, 19 nt, Artificial Sequence
  Description of Artificial Sequence: Synthetic oligonucleotide
  Sense strand starting at position 3545 of SEQ ID NO: 4035
gagagauuguaugccuaaa

SEQ ID NO: 314437 - RNA, 19 nt, Artificial Sequence
  Description of Artificial Sequence: Synthetic oligonucleotide
  Antisense strand to SEQ ID NO: 314436
uuuaggcauacaaucucuc

SEQ ID NO: 314438 - RNA, 19 nt, Artificial Sequence
  Description of Artificial Sequence: Synthetic oligonucleotide
  Sense strand starting at position 3584 of SEQ ID NO: 4035
acaugaagcucccuaguaa

SEQ ID NO: 314439 - RNA, 19 nt, Artificial Sequence
  Description of Artificial Sequence: Synthetic oligonucleotide
  Antisense strand to SEQ ID NO: 314438
uuacuagggagcuucaugu

SEQ ID NO: 314440 - RNA, 19 nt, Artificial Sequence
  Description of Artificial Sequence: Synthetic oligonucleotide
  Sense strand starting at position 3713 of SEQ ID NO: 4035
aagguaauacucuacguau

SEQ ID NO: 314441 - RNA, 19 nt, Artificial Sequence
  Description of Artificial Sequence: Synthetic oligonucleotide
  Antisense strand to SEQ ID NO: 314440
auacguagaguauuaccuu

SEQ ID NO: 314442 - RNA, 19 nt, Artificial Sequence
  Description of Artificial Sequence: Synthetic oligonucleotide
  Sense strand starting at position 3725 of SEQ ID NO: 4035
uacguaugccaggaauuau

SEQ ID NO: 314443 - RNA, 19 nt, Artificial Sequence
  Description of Artificial Sequence: Synthetic oligonucleotide
  Antisense strand to SEQ ID NO: 314442
auaauuccuggcauacgua

SEQ ID NO: 314444 - RNA, 19 nt, Artificial Sequence
  Description of Artificial Sequence: Synthetic oligonucleotide
  Sense strand starting at position 3976 of SEQ ID NO: 4035
gagauuguggacuguauaa

SEQ ID NO: 314445 - RNA, 19 nt, Artificial Sequence
  Description of Artificial Sequence: Synthetic oligonucleotide
  Antisense strand to SEQ ID NO: 314444
uuauacaguccacaaucuc

SEQ ID NO: 314446 - RNA, 19 nt, Artificial Sequence
  Description of Artificial Sequence: Synthetic oligonucleotide
  Sense strand starting at position 92 of SEQ ID NO: 4038
agcuaucugauuugugguu

SEQ ID NO: 314447 - RNA, 19 nt, Artificial Sequence
  Description of Artificial Sequence: Synthetic oligonucleotide
  Antisense strand to SEQ ID NO: 314446
aaccacaaaucagauagcu

SEQ ID NO: 314448 - RNA, 19 nt, Artificial Sequence
  Description of Artificial Sequence: Synthetic oligonucleotide
  Sense strand starting at position 299 of SEQ ID NO: 4038
auuuaucuguuacagggaa

SEQ ID NO: 314449 - RNA, 19 nt, Artificial Sequence
  Description of Artificial Sequence: Synthetic oligonucleotide
  Antisense strand to SEQ ID NO: 314448
uucccuguaacagauaaau

SEQ ID NO: 314450 - RNA, 19 nt, Artificial Sequence
  Description of Artificial Sequence: Synthetic oligonucleotide
  Sense strand starting at position 440 of SEQ ID NO: 4038
uaagauguagcuuauugac

SEQ ID NO: 314451 - RNA, 19 nt, Artificial Sequence
  Description of Artificial Sequence: Synthetic oligonucleotide
  Antisense strand to SEQ ID NO: 314450
gucaauaagcuacaucuua

SEQ ID NO: 314452 - RNA, 19 nt, Artificial Sequence
  Description of Artificial Sequence: Synthetic oligonucleotide
  Sense strand starting at position 442 of SEQ ID NO: 4038
agauguagcuuauugacuu

SEQ ID NO: 314453 - RNA, 19 nt, Artificial Sequence
  Description of Artificial Sequence: Synthetic oligonucleotide
  Antisense strand to SEQ ID NO: 314452
aagucaauaagcuacaucu

SEQ ID NO: 314454 - RNA, 19 nt, Artificial Sequence
  Description of Artificial Sequence: Synthetic oligonucleotide
  Sense strand starting at position 449 of SEQ ID NO: 4038
gcuuauugacuuuaugaaa

SEQ ID NO: 314455 - RNA, 19 nt, Artificial Sequence
  Description of Artificial Sequence: Synthetic oligonucleotide
  Antisense strand to SEQ ID NO: 314454
uuucauaaagucaauaagc

SEQ ID NO: 314456 - RNA, 19 nt, Artificial Sequence
  Description of Artificial Sequence: Synthetic oligonucleotide
  Sense strand starting at position 632 of SEQ ID NO: 4038
ugugauauuccucagcaaa

SEQ ID NO: 314457 - RNA, 19 nt, Artificial Sequence
  Description of Artificial Sequence: Synthetic oligonucleotide
  Antisense strand to SEQ ID NO: 314456
uuugcugaggaauaucaca

SEQ ID NO: 314458 - RNA, 19 nt, Artificial Sequence
  Description of Artificial Sequence: Synthetic oligonucleotide
  Sense strand starting at position 634 of SEQ ID NO: 4038
ugauauuccucagcaaagc

SEQ ID NO: 314459 - RNA, 19 nt, Artificial Sequence
  Description of Artificial Sequence: Synthetic oligonucleotide
  Antisense strand to SEQ ID NO: 314458
gcuuugcugaggaauauca

SEQ ID NO: 314460 - RNA, 19 nt, Artificial Sequence
  Description of Artificial Sequence: Synthetic oligonucleotide
  Sense strand starting at position 777 of SEQ ID NO: 4038
gggauacuucuuggcaauu

SEQ ID NO: 314461 - RNA, 19 nt, Artificial Sequence
  Description of Artificial Sequence: Synthetic oligonucleotide
  Antisense strand to SEQ ID NO: 314460
aauugccaagaaguauccc

SEQ ID NO: 314462 - RNA, 19 nt, Artificial Sequence
  Description of Artificial Sequence: Synthetic oligonucleotide
  Sense strand starting at position 1179 of SEQ ID NO: 4038
uuucccggucauugagaga

SEQ ID NO: 314463 - RNA, 19 nt, Artificial Sequence
  Description of Artificial Sequence: Synthetic oligonucleotide
  Antisense strand to SEQ ID NO: 314462
ucucucaaugaccgggaaa

SEQ ID NO: 314464 - RNA, 19 nt, Artificial Sequence
  Description of Artificial Sequence: Synthetic oligonucleotide
  Sense strand starting at position 1362 of SEQ ID NO: 4038
cagggacucgcaggaguua

SEQ ID NO: 314465 - RNA, 19 nt, Artificial Sequence
  Description of Artificial Sequence: Synthetic oligonucleotide
  Antisense strand to SEQ ID NO: 314464
uaacuccugcgagucccug

SEQ ID NO: 314466 - RNA, 19 nt, Artificial Sequence
  Description of Artificial Sequence: Synthetic oligonucleotide
  Sense strand starting at position 2030 of SEQ ID NO: 4038
acgguuuacuaagcagaga

SEQ ID NO: 314467 - RNA, 19 nt, Artificial Sequence
  Description of Artificial Sequence: Synthetic oligonucleotide
  Antisense strand to SEQ ID NO: 314466
ucucugcuuaguaaaccgu

SEQ ID NO: 314468 - RNA, 19 nt, Artificial Sequence
  Description of Artificial Sequence: Synthetic oligonucleotide
  Sense strand starting at position 2033 of SEQ ID NO: 4038
guuuacuaagcagagacuu

SEQ ID NO: 314469 - RNA, 19 nt, Artificial Sequence
  Description of Artificial Sequence: Synthetic oligonucleotide
  Antisense strand to SEQ ID NO: 314468
aagucucugcuuaguaaac

SEQ ID NO: 314470 - RNA, 19 nt, Artificial Sequence
  Description of Artificial Sequence: Synthetic oligonucleotide
  Sense strand starting at position 2118 of SEQ ID NO: 4038
gcagcaucgcugccuuaaa

SEQ ID NO: 314471 - RNA, 19 nt, Artificial Sequence
  Description of Artificial Sequence: Synthetic oligonucleotide
  Antisense strand to SEQ ID NO: 314470
uuuaaggcagcgaugcugc

SEQ ID NO: 314472 - RNA, 19 nt, Artificial Sequence
  Description of Artificial Sequence: Synthetic oligonucleotide
  Sense strand starting at position 2232 of SEQ ID NO: 4038
cgaagagauccuuggcaau

SEQ ID NO: 314473 - RNA, 19 nt, Artificial Sequence
  Description of Artificial Sequence: Synthetic oligonucleotide
  Antisense strand to SEQ ID NO: 314472
auugccaaggaucucuucg

SEQ ID NO: 314474 - RNA, 19 nt, Artificial Sequence
  Description of Artificial Sequence: Synthetic oligonucleotide
  Sense strand starting at position 2238 of SEQ ID NO: 4038
gauccuuggcaauggcaga

SEQ ID NO: 314475 - RNA, 19 nt, Artificial Sequence
  Description of Artificial Sequence: Synthetic oligonucleotide
  Antisense strand to SEQ ID NO: 314474
ucugccauugccaaggauc

SEQ ID NO: 314476 - RNA, 19 nt, Artificial Sequence
  Description of Artificial Sequence: Synthetic oligonucleotide
  Sense strand starting at position 2294 of SEQ ID NO: 4038
ggaugcuuccaauauuagu

SEQ ID NO: 314477 - RNA, 19 nt, Artificial Sequence
  Description of Artificial Sequence: Synthetic oligonucleotide
  Antisense strand to SEQ ID NO: 314476
acuaauauuggaagcaucc

SEQ ID NO: 314478 - RNA, 19 nt, Artificial Sequence
  Description of Artificial Sequence: Synthetic oligonucleotide
  Sense strand starting at position 2320 of SEQ ID NO: 4038
gagugaaacucucuucuug

SEQ ID NO: 314479 - RNA, 19 nt, Artificial Sequence
  Description of Artificial Sequence: Synthetic oligonucleotide
  Antisense strand to SEQ ID NO: 314478
caagaagagaguuucacuc

SEQ ID NO: 314480 - RNA, 19 nt, Artificial Sequence
  Description of Artificial Sequence: Synthetic oligonucleotide
  Sense strand starting at position 2322 of SEQ ID NO: 4038
gugaaacucucuucuugga

SEQ ID NO: 314481 - RNA, 19 nt, Artificial Sequence
  Description of Artificial Sequence: Synthetic oligonucleotide
  Antisense strand to SEQ ID NO: 314480
uccaagaagagaguuucac

SEQ ID NO: 314482 - RNA, 19 nt, Artificial Sequence
  Description of Artificial Sequence: Synthetic oligonucleotide
  Sense strand starting at position 2332 of SEQ ID NO: 4038
cuucuuggagaucgucaga

SEQ ID NO: 314483 - RNA, 19 nt, Artificial Sequence
  Description of Artificial Sequence: Synthetic oligonucleotide
  Antisense strand to SEQ ID NO: 314482
ucugacgaucuccaagaag

SEQ ID NO: 314484 - RNA, 19 nt, Artificial Sequence
  Description of Artificial Sequence: Synthetic oligonucleotide
  Sense strand starting at position 2720 of SEQ ID NO: 4038
ugacaagagaguuguguua

SEQ ID NO: 314485 - RNA, 19 nt, Artificial Sequence
  Description of Artificial Sequence: Synthetic oligonucleotide
  Antisense strand to SEQ ID NO: 314484
uaacacaacucucuuguca

SEQ ID NO: 314486 - RNA, 19 nt, Artificial Sequence
  Description of Artificial Sequence: Synthetic oligonucleotide
  Sense strand starting at position 2795 of SEQ ID NO: 4038
gucucagaugauugacacu

SEQ ID NO: 314487 - RNA, 19 nt, Artificial Sequence
  Description of Artificial Sequence: Synthetic oligonucleotide
  Antisense strand to SEQ ID NO: 314486
agugucaaucaucugagac

SEQ ID NO: 314488 - RNA, 19 nt, Artificial Sequence
  Description of Artificial Sequence: Synthetic oligonucleotide
  Sense strand starting at position 2804 of SEQ ID NO: 4038
gauugacacuacguaaaua

SEQ ID NO: 314489 - RNA, 19 nt, Artificial Sequence
  Description of Artificial Sequence: Synthetic oligonucleotide
  Antisense strand to SEQ ID NO: 314488
uauuuacguagugucaauc

SEQ ID NO: 314490 - RNA, 19 nt, Artificial Sequence
  Description of Artificial Sequence: Synthetic oligonucleotide
  Sense strand starting at position 2845 of SEQ ID NO: 4038
ggcauaaucgucuagaaua

SEQ ID NO: 314491 - RNA, 19 nt, Artificial Sequence
  Description of Artificial Sequence: Synthetic oligonucleotide
  Antisense strand to SEQ ID NO: 314490
uauucuagacgauuaugcc

SEQ ID NO: 314492 - RNA, 19 nt, Artificial Sequence
  Description of Artificial Sequence: Synthetic oligonucleotide
  Sense strand starting at position 2984 of SEQ ID NO: 4038
aauguagaguuauugcaag

SEQ ID NO: 314493 - RNA, 19 nt, Artificial Sequence
  Description of Artificial Sequence: Synthetic oligonucleotide
  Antisense strand to SEQ ID NO: 314492
cuugcaauaacucuacauu

SEQ ID NO: 314494 - RNA, 19 nt, Artificial Sequence
  Description of Artificial Sequence: Synthetic oligonucleotide
  Sense strand starting at position 3016 of SEQ ID NO: 4038
gagguaccagcgugagaaa

SEQ ID NO: 314495 - RNA, 19 nt, Artificial Sequence
  Description of Artificial Sequence: Synthetic oligonucleotide
  Antisense strand to SEQ ID NO: 314494
uuucucacgcugguaccuc

SEQ ID NO: 314496 - RNA, 19 nt, Artificial Sequence
  Description of Artificial Sequence: Synthetic oligonucleotide
  Sense strand starting at position 3037 of SEQ ID NO: 4038
gcauaaaucugacuuacag

SEQ ID NO: 314497 - RNA, 19 nt, Artificial Sequence
  Description of Artificial Sequence: Synthetic oligonucleotide
  Antisense strand to SEQ ID NO: 314496
cuguaagucagauuuaugc

SEQ ID NO: 314498 - RNA, 19 nt, Artificial Sequence
  Description of Artificial Sequence: Synthetic oligonucleotide
  Sense strand starting at position 3120 of SEQ ID NO: 4038
acguuuauuggugugcuua

SEQ ID NO: 314499 - RNA, 19 nt, Artificial Sequence
  Description of Artificial Sequence: Synthetic oligonucleotide
  Antisense strand to SEQ ID NO: 314498
uaagcacaccaauaaacgu

SEQ ID NO: 314500 - RNA, 19 nt, Artificial Sequence
  Description of Artificial Sequence: Synthetic oligonucleotide
  Sense strand starting at position 3157 of SEQ ID NO: 4038
auuugaaguugcuacagaa

SEQ ID NO: 314501 - RNA, 19 nt, Artificial Sequence
  Description of Artificial Sequence: Synthetic oligonucleotide
  Antisense strand to SEQ ID NO: 314500
uucuguagcaacuucaaau

SEQ ID NO: 314502 - RNA, 19 nt, Artificial Sequence
  Description of Artificial Sequence: Synthetic oligonucleotide
  Sense strand starting at position 3265 of SEQ ID NO: 4038
ggucucuugucaucaauaa

SEQ ID NO: 314503 - RNA, 19 nt, Artificial Sequence
  Description of Artificial Sequence: Synthetic oligonucleotide
  Antisense strand to SEQ ID NO: 314502
uuauugaugacaagagacc

SEQ ID NO: 314504 - RNA, 19 nt, Artificial Sequence
  Description of Artificial Sequence: Synthetic oligonucleotide
  Sense strand starting at position 3266 of SEQ ID NO: 4038
gucucuugucaucaauaaa

SEQ ID NO: 314505 - RNA, 19 nt, Artificial Sequence
  Description of Artificial Sequence: Synthetic oligonucleotide
  Antisense strand to SEQ ID NO: 314504
uuuauugaugacaagagac

SEQ ID NO: 314506 - RNA, 19 nt, Artificial Sequence
  Description of Artificial Sequence: Synthetic oligonucleotide
  Sense strand starting at position 3269 of SEQ ID NO: 4038
ucuugucaucaauaaaggu

SEQ ID NO: 314507 - RNA, 19 nt, Artificial Sequence
  Description of Artificial Sequence: Synthetic oligonucleotide
  Antisense strand to SEQ ID NO: 314506
accuuuauugaugacaaga

SEQ ID NO: 314508 - RNA, 19 nt, Artificial Sequence
  Description of Artificial Sequence: Synthetic oligonucleotide
  Sense strand starting at position 3315 of SEQ ID NO: 4038
cccugaaggucaguaagau

SEQ ID NO: 314509 - RNA, 19 nt, Artificial Sequence
  Description of Artificial Sequence: Synthetic oligonucleotide
  Antisense strand to SEQ ID NO: 314508
aucuuacugaccuucaggg

SEQ ID NO: 314510 - RNA, 19 nt, Artificial Sequence
  Description of Artificial Sequence: Synthetic oligonucleotide
  Sense strand starting at position 3459 of SEQ ID NO: 4038
agcucagguaaguauugau

SEQ ID NO: 314511 - RNA, 19 nt, Artificial Sequence
  Description of Artificial Sequence: Synthetic oligonucleotide
  Antisense strand to SEQ ID NO: 314510
aucaauacuuaccugagcu

SEQ ID NO: 314512 - RNA, 19 nt, Artificial Sequence
  Description of Artificial Sequence: Synthetic oligonucleotide
  Sense strand starting at position 3473 of SEQ ID NO: 4038
uugauaucuccaggaaucu

SEQ ID NO: 314513 - RNA, 19 nt, Artificial Sequence
  Description of Artificial Sequence: Synthetic oligonucleotide
  Antisense strand to SEQ ID NO: 314512
agauuccuggagauaucaa

SEQ ID NO: 314514 - RNA, 19 nt, Artificial Sequence
  Description of Artificial Sequence: Synthetic oligonucleotide
  Sense strand starting at position 3517 of SEQ ID NO: 4038
cccuuaaagucuccaguca

SEQ ID NO: 314515 - RNA, 19 nt, Artificial Sequence
  Description of Artificial Sequence: Synthetic oligonucleotide
  Antisense strand to SEQ ID NO: 314514
ugacuggagacuuuaaggg

SEQ ID NO: 314516 - RNA, 19 nt, Artificial Sequence
  Description of Artificial Sequence: Synthetic oligonucleotide
  Sense strand starting at position 3518 of SEQ ID NO: 4038
ccuuaaagucuccagucaa

SEQ ID NO: 314517 - RNA, 19 nt, Artificial Sequence
  Description of Artificial Sequence: Synthetic oligonucleotide
  Antisense strand to SEQ ID NO: 314516
uugacuggagacuuuaagg

SEQ ID NO: 314518 - RNA, 19 nt, Artificial Sequence
  Description of Artificial Sequence: Synthetic oligonucleotide
  Sense strand starting at position 3551 of SEQ ID NO: 4038
cuuggaggcaaaugaguaa

SEQ ID NO: 314519 - RNA, 19 nt, Artificial Sequence
  Description of Artificial Sequence: Synthetic oligonucleotide
  Antisense strand to SEQ ID NO: 314518
uuacucauuugccuccaag

SEQ ID NO: 314520 - RNA, 19 nt, Artificial Sequence
  Description of Artificial Sequence: Synthetic oligonucleotide
  Sense strand starting at position 3562 of SEQ ID NO: 4038
augaguaaccucugcagag

SEQ ID NO: 314521 - RNA, 19 nt, Artificial Sequence
  Description of Artificial Sequence: Synthetic oligonucleotide
  Antisense strand to SEQ ID NO: 314520
cucugcagagguuacucau

SEQ ID NO: 314522 - RNA, 19 nt, Artificial Sequence
  Description of Artificial Sequence: Synthetic oligonucleotide
  Sense strand starting at position 3580 of SEQ ID NO: 4038
guggaacaccugugagaag

SEQ ID NO: 314523 - RNA, 19 nt, Artificial Sequence
  Description of Artificial Sequence: Synthetic oligonucleotide
  Antisense strand to SEQ ID NO: 314522
cuucucacagguguuccac

SEQ ID NO: 314524 - RNA, 19 nt, Artificial Sequence
  Description of Artificial Sequence: Synthetic oligonucleotide
  Sense strand starting at position 3717 of SEQ ID NO: 4038
agagaauaauuugaggguu

SEQ ID NO: 314525 - RNA, 19 nt, Artificial Sequence
  Description of Artificial Sequence: Synthetic oligonucleotide
  Antisense strand to SEQ ID NO: 314524
aacccucaaauuauucucu

SEQ ID NO: 314526 - RNA, 19 nt, Artificial Sequence
  Description of Artificial Sequence: Synthetic oligonucleotide
  Sense strand starting at position 231 of SEQ ID NO: 4039
gcuguucucuguucugaaa

SEQ ID NO: 314527 - RNA, 19 nt, Artificial Sequence
  Description of Artificial Sequence: Synthetic oligonucleotide
  Antisense strand to SEQ ID NO: 314526
uuucagaacagagaacagc

SEQ ID NO: 314528 - RNA, 19 nt, Artificial Sequence
  Description of Artificial Sequence: Synthetic oligonucleotide
  Sense strand starting at position 290 of SEQ ID NO: 4039
ucaaguuucuacuuaggag

SEQ ID NO: 314529 - RNA, 19 nt, Artificial Sequence
  Description of Artificial Sequence: Synthetic oligonucleotide
  Antisense strand to SEQ ID NO: 314528
cuccuaaguagaaacuuga

SEQ ID NO: 314530 - RNA, 19 nt, Artificial Sequence
  Description of Artificial Sequence: Synthetic oligonucleotide
  Sense strand starting at position 293 of SEQ ID NO: 4039
aguuucuacuuaggaguga

SEQ ID NO: 314531 - RNA, 19 nt, Artificial Sequence
  Description of Artificial Sequence: Synthetic oligonucleotide
  Antisense strand to SEQ ID NO: 314530
ucacuccuaaguagaaacu

SEQ ID NO: 314532 - RNA, 19 nt, Artificial Sequence
  Description of Artificial Sequence: Synthetic oligonucleotide
  Sense strand starting at position 307 of SEQ ID NO: 4039
agugaccugcucugauaau

SEQ ID NO: 314533 - RNA, 19 nt, Artificial Sequence
  Description of Artificial Sequence: Synthetic oligonucleotide
  Antisense strand to SEQ ID NO: 314532
auuaucagagcaggucacu

SEQ ID NO: 314534 - RNA, 19 nt, Artificial Sequence
  Description of Artificial Sequence: Synthetic oligonucleotide
  Sense strand starting at position 308 of SEQ ID NO: 4039
gugaccugcucugauaauc

SEQ ID NO: 314535 - RNA, 19 nt, Artificial Sequence
  Description of Artificial Sequence: Synthetic oligonucleotide
  Antisense strand to SEQ ID NO: 314534
gauuaucagagcaggucac

SEQ ID NO: 314536 - RNA, 19 nt, Artificial Sequence
  Description of Artificial Sequence: Synthetic oligonucleotide
  Sense strand starting at position 401 of SEQ ID NO: 4039
aaugaacuguguugaccua

SEQ ID NO: 314537 - RNA, 19 nt, Artificial Sequence
  Description of Artificial Sequence: Synthetic oligonucleotide
  Antisense strand to SEQ ID NO: 314536
uaggucaacacaguucauu

SEQ ID NO: 314538 - RNA, 19 nt, Artificial Sequence
  Description of Artificial Sequence: Synthetic oligonucleotide
  Sense strand starting at position 496 of SEQ ID NO: 4039
gcaaacauguaguaaaugu

SEQ ID NO: 314539 - RNA, 19 nt, Artificial Sequence
  Description of Artificial Sequence: Synthetic oligonucleotide
  Antisense strand to SEQ ID NO: 314538
acauuuacuacauguuugc

SEQ ID NO: 314540 - RNA, 19 nt, Artificial Sequence
  Description of Artificial Sequence: Synthetic oligonucleotide
  Sense strand starting at position 503 of SEQ ID NO: 4039
uguaguaaaugucaccuga

SEQ ID NO: 314541 - RNA, 19 nt, Artificial Sequence
  Description of Artificial Sequence: Synthetic oligonucleotide
  Antisense strand to SEQ ID NO: 314540
ucaggugacauuuacuaca

SEQ ID NO: 314542 - RNA, 19 nt, Artificial Sequence
  Description of Artificial Sequence: Synthetic oligonucleotide
  Sense strand starting at position 511 of SEQ ID NO: 4039
augucaccugaaugaauga

SEQ ID NO: 314543 - RNA, 19 nt, Artificial Sequence
  Description of Artificial Sequence: Synthetic oligonucleotide
  Antisense strand to SEQ ID NO: 314542
ucauucauucaggugacau

SEQ ID NO: 314544 - RNA, 19 nt, Artificial Sequence
  Description of Artificial Sequence: Synthetic oligonucleotide
  Sense strand starting at position 539 of SEQ ID NO: 4039
augucuaguuaacaagaau

SEQ ID NO: 314545 - RNA, 19 nt, Artificial Sequence
  Description of Artificial Sequence: Synthetic oligonucleotide
  Antisense strand to SEQ ID NO: 314544
auucuuguuaacuagacau

SEQ ID NO: 314546 - RNA, 19 nt, Artificial Sequence
  Description of Artificial Sequence: Synthetic oligonucleotide
  Sense strand starting at position 647 of SEQ ID NO: 4039
aaggauuucuuacggccau

SEQ ID NO: 314547 - RNA, 19 nt, Artificial Sequence
  Description of Artificial Sequence: Synthetic oligonucleotide
  Antisense strand to SEQ ID NO: 314546
auggccguaagaaauccuu

SEQ ID NO: 314548 - RNA, 19 nt, Artificial Sequence
  Description of Artificial Sequence: Synthetic oligonucleotide
  Sense strand starting at position 648 of SEQ ID NO: 4039
aggauuucuuacggccauu

SEQ ID NO: 314549 - RNA, 19 nt, Artificial Sequence
  Description of Artificial Sequence: Synthetic oligonucleotide
  Antisense strand to SEQ ID NO: 314548
aauggccguaagaaauccu

SEQ ID NO: 314550 - RNA, 19 nt, Artificial Sequence
  Description of Artificial Sequence: Synthetic oligonucleotide
  Sense strand starting at position 692 of SEQ ID NO: 4039
guguauuuaugagcacgaa

SEQ ID NO: 314551 - RNA, 19 nt, Artificial Sequence
  Description of Artificial Sequence: Synthetic oligonucleotide
  Antisense strand to SEQ ID NO: 314550
uucgugcucauaaauacac

SEQ ID NO: 314552 - RNA, 19 nt, Artificial Sequence
  Description of Artificial Sequence: Synthetic oligonucleotide
  Sense strand starting at position 739 of SEQ ID NO: 4039
cacugagucuuugguucca

SEQ ID NO: 314553 - RNA, 19 nt, Artificial Sequence
  Description of Artificial Sequence: Synthetic oligonucleotide
  Antisense strand to SEQ ID NO: 314552
uggaaccaaagacucagug

SEQ ID NO: 314554 - RNA, 19 nt, Artificial Sequence
  Description of Artificial Sequence: Synthetic oligonucleotide
  Sense strand starting at position 741 of SEQ ID NO: 4039
cugagucuuugguuccauu

SEQ ID NO: 314555 - RNA, 19 nt, Artificial Sequence
  Description of Artificial Sequence: Synthetic oligonucleotide
  Antisense strand to SEQ ID NO: 314554
aauggaaccaaagacucag

SEQ ID NO: 314556 - RNA, 19 nt, Artificial Sequence
  Description of Artificial Sequence: Synthetic oligonucleotide
  Sense strand starting at position 857 of SEQ ID NO: 4039
guggcuauuuaacguuagu

SEQ ID NO: 314557 - RNA, 19 nt, Artificial Sequence
  Description of Artificial Sequence: Synthetic oligonucleotide
  Antisense strand to SEQ ID NO: 314556
acuaacguuaaauagccac

SEQ ID NO: 314558 - RNA, 19 nt, Artificial Sequence
  Description of Artificial Sequence: Synthetic oligonucleotide
  Sense strand starting at position 951 of SEQ ID NO: 4039
gcuaguagcuaugauacua

SEQ ID NO: 314559 - RNA, 19 nt, Artificial Sequence
  Description of Artificial Sequence: Synthetic oligonucleotide
  Antisense strand to SEQ ID NO: 314558
uaguaucauagcuacuagc

SEQ ID NO: 314560 - RNA, 19 nt, Artificial Sequence
  Description of Artificial Sequence: Synthetic oligonucleotide
  Sense strand starting at position 963 of SEQ ID NO: 4039
gauacuagacagugcagau

SEQ ID NO: 314561 - RNA, 19 nt, Artificial Sequence
  Description of Artificial Sequence: Synthetic oligonucleotide
  Antisense strand to SEQ ID NO: 314560
aucugcacugucuaguauc

SEQ ID NO: 314562 - RNA, 19 nt, Artificial Sequence
  Description of Artificial Sequence: Synthetic oligonucleotide
  Sense strand starting at position 1134 of SEQ ID NO: 4039
ccggguuaguggcuaugau

SEQ ID NO: 314563 - RNA, 19 nt, Artificial Sequence
  Description of Artificial Sequence: Synthetic oligonucleotide
  Antisense strand to SEQ ID NO: 314562
aucauagccacuaacccgg

SEQ ID NO: 314564 - RNA, 19 nt, Artificial Sequence
  Description of Artificial Sequence: Synthetic oligonucleotide
  Sense strand starting at position 1135 of SEQ ID NO: 4039
cggguuaguggcuaugaua

SEQ ID NO: 314565 - RNA, 19 nt, Artificial Sequence
  Description of Artificial Sequence: Synthetic oligonucleotide
  Antisense strand to SEQ ID NO: 314564
uaucauagccacuaacccg

SEQ ID NO: 314566 - RNA, 19 nt, Artificial Sequence
  Description of Artificial Sequence: Synthetic oligonucleotide
  Sense strand starting at position 1143 of SEQ ID NO: 4039
uggcuaugauacuggacaa

SEQ ID NO: 314567 - RNA, 19 nt, Artificial Sequence
  Description of Artificial Sequence: Synthetic oligonucleotide
  Antisense strand to SEQ ID NO: 314566
uuguccaguaucauagcca

SEQ ID NO: 314568 - RNA, 19 nt, Artificial Sequence
  Description of Artificial Sequence: Synthetic oligonucleotide
  Sense strand starting at position 1144 of SEQ ID NO: 4039
ggcuaugauacuggacaau

SEQ ID NO: 314569 - RNA, 19 nt, Artificial Sequence
  Description of Artificial Sequence: Synthetic oligonucleotide
  Antisense strand to SEQ ID NO: 314568
auuguccaguaucauagcc

SEQ ID NO: 314570 - RNA, 19 nt, Artificial Sequence
  Description of Artificial Sequence: Synthetic oligonucleotide
  Sense strand starting at position 1305 of SEQ ID NO: 4039
cccgaagucuagcaaauca

SEQ ID NO: 314571 - RNA, 19 nt, Artificial Sequence
  Description of Artificial Sequence: Synthetic oligonucleotide
  Antisense strand to SEQ ID NO: 314570
ugauuugcuagacuucggg

SEQ ID NO: 314572 - RNA, 19 nt, Artificial Sequence
  Description of Artificial Sequence: Synthetic oligonucleotide
  Sense strand starting at position 1615 of SEQ ID NO: 4039
augguaauguggcgaggaa

SEQ ID NO: 314573 - RNA, 19 nt, Artificial Sequence
  Description of Artificial Sequence: Synthetic oligonucleotide
  Antisense strand to SEQ ID NO: 314572
uuccucgccacauuaccau

SEQ ID NO: 314574 - RNA, 19 nt, Artificial Sequence
  Description of Artificial Sequence: Synthetic oligonucleotide
  Sense strand starting at position 1616 of SEQ ID NO: 4039
ugguaauguggcgaggaau

SEQ ID NO: 314575 - RNA, 19 nt, Artificial Sequence
  Description of Artificial Sequence: Synthetic oligonucleotide
  Antisense strand to SEQ ID NO: 314574
auuccucgccacauuacca

SEQ ID NO: 314576 - RNA, 19 nt, Artificial Sequence
  Description of Artificial Sequence: Synthetic oligonucleotide
  Sense strand starting at position 1619 of SEQ ID NO: 4039
uaauguggcgaggaauuaa

SEQ ID NO: 314577 - RNA, 19 nt, Artificial Sequence
  Description of Artificial Sequence: Synthetic oligonucleotide
  Antisense strand to SEQ ID NO: 314576
uuaauuccucgccacauua

SEQ ID NO: 314578 - RNA, 19 nt, Artificial Sequence
  Description of Artificial Sequence: Synthetic oligonucleotide
  Sense strand starting at position 1717 of SEQ ID NO: 4039
uacgauggccucugauaaa

SEQ ID NO: 314579 - RNA, 19 nt, Artificial Sequence
  Description of Artificial Sequence: Synthetic oligonucleotide
  Antisense strand to SEQ ID NO: 314578
uuuaucagaggccaucgua

SEQ ID NO: 314580 - RNA, 19 nt, Artificial Sequence
  Description of Artificial Sequence: Synthetic oligonucleotide
  Sense strand starting at position 1768 of SEQ ID NO: 4039
gcguguuccgggcucgaca

SEQ ID NO: 314581 - RNA, 19 nt, Artificial Sequence
  Description of Artificial Sequence: Synthetic oligonucleotide
  Antisense strand to SEQ ID NO: 314580
ugucgagcccggaacacgc

SEQ ID NO: 314582 - RNA, 19 nt, Artificial Sequence
  Description of Artificial Sequence: Synthetic oligonucleotide
  Sense strand starting at position 2009 of SEQ ID NO: 4039
gagcgagucacgugaugag

SEQ ID NO: 314583 - RNA, 19 nt, Artificial Sequence
  Description of Artificial Sequence: Synthetic oligonucleotide
  Antisense strand to SEQ ID NO: 314582
cucaucacgugacucgcuc

SEQ ID NO: 314584 - RNA, 19 nt, Artificial Sequence
  Description of Artificial Sequence: Synthetic oligonucleotide
  Sense strand starting at position 2010 of SEQ ID NO: 4039
agcgagucacgugaugagu

SEQ ID NO: 314585 - RNA, 19 nt, Artificial Sequence
  Description of Artificial Sequence: Synthetic oligonucleotide
  Antisense strand to SEQ ID NO: 314584
acucaucacgugacucgcu

SEQ ID NO: 314586 - RNA, 19 nt, Artificial Sequence
  Description of Artificial Sequence: Synthetic oligonucleotide
  Sense strand starting at position 2012 of SEQ ID NO: 4039
cgagucacgugaugaguca

SEQ ID NO: 314587 - RNA, 19 nt, Artificial Sequence
  Description of Artificial Sequence: Synthetic oligonucleotide
  Antisense strand to SEQ ID NO: 314586
ugacucaucacgugacucg

SEQ ID NO: 314588 - RNA, 19 nt, Artificial Sequence
  Description of Artificial Sequence: Synthetic oligonucleotide
  Sense strand starting at position 2031 of SEQ ID NO: 4039
cccuccgauuccucugaga

SEQ ID NO: 314589 - RNA, 19 nt, Artificial Sequence
  Description of Artificial Sequence: Synthetic oligonucleotide
  Antisense strand to SEQ ID NO: 314588
ucucagaggaaucggaggg

SEQ ID NO: 314590 - RNA, 19 nt, Artificial Sequence
  Description of Artificial Sequence: Synthetic oligonucleotide
  Sense strand starting at position 2033 of SEQ ID NO: 4039
cuccgauuccucugagacc

SEQ ID NO: 314591 - RNA, 19 nt, Artificial Sequence
  Description of Artificial Sequence: Synthetic oligonucleotide
  Antisense strand to SEQ ID NO: 314590
ggucucagaggaaucggag

SEQ ID NO: 314592 - RNA, 19 nt, Artificial Sequence
  Description of Artificial Sequence: Synthetic oligonucleotide
  Sense strand starting at position 2151 of SEQ ID NO: 4039
ggcucucauuccgaaucuu

SEQ ID NO: 314593 - RNA, 19 nt, Artificial Sequence
  Description of Artificial Sequence: Synthetic oligonucleotide
  Antisense strand to SEQ ID NO: 314592
aagauucggaaugagagcc

SEQ ID NO: 314594 - RNA, 19 nt, Artificial Sequence
  Description of Artificial Sequence: Synthetic oligonucleotide
  Sense strand starting at position 2160 of SEQ ID NO: 4039
uccgaaucuuugcacaacu

SEQ ID NO: 314595 - RNA, 19 nt, Artificial Sequence
  Description of Artificial Sequence: Synthetic oligonucleotide
  Antisense strand to SEQ ID NO: 314594
aguugugcaaagauucgga

SEQ ID NO: 314596 - RNA, 19 nt, Artificial Sequence
  Description of Artificial Sequence: Synthetic oligonucleotide
  Sense strand starting at position 229 of SEQ ID NO: 4040
cggguaugucgugucaggu

SEQ ID NO: 314597 - RNA, 19 nt, Artificial Sequence
  Description of Artificial Sequence: Synthetic oligonucleotide
  Antisense strand to SEQ ID NO: 314596
accugacacgacauacccg

SEQ ID NO: 314598 - RNA, 19 nt, Artificial Sequence
  Description of Artificial Sequence: Synthetic oligonucleotide
  Sense strand starting at position 230 of SEQ ID NO: 4040
ggguaugucgugucagguu

SEQ ID NO: 314599 - RNA, 19 nt, Artificial Sequence
  Description of Artificial Sequence: Synthetic oligonucleotide
  Antisense strand to SEQ ID NO: 314598
aaccugacacgacauaccc

SEQ ID NO: 314600 - RNA, 19 nt, Artificial Sequence
  Description of Artificial Sequence: Synthetic oligonucleotide
  Sense strand starting at position 232 of SEQ ID NO: 4040
guaugucgugucagguuga

SEQ ID NO: 314601 - RNA, 19 nt, Artificial Sequence
  Description of Artificial Sequence: Synthetic oligonucleotide
  Antisense strand to SEQ ID NO: 314600
ucaaccugacacgacauac

SEQ ID NO: 314602 - RNA, 19 nt, Artificial Sequence
  Description of Artificial Sequence: Synthetic oligonucleotide
  Sense strand starting at position 235 of SEQ ID NO: 4040
ugucgugucagguugacga

SEQ ID NO: 314603 - RNA, 19 nt, Artificial Sequence
  Description of Artificial Sequence: Synthetic oligonucleotide
  Antisense strand to SEQ ID NO: 314602
ucgucaaccugacacgaca

SEQ ID NO: 314604 - RNA, 19 nt, Artificial Sequence
  Description of Artificial Sequence: Synthetic oligonucleotide
  Sense strand starting at position 604 of SEQ ID NO: 4040
gagucuccuggugaaauag

SEQ ID NO: 314605 - RNA, 19 nt, Artificial Sequence
  Description of Artificial Sequence: Synthetic oligonucleotide
  Antisense strand to SEQ ID NO: 314604
cuauuucaccaggagacuc

SEQ ID NO: 314606 - RNA, 19 nt, Artificial Sequence
  Description of Artificial Sequence: Synthetic oligonucleotide
  Sense strand starting at position 716 of SEQ ID NO: 4040
cuuugaugaucccuuuagu

SEQ ID NO: 314607 - RNA, 19 nt, Artificial Sequence
  Description of Artificial Sequence: Synthetic oligonucleotide
  Antisense strand to SEQ ID NO: 314606
acuaaagggaucaucaaag

SEQ ID NO: 314608 - RNA, 19 nt, Artificial Sequence
  Description of Artificial Sequence: Synthetic oligonucleotide
  Sense strand starting at position 812 of SEQ ID NO: 4040
uaaucuagugaugguagaa

SEQ ID NO: 314609 - RNA, 19 nt, Artificial Sequence
  Description of Artificial Sequence: Synthetic oligonucleotide
  Antisense strand to SEQ ID NO: 314608
uucuaccaucacuagauua

SEQ ID NO: 314610 - RNA, 19 nt, Artificial Sequence
  Description of Artificial Sequence: Synthetic oligonucleotide
  Sense strand starting at position 838 of SEQ ID NO: 4040
guaucuaguuucccucaau

SEQ ID NO: 314611 - RNA, 19 nt, Artificial Sequence
  Description of Artificial Sequence: Synthetic oligonucleotide
  Antisense strand to SEQ ID NO: 314610
auugagggaaacuagauac

SEQ ID NO: 314612 - RNA, 19 nt, Artificial Sequence
  Description of Artificial Sequence: Synthetic oligonucleotide
  Sense strand starting at position 851 of SEQ ID NO: 4040
cucaauggucaaggaucaa

SEQ ID NO: 314613 - RNA, 19 nt, Artificial Sequence
  Description of Artificial Sequence: Synthetic oligonucleotide
  Antisense strand to SEQ ID NO: 314612
uugauccuugaccauugag

SEQ ID NO: 314614 - RNA, 19 nt, Artificial Sequence
  Description of Artificial Sequence: Synthetic oligonucleotide
  Sense strand starting at position 912 of SEQ ID NO: 4040
auuaauucuugagacaaga

SEQ ID NO: 314615 - RNA, 19 nt, Artificial Sequence
  Description of Artificial Sequence: Synthetic oligonucleotide
  Antisense strand to SEQ ID NO: 314614
ucuugucucaagaauuaau

SEQ ID NO: 314616 - RNA, 19 nt, Artificial Sequence
  Description of Artificial Sequence: Synthetic oligonucleotide
  Sense strand starting at position 997 of SEQ ID NO: 4040
uuaguaaggagcugauaua

SEQ ID NO: 314617 - RNA, 19 nt, Artificial Sequence
  Description of Artificial Sequence: Synthetic oligonucleotide
  Antisense strand to SEQ ID NO: 314616
uauaucagcuccuuacuaa

SEQ ID NO: 314618 - RNA, 19 nt, Artificial Sequence
  Description of Artificial Sequence: Synthetic oligonucleotide
  Sense strand starting at position 1083 of SEQ ID NO: 4040
ccacuugccugccuaaaga

SEQ ID NO: 314619 - RNA, 19 nt, Artificial Sequence
  Description of Artificial Sequence: Synthetic oligonucleotide
  Antisense strand to SEQ ID NO: 314618
ucuuuaggcaggcaagugg

SEQ ID NO: 314620 - RNA, 19 nt, Artificial Sequence
  Description of Artificial Sequence: Synthetic oligonucleotide
  Sense strand starting at position 1159 of SEQ ID NO: 4040
uggguagugcagcaaauua

SEQ ID NO: 314621 - RNA, 19 nt, Artificial Sequence
  Description of Artificial Sequence: Synthetic oligonucleotide
  Antisense strand to SEQ ID NO: 314620
uaauuugcugcacuaccca

SEQ ID NO: 314622 - RNA, 19 nt, Artificial Sequence
  Description of Artificial Sequence: Synthetic oligonucleotide
  Sense strand starting at position 1188 of SEQ ID NO: 4040
augcuaagaucacagggaa

SEQ ID NO: 314623 - RNA, 19 nt, Artificial Sequence
  Description of Artificial Sequence: Synthetic oligonucleotide
  Antisense strand to SEQ ID NO: 314622
uucccugugaucuuagcau

SEQ ID NO: 314624 - RNA, 19 nt, Artificial Sequence
  Description of Artificial Sequence: Synthetic oligonucleotide
  Sense strand starting at position 1279 of SEQ ID NO: 4040
ggaguuagauuagaccuaa

SEQ ID NO: 314625 - RNA, 19 nt, Artificial Sequence
  Description of Artificial Sequence: Synthetic oligonucleotide
  Antisense strand to SEQ ID NO: 314624
uuaggucuaaucuaacucc

SEQ ID NO: 314626 - RNA, 19 nt, Artificial Sequence
  Description of Artificial Sequence: Synthetic oligonucleotide
  Sense strand starting at position 1292 of SEQ ID NO: 4040
accuaaauacuggguugaa

SEQ ID NO: 314627 - RNA, 19 nt, Artificial Sequence
  Description of Artificial Sequence: Synthetic oligonucleotide
  Antisense strand to SEQ ID NO: 314626
uucaacccaguauuuaggu

SEQ ID NO: 314628 - RNA, 19 nt, Artificial Sequence
  Description of Artificial Sequence: Synthetic oligonucleotide
  Sense strand starting at position 1293 of SEQ ID NO: 4040
ccuaaauacuggguugaau

SEQ ID NO: 314629 - RNA, 19 nt, Artificial Sequence
  Description of Artificial Sequence: Synthetic oligonucleotide
  Antisense strand to SEQ ID NO: 314628
auucaacccaguauuuagg

SEQ ID NO: 314630 - RNA, 19 nt, Artificial Sequence
  Description of Artificial Sequence: Synthetic oligonucleotide
  Sense strand starting at position 1321 of SEQ ID NO: 4040
agaguuugcuucccugaac

SEQ ID NO: 314631 - RNA, 19 nt, Artificial Sequence
  Description of Artificial Sequence: Synthetic oligonucleotide
  Antisense strand to SEQ ID NO: 314630
guucagggaagcaaacucu

SEQ ID NO: 314632 - RNA, 19 nt, Artificial Sequence
  Description of Artificial Sequence: Synthetic oligonucleotide
  Sense strand starting at position 1514 of SEQ ID NO: 4040
agucaucuagcucaaaugu

SEQ ID NO: 314633 - RNA, 19 nt, Artificial Sequence
  Description of Artificial Sequence: Synthetic oligonucleotide
  Antisense strand to SEQ ID NO: 314632
acauuugagcuagaugacu

SEQ ID NO: 314634 - RNA, 19 nt, Artificial Sequence
  Description of Artificial Sequence: Synthetic oligonucleotide
  Sense strand starting at position 1559 of SEQ ID NO: 4040
aggaaaugguguucuguuc

SEQ ID NO: 314635 - RNA, 19 nt, Artificial Sequence
  Description of Artificial Sequence: Synthetic oligonucleotide
  Antisense strand to SEQ ID NO: 314634
gaacagaacaccauuuccu

SEQ ID NO: 314636 - RNA, 19 nt, Artificial Sequence
  Description of Artificial Sequence: Synthetic oligonucleotide
  Sense strand starting at position 1614 of SEQ ID NO: 4040
ggccgcuaauccuuaacca

SEQ ID NO: 314637 - RNA, 19 nt, Artificial Sequence
  Description of Artificial Sequence: Synthetic oligonucleotide
  Antisense strand to SEQ ID NO: 314636
ugguuaaggauuagcggcc

SEQ ID NO: 314638 - RNA, 19 nt, Artificial Sequence
  Description of Artificial Sequence: Synthetic oligonucleotide
  Sense strand starting at position 1615 of SEQ ID NO: 4040
gccgcuaauccuuaaccaa

SEQ ID NO: 314639 - RNA, 19 nt, Artificial Sequence
  Description of Artificial Sequence: Synthetic oligonucleotide
  Antisense strand to SEQ ID NO: 314638
uugguuaaggauuagcggc

SEQ ID NO: 314640 - RNA, 19 nt, Artificial Sequence
  Description of Artificial Sequence: Synthetic oligonucleotide
  Sense strand starting at position 1670 of SEQ ID NO: 4040
ccaugagcuggucacuguu

SEQ ID NO: 314641 - RNA, 19 nt, Artificial Sequence
  Description of Artificial Sequence: Synthetic oligonucleotide
  Antisense strand to SEQ ID NO: 314640
aacagugaccagcucaugg

SEQ ID NO: 314642 - RNA, 19 nt, Artificial Sequence
  Description of Artificial Sequence: Synthetic oligonucleotide
  Sense strand starting at position 1726 of SEQ ID NO: 4040
uccagauccuggccuagua

SEQ ID NO: 314643 - RNA, 19 nt, Artificial Sequence
  Description of Artificial Sequence: Synthetic oligonucleotide
  Antisense strand to SEQ ID NO: 314642
uacuaggccaggaucugga

SEQ ID NO: 314644 - RNA, 19 nt, Artificial Sequence
  Description of Artificial Sequence: Synthetic oligonucleotide
  Sense strand starting at position 1824 of SEQ ID NO: 4040
uguggauucucccucagga

SEQ ID NO: 314645 - RNA, 19 nt, Artificial Sequence
  Description of Artificial Sequence: Synthetic oligonucleotide
  Antisense strand to SEQ ID NO: 314644
uccugagggagaauccaca

SEQ ID NO: 314646 - RNA, 19 nt, Artificial Sequence
  Description of Artificial Sequence: Synthetic oligonucleotide
  Sense strand starting at position 2402 of SEQ ID NO: 4040
gcgugaccgggaagugauu

SEQ ID NO: 314647 - RNA, 19 nt, Artificial Sequence
  Description of Artificial Sequence: Synthetic oligonucleotide
  Antisense strand to SEQ ID NO: 314646
aaucacuucccggucacgc

SEQ ID NO: 314648 - RNA, 19 nt, Artificial Sequence
  Description of Artificial Sequence: Synthetic oligonucleotide
  Sense strand starting at position 2738 of SEQ ID NO: 4040
ggacacgaugcguacgauu

SEQ ID NO: 314649 - RNA, 19 nt, Artificial Sequence
  Description of Artificial Sequence: Synthetic oligonucleotide
  Antisense strand to SEQ ID NO: 314648
aaucguacgcaucgugucc

SEQ ID NO: 314650 - RNA, 19 nt, Artificial Sequence
  Description of Artificial Sequence: Synthetic oligonucleotide
  Sense strand starting at position 2743 of SEQ ID NO: 4040
cgaugcguacgauuagguu

SEQ ID NO: 314651 - RNA, 19 nt, Artificial Sequence
  Description of Artificial Sequence: Synthetic oligonucleotide
  Antisense strand to SEQ ID NO: 314650
aaccuaaucguacgcaucg

SEQ ID NO: 314652 - RNA, 19 nt, Artificial Sequence
  Description of Artificial Sequence: Synthetic oligonucleotide
  Sense strand starting at position 2761 of SEQ ID NO: 4040
uuuggccuuuagucugaaa

SEQ ID NO: 314653 - RNA, 19 nt, Artificial Sequence
  Description of Artificial Sequence: Synthetic oligonucleotide
  Antisense strand to SEQ ID NO: 314652
uuucagacuaaaggccaaa

SEQ ID NO: 314654 - RNA, 19 nt, Artificial Sequence
  Description of Artificial Sequence: Synthetic oligonucleotide
  Sense strand starting at position 2784 of SEQ ID NO: 4040
guugauugaaaguguacaa

SEQ ID NO: 314655 - RNA, 19 nt, Artificial Sequence
  Description of Artificial Sequence: Synthetic oligonucleotide
  Antisense strand to SEQ ID NO: 314654
uuguacacuuucaaucaac

SEQ ID NO: 314656 - RNA, 19 nt, Artificial Sequence
  Description of Artificial Sequence: Synthetic oligonucleotide
  Sense strand starting at position 3216 of SEQ ID NO: 4040
gagagcaccuccucuaguu

SEQ ID NO: 314657 - RNA, 19 nt, Artificial Sequence
  Description of Artificial Sequence: Synthetic oligonucleotide
  Antisense strand to SEQ ID NO: 314656
aacuagaggaggugcucuc

SEQ ID NO: 314658 - RNA, 19 nt, Artificial Sequence
  Description of Artificial Sequence: Synthetic oligonucleotide
  Sense strand starting at position 3253 of SEQ ID NO: 4040
gcuggagcucugcuguguu

SEQ ID NO: 314659 - RNA, 19 nt, Artificial Sequence
  Description of Artificial Sequence: Synthetic oligonucleotide
  Antisense strand to SEQ ID NO: 314658
aacacagcagagcuccagc

SEQ ID NO: 314660 - RNA, 19 nt, Artificial Sequence
  Description of Artificial Sequence: Synthetic oligonucleotide
  Sense strand starting at position 3401 of SEQ ID NO: 4040
acaccuugccaggaaucua

SEQ ID NO: 314661 - RNA, 19 nt, Artificial Sequence
  Description of Artificial Sequence: Synthetic oligonucleotide
  Antisense strand to SEQ ID NO: 314660
uagauuccuggcaaggugu

SEQ ID NO: 314662 - RNA, 19 nt, Artificial Sequence
  Description of Artificial Sequence: Synthetic oligonucleotide
  Sense strand starting at position 3518 of SEQ ID NO: 4040
aggcuaagucagggaaaug

SEQ ID NO: 314663 - RNA, 19 nt, Artificial Sequence
  Description of Artificial Sequence: Synthetic oligonucleotide
  Antisense strand to SEQ ID NO: 314662
cauuucccugacuuagccu

SEQ ID NO: 314664 - RNA, 19 nt, Artificial Sequence
  Description of Artificial Sequence: Synthetic oligonucleotide
  Sense strand starting at position 3604 of SEQ ID NO: 4040
gccgacuuagcucagauua

SEQ ID NO: 314665 - RNA, 19 nt, Artificial Sequence
  Description of Artificial Sequence: Synthetic oligonucleotide
  Antisense strand to SEQ ID NO: 314664
uaaucugagcuaagucggc

SEQ ID NO: 314666 - RNA, 19 nt, Artificial Sequence
  Description of Artificial Sequence: Synthetic oligonucleotide
  Sense strand starting at position 3730 of SEQ ID NO: 4040
cuggcugaucuuugauuga

SEQ ID NO: 314667 - RNA, 19 nt, Artificial Sequence
  Description of Artificial Sequence: Synthetic oligonucleotide
  Antisense strand to SEQ ID NO: 314666
ucaaucaaagaucagccag

SEQ ID NO: 314668 - RNA, 19 nt, Artificial Sequence
  Description of Artificial Sequence: Synthetic oligonucleotide
  Sense strand starting at position 3733 of SEQ ID NO: 4040
gcugaucuuugauugaaug

SEQ ID NO: 314669 - RNA, 19 nt, Artificial Sequence
  Description of Artificial Sequence: Synthetic oligonucleotide
  Antisense strand to SEQ ID NO: 314668
cauucaaucaaagaucagc

SEQ ID NO: 314670 - RNA, 19 nt, Artificial Sequence
  Description of Artificial Sequence: Synthetic oligonucleotide
  Sense strand starting at position 3734 of SEQ ID NO: 4040
cugaucuuugauugaauga

SEQ ID NO: 314671 - RNA, 19 nt, Artificial Sequence
  Description of Artificial Sequence: Synthetic oligonucleotide
  Antisense strand to SEQ ID NO: 314670
ucauucaaucaaagaucag

SEQ ID NO: 314672 - RNA, 19 nt, Artificial Sequence
  Description of Artificial Sequence: Synthetic oligonucleotide
  Sense strand starting at position 3858 of SEQ ID NO: 4040
ggcccaggccaguguaaau

SEQ ID NO: 314673 - RNA, 19 nt, Artificial Sequence
  Description of Artificial Sequence: Synthetic oligonucleotide
  Antisense strand to SEQ ID NO: 314672
auuuacacuggccugggcc

SEQ ID NO: 314674 - RNA, 19 nt, Artificial Sequence
  Description of Artificial Sequence: Synthetic oligonucleotide
  Sense strand starting at position 3969 of SEQ ID NO: 4040
ugaguccuauaagagaaga

SEQ ID NO: 314675 - RNA, 19 nt, Artificial Sequence
  Description of Artificial Sequence: Synthetic oligonucleotide
  Antisense strand to SEQ ID NO: 314674
ucuucucuuauaggacuca

SEQ ID NO: 314676 - RNA, 19 nt, Artificial Sequence
  Description of Artificial Sequence: Synthetic oligonucleotide
  Sense strand starting at position 304 of SEQ ID NO: 4041
gagucuccuggugaaauag

SEQ ID NO: 314677 - RNA, 19 nt, Artificial Sequence
  Description of Artificial Sequence: Synthetic oligonucleotide
  Antisense strand to SEQ ID NO: 314676
cuauuucaccaggagacuc

SEQ ID NO: 314678 - RNA, 19 nt, Artificial Sequence
  Description of Artificial Sequence: Synthetic oligonucleotide
  Sense strand starting at position 416 of SEQ ID NO: 4041
cuuugaugaucccuuuagu

SEQ ID NO: 314679 - RNA, 19 nt, Artificial Sequence
  Description of Artificial Sequence: Synthetic oligonucleotide
  Antisense strand to SEQ ID NO: 314678
acuaaagggaucaucaaag

SEQ ID NO: 314680 - RNA, 19 nt, Artificial Sequence
  Description of Artificial Sequence: Synthetic oligonucleotide
  Sense strand starting at position 512 of SEQ ID NO: 4041
uaaucuagugaugguagaa

SEQ ID NO: 314681 - RNA, 19 nt, Artificial Sequence
  Description of Artificial Sequence: Synthetic oligonucleotide
  Antisense strand to SEQ ID NO: 314680
uucuaccaucacuagauua

SEQ ID NO: 314682 - RNA, 19 nt, Artificial Sequence
  Description of Artificial Sequence: Synthetic oligonucleotide
  Sense strand starting at position 538 of SEQ ID NO: 4041
guaucuaguuucccucaau

SEQ ID NO: 314683 - RNA, 19 nt, Artificial Sequence
  Description of Artificial Sequence: Synthetic oligonucleotide
  Antisense strand to SEQ ID NO: 314682
auugagggaaacuagauac

SEQ ID NO: 314684 - RNA, 19 nt, Artificial Sequence
  Description of Artificial Sequence: Synthetic oligonucleotide
  Sense strand starting at position 551 of SEQ ID NO: 4041
cucaauggucaaggaucaa

SEQ ID NO: 314685 - RNA, 19 nt, Artificial Sequence
  Description of Artificial Sequence: Synthetic oligonucleotide
  Antisense strand to SEQ ID NO: 314684
uugauccuugaccauugag

SEQ ID NO: 314686 - RNA, 19 nt, Artificial Sequence
  Description of Artificial Sequence: Synthetic oligonucleotide
  Sense strand starting at position 612 of SEQ ID NO: 4041
auuaauucuugagacaaga

SEQ ID NO: 314687 - RNA, 19 nt, Artificial Sequence
  Description of Artificial Sequence: Synthetic oligonucleotide
  Antisense strand to SEQ ID NO: 314686
ucuugucucaagaauuaau

SEQ ID NO: 314688 - RNA, 19 nt, Artificial Sequence
  Description of Artificial Sequence: Synthetic oligonucleotide
  Sense strand starting at position 697 of SEQ ID NO: 4041
uuaguaaggagcugauaua

SEQ ID NO: 314689 - RNA, 19 nt, Artificial Sequence
  Description of Artificial Sequence: Synthetic oligonucleotide
  Antisense strand to SEQ ID NO: 314688
uauaucagcuccuuacuaa

SEQ ID NO: 314690 - RNA, 19 nt, Artificial Sequence
  Description of Artificial Sequence: Synthetic oligonucleotide
  Sense strand starting at position 783 of SEQ ID NO: 4041
ccacuugccugccuaaaga

SEQ ID NO: 314691 - RNA, 19 nt, Artificial Sequence
  Description of Artificial Sequence: Synthetic oligonucleotide
  Antisense strand to SEQ ID NO: 314690
ucuuuaggcaggcaagugg

SEQ ID NO: 314692 - RNA, 19 nt, Artificial Sequence
  Description of Artificial Sequence: Synthetic oligonucleotide
  Sense strand starting at position 859 of SEQ ID NO: 4041
uggguagugcagcaaauua

SEQ ID NO: 314693 - RNA, 19 nt, Artificial Sequence
  Description of Artificial Sequence: Synthetic oligonucleotide
  Antisense strand to SEQ ID NO: 314692
uaauuugcugcacuaccca

SEQ ID NO: 314694 - RNA, 19 nt, Artificial Sequence
  Description of Artificial Sequence: Synthetic oligonucleotide
  Sense strand starting at position 888 of SEQ ID NO: 4041
augcuaagaucacagggaa

SEQ ID NO: 314695 - RNA, 19 nt, Artificial Sequence
  Description of Artificial Sequence: Synthetic oligonucleotide
  Antisense strand to SEQ ID NO: 314694
uucccugugaucuuagcau

SEQ ID NO: 314696 - RNA, 19 nt, Artificial Sequence
  Description of Artificial Sequence: Synthetic oligonucleotide
  Sense strand starting at position 992 of SEQ ID NO: 4041
accuaaauacuggguugaa

SEQ ID NO: 314697 - RNA, 19 nt, Artificial Sequence
  Description of Artificial Sequence: Synthetic oligonucleotide
  Antisense strand to SEQ ID NO: 314696
uucaacccaguauuuaggu

SEQ ID NO: 314698 - RNA, 19 nt, Artificial Sequence
  Description of Artificial Sequence: Synthetic oligonucleotide
  Sense strand starting at position 993 of SEQ ID NO: 4041
ccuaaauacuggguugaau

SEQ ID NO: 314699 - RNA, 19 nt, Artificial Sequence
  Description of Artificial Sequence: Synthetic oligonucleotide
  Antisense strand to SEQ ID NO: 314698
auucaacccaguauuuagg

SEQ ID NO: 314700 - RNA, 19 nt, Artificial Sequence
  Description of Artificial Sequence: Synthetic oligonucleotide
  Sense strand starting at position 1021 of SEQ ID NO: 4041
agaguuugcuucccugaac

SEQ ID NO: 314701 - RNA, 19 nt, Artificial Sequence
  Description of Artificial Sequence: Synthetic oligonucleotide
  Antisense strand to SEQ ID NO: 314700
guucagggaagcaaacucu

SEQ ID NO: 314702 - RNA, 19 nt, Artificial Sequence
  Description of Artificial Sequence: Synthetic oligonucleotide
  Sense strand starting at position 1214 of SEQ ID NO: 4041
agucaucuagcucaaaugu

SEQ ID NO: 314703 - RNA, 19 nt, Artificial Sequence
  Description of Artificial Sequence: Synthetic oligonucleotide
  Antisense strand to SEQ ID NO: 314702
acauuugagcuagaugacu

SEQ ID NO: 314704 - RNA, 19 nt, Artificial Sequence
  Description of Artificial Sequence: Synthetic oligonucleotide
  Sense strand starting at position 1259 of SEQ ID NO: 4041
aggaaaugguguucuguuc

SEQ ID NO: 314705 - RNA, 19 nt, Artificial Sequence
  Description of Artificial Sequence: Synthetic oligonucleotide
  Antisense strand to SEQ ID NO: 314704
gaacagaacaccauuuccu

SEQ ID NO: 314706 - RNA, 19 nt, Artificial Sequence
  Description of Artificial Sequence: Synthetic oligonucleotide
  Sense strand starting at position 1315 of SEQ ID NO: 4041
gccgcuaauccuuaaccaa

SEQ ID NO: 314707 - RNA, 19 nt, Artificial Sequence
  Description of Artificial Sequence: Synthetic oligonucleotide
  Antisense strand to SEQ ID NO: 314706
uugguuaaggauuagcggc

SEQ ID NO: 314708 - RNA, 19 nt, Artificial Sequence
  Description of Artificial Sequence: Synthetic oligonucleotide
  Sense strand starting at position 1370 of SEQ ID NO: 4041
ccaugagcuggucacuguu

SEQ ID NO: 314709 - RNA, 19 nt, Artificial Sequence
  Description of Artificial Sequence: Synthetic oligonucleotide
  Antisense strand to SEQ ID NO: 314708
aacagugaccagcucaugg

SEQ ID NO: 314710 - RNA, 19 nt, Artificial Sequence
  Description of Artificial Sequence: Synthetic oligonucleotide
  Sense strand starting at position 1426 of SEQ ID NO: 4041
uccagauccuggccuagua

SEQ ID NO: 314711 - RNA, 19 nt, Artificial Sequence
  Description of Artificial Sequence: Synthetic oligonucleotide
  Antisense strand to SEQ ID NO: 314710
uacuaggccaggaucugga

SEQ ID NO: 314712 - RNA, 19 nt, Artificial Sequence
  Description of Artificial Sequence: Synthetic oligonucleotide
  Sense strand starting at position 1524 of SEQ ID NO: 4041
uguggauucucccucagga

SEQ ID NO: 314713 - RNA, 19 nt, Artificial Sequence
  Description of Artificial Sequence: Synthetic oligonucleotide
  Antisense strand to SEQ ID NO: 314712
uccugagggagaauccaca

SEQ ID NO: 314714 - RNA, 19 nt, Artificial Sequence
  Description of Artificial Sequence: Synthetic oligonucleotide
  Sense strand starting at position 2102 of SEQ ID NO: 4041
gcgugaccgggaagugauu

SEQ ID NO: 314715 - RNA, 19 nt, Artificial Sequence
  Description of Artificial Sequence: Synthetic oligonucleotide
  Antisense strand to SEQ ID NO: 314714
aaucacuucccggucacgc

SEQ ID NO: 314716 - RNA, 19 nt, Artificial Sequence
  Description of Artificial Sequence: Synthetic oligonucleotide
  Sense strand starting at position 2438 of SEQ ID NO: 4041
ggacacgaugcguacgauu

SEQ ID NO: 314717 - RNA, 19 nt, Artificial Sequence
  Description of Artificial Sequence: Synthetic oligonucleotide
  Antisense strand to SEQ ID NO: 314716
aaucguacgcaucgugucc

SEQ ID NO: 314718 - RNA, 19 nt, Artificial Sequence
  Description of Artificial Sequence: Synthetic oligonucleotide
  Sense strand starting at position 2443 of SEQ ID NO: 4041
cgaugcguacgauuagguu

SEQ ID NO: 314719 - RNA, 19 nt, Artificial Sequence
  Description of Artificial Sequence: Synthetic oligonucleotide
  Antisense strand to SEQ ID NO: 314718
aaccuaaucguacgcaucg

SEQ ID NO: 314720 - RNA, 19 nt, Artificial Sequence
  Description of Artificial Sequence: Synthetic oligonucleotide
  Sense strand starting at position 2461 of SEQ ID NO: 4041
uuuggccuuuagucugaaa

SEQ ID NO: 314721 - RNA, 19 nt, Artificial Sequence
  Description of Artificial Sequence: Synthetic oligonucleotide
  Antisense strand to SEQ ID NO: 314720
uuucagacuaaaggccaaa

SEQ ID NO: 314722 - RNA, 19 nt, Artificial Sequence
  Description of Artificial Sequence: Synthetic oligonucleotide
  Sense strand starting at position 2484 of SEQ ID NO: 4041
guugauugaaaguguacaa

SEQ ID NO: 314723 - RNA, 19 nt, Artificial Sequence
  Description of Artificial Sequence: Synthetic oligonucleotide
  Antisense strand to SEQ ID NO: 314722
uuguacacuuucaaucaac

SEQ ID NO: 314724 - RNA, 19 nt, Artificial Sequence
  Description of Artificial Sequence: Synthetic oligonucleotide
  Sense strand starting at position 2916 of SEQ ID NO: 4041
gagagcaccuccucuaguu

SEQ ID NO: 314725 - RNA, 19 nt, Artificial Sequence
  Description of Artificial Sequence: Synthetic oligonucleotide
  Antisense strand to SEQ ID NO: 314724
aacuagaggaggugcucuc

SEQ ID NO: 314726 - RNA, 19 nt, Artificial Sequence
  Description of Artificial Sequence: Synthetic oligonucleotide
  Sense strand starting at position 2953 of SEQ ID NO: 4041
gcuggagcucugcuguguu

SEQ ID NO: 314727 - RNA, 19 nt, Artificial Sequence
  Description of Artificial Sequence: Synthetic oligonucleotide
  Antisense strand to SEQ ID NO: 314726
aacacagcagagcuccagc

SEQ ID NO: 314728 - RNA, 19 nt, Artificial Sequence
  Description of Artificial Sequence: Synthetic oligonucleotide
  Sense strand starting at position 3101 of SEQ ID NO: 4041
acaccuugccaggaaucua

SEQ ID NO: 314729 - RNA, 19 nt, Artificial Sequence
  Description of Artificial Sequence: Synthetic oligonucleotide
  Antisense strand to SEQ ID NO: 314728
uagauuccuggcaaggugu

SEQ ID NO: 314730 - RNA, 19 nt, Artificial Sequence
  Description of Artificial Sequence: Synthetic oligonucleotide
  Sense strand starting at position 3218 of SEQ ID NO: 4041
aggcuaagucagggaaaug

SEQ ID NO: 314731 - RNA, 19 nt, Artificial Sequence
  Description of Artificial Sequence: Synthetic oligonucleotide
  Antisense strand to SEQ ID NO: 314730
cauuucccugacuuagccu

SEQ ID NO: 314732 - RNA, 19 nt, Artificial Sequence
  Description of Artificial Sequence: Synthetic oligonucleotide
  Sense strand starting at position 3304 of SEQ ID NO: 4041
gccgacuuagcucagauua

SEQ ID NO: 314733 - RNA, 19 nt, Artificial Sequence
  Description of Artificial Sequence: Synthetic oligonucleotide
  Antisense strand to SEQ ID NO: 314732
uaaucugagcuaagucggc

SEQ ID NO: 314734 - RNA, 19 nt, Artificial Sequence
  Description of Artificial Sequence: Synthetic oligonucleotide
  Sense strand starting at position 3430 of SEQ ID NO: 4041
cuggcugaucuuugauuga

SEQ ID NO: 314735 - RNA, 19 nt, Artificial Sequence
  Description of Artificial Sequence: Synthetic oligonucleotide
  Antisense strand to SEQ ID NO: 314734
ucaaucaaagaucagccag

SEQ ID NO: 314736 - RNA, 19 nt, Artificial Sequence
  Description of Artificial Sequence: Synthetic oligonucleotide
  Sense strand starting at position 3433 of SEQ ID NO: 4041
gcugaucuuugauugaaug

SEQ ID NO: 314737 - RNA, 19 nt, Artificial Sequence
  Description of Artificial Sequence: Synthetic oligonucleotide
  Antisense strand to SEQ ID NO: 314736
cauucaaucaaagaucagc

SEQ ID NO: 314738 - RNA, 19 nt, Artificial Sequence
  Description of Artificial Sequence: Synthetic oligonucleotide
  Sense strand starting at position 3434 of SEQ ID NO: 4041
cugaucuuugauugaauga

SEQ ID NO: 314739 - RNA, 19 nt, Artificial Sequence
  Description of Artificial Sequence: Synthetic oligonucleotide
  Antisense strand to SEQ ID NO: 314738
ucauucaaucaaagaucag

SEQ ID NO: 314740 - RNA, 19 nt, Artificial Sequence
  Description of Artificial Sequence: Synthetic oligonucleotide
  Sense strand starting at position 3669 of SEQ ID NO: 4041
ugaguccuauaagagaaga

SEQ ID NO: 314741 - RNA, 19 nt, Artificial Sequence
  Description of Artificial Sequence: Synthetic oligonucleotide
  Antisense strand to SEQ ID NO: 314740
ucuucucuuauaggacuca

SEQ ID NO: 314742 - RNA, 19 nt, Artificial Sequence
  Description of Artificial Sequence: Synthetic oligonucleotide
  Sense strand starting at position 3712 of SEQ ID NO: 4041
ggcauucugccagugcuca

SEQ ID NO: 314743 - RNA, 19 nt, Artificial Sequence
  Description of Artificial Sequence: Synthetic oligonucleotide
  Antisense strand to SEQ ID NO: 314742
ugagcacuggcagaaugcc

SEQ ID NO: 314744 - RNA, 19 nt, Artificial Sequence
  Description of Artificial Sequence: Synthetic oligonucleotide
  Sense strand starting at position 3745 of SEQ ID NO: 4041
aggcaaugaccaugaauuc

SEQ ID NO: 314745 - RNA, 19 nt, Artificial Sequence
  Description of Artificial Sequence: Synthetic oligonucleotide
  Antisense strand to SEQ ID NO: 314744
gaauucauggucauugccu

SEQ ID NO: 314746 - RNA, 19 nt, Artificial Sequence
  Description of Artificial Sequence: Synthetic oligonucleotide
  Sense strand starting at position 3832 of SEQ ID NO: 4041
gguucuuguuucucuuaua

SEQ ID NO: 314747 - RNA, 19 nt, Artificial Sequence
  Description of Artificial Sequence: Synthetic oligonucleotide
  Antisense strand to SEQ ID NO: 314746
uauaagagaaacaagaacc

SEQ ID NO: 314748 - RNA, 19 nt, Artificial Sequence
  Description of Artificial Sequence: Synthetic oligonucleotide
  Sense strand starting at position 3833 of SEQ ID NO: 4041
guucuuguuucucuuauag

SEQ ID NO: 314749 - RNA, 19 nt, Artificial Sequence
  Description of Artificial Sequence: Synthetic oligonucleotide
  Antisense strand to SEQ ID NO: 314748
cuauaagagaaacaagaac

SEQ ID NO: 314750 - RNA, 19 nt, Artificial Sequence
  Description of Artificial Sequence: Synthetic oligonucleotide
  Sense strand starting at position 3865 of SEQ ID NO: 4041
gaguaaaggaaugguugau

SEQ ID NO: 314751 - RNA, 19 nt, Artificial Sequence
  Description of Artificial Sequence: Synthetic oligonucleotide
  Antisense strand to SEQ ID NO: 314750
aucaaccauuccuuuacuc

SEQ ID NO: 314752 - RNA, 19 nt, Artificial Sequence
  Description of Artificial Sequence: Synthetic oligonucleotide
  Sense strand starting at position 3890 of SEQ ID NO: 4041
uuuggauacuucccacaga

SEQ ID NO: 314753 - RNA, 19 nt, Artificial Sequence
  Description of Artificial Sequence: Synthetic oligonucleotide
  Antisense strand to SEQ ID NO: 314752
ucugugggaaguauccaaa

SEQ ID NO: 314754 - RNA, 19 nt, Artificial Sequence
  Description of Artificial Sequence: Synthetic oligonucleotide
  Sense strand starting at position 3911 of SEQ ID NO: 4041
uguguuuguggcaggucaa

SEQ ID NO: 314755 - RNA, 19 nt, Artificial Sequence
  Description of Artificial Sequence: Synthetic oligonucleotide
  Antisense strand to SEQ ID NO: 314754
uugaccugccacaaacaca

SEQ ID NO: 314756 - RNA, 19 nt, Artificial Sequence
  Description of Artificial Sequence: Synthetic oligonucleotide
  Sense strand starting at position 138 of SEQ ID NO: 4042
cccacaucagucuacaagu

SEQ ID NO: 314757 - RNA, 19 nt, Artificial Sequence
  Description of Artificial Sequence: Synthetic oligonucleotide
  Antisense strand to SEQ ID NO: 314756
acuuguagacugauguggg

SEQ ID NO: 314758 - RNA, 19 nt, Artificial Sequence
  Description of Artificial Sequence: Synthetic oligonucleotide
  Sense strand starting at position 144 of SEQ ID NO: 4042
ucagucuacaagugaguga

SEQ ID NO: 314759 - RNA, 19 nt, Artificial Sequence
  Description of Artificial Sequence: Synthetic oligonucleotide
  Antisense strand to SEQ ID NO: 314758
ucacucacuuguagacuga

SEQ ID NO: 314760 - RNA, 19 nt, Artificial Sequence
  Description of Artificial Sequence: Synthetic oligonucleotide
  Sense strand starting at position 176 of SEQ ID NO: 4042
uggccauaccacugaaguu

SEQ ID NO: 314761 - RNA, 19 nt, Artificial Sequence
  Description of Artificial Sequence: Synthetic oligonucleotide
  Antisense strand to SEQ ID NO: 314760
aacuucagugguauggcca

SEQ ID NO: 314762 - RNA, 19 nt, Artificial Sequence
  Description of Artificial Sequence: Synthetic oligonucleotide
  Sense strand starting at position 189 of SEQ ID NO: 4042
gaaguuauuuacugggcau

SEQ ID NO: 314763 - RNA, 19 nt, Artificial Sequence
  Description of Artificial Sequence: Synthetic oligonucleotide
  Antisense strand to SEQ ID NO: 314762
augcccaguaaauaacuuc

SEQ ID NO: 314764 - RNA, 19 nt, Artificial Sequence
  Description of Artificial Sequence: Synthetic oligonucleotide
  Sense strand starting at position 218 of SEQ ID NO: 4042
ggucaucuccuaggacuuu

SEQ ID NO: 314765 - RNA, 19 nt, Artificial Sequence
  Description of Artificial Sequence: Synthetic oligonucleotide
  Antisense strand to SEQ ID NO: 314764
aaaguccuaggagaugacc

SEQ ID NO: 314766 - RNA, 19 nt, Artificial Sequence
  Description of Artificial Sequence: Synthetic oligonucleotide
  Sense strand starting at position 392 of SEQ ID NO: 4042
ggccaccucuuucugagaa

SEQ ID NO: 314767 - RNA, 19 nt, Artificial Sequence
  Description of Artificial Sequence: Synthetic oligonucleotide
  Antisense strand to SEQ ID NO: 314766
uucucagaaagagguggcc

SEQ ID NO: 314768 - RNA, 19 nt, Artificial Sequence
  Description of Artificial Sequence: Synthetic oligonucleotide
  Sense strand starting at position 434 of SEQ ID NO: 4042
cuguuaggucucugcaaca

SEQ ID NO: 314769 - RNA, 19 nt, Artificial Sequence
  Description of Artificial Sequence: Synthetic oligonucleotide
  Antisense strand to SEQ ID NO: 314768
uguugcagagaccuaacag

SEQ ID NO: 314770 - RNA, 19 nt, Artificial Sequence
  Description of Artificial Sequence: Synthetic oligonucleotide
  Sense strand starting at position 560 of SEQ ID NO: 4042
acaacauggguguaagcau

SEQ ID NO: 314771 - RNA, 19 nt, Artificial Sequence
  Description of Artificial Sequence: Synthetic oligonucleotide
  Antisense strand to SEQ ID NO: 314770
augcuuacacccauguugu

SEQ ID NO: 314772 - RNA, 19 nt, Artificial Sequence
  Description of Artificial Sequence: Synthetic oligonucleotide
  Sense strand starting at position 586 of SEQ ID NO: 4042
uuaggcauuccucaagcuu

SEQ ID NO: 314773 - RNA, 19 nt, Artificial Sequence
  Description of Artificial Sequence: Synthetic oligonucleotide
  Antisense strand to SEQ ID NO: 314772
aagcuugaggaaugccuaa

SEQ ID NO: 314774 - RNA, 19 nt, Artificial Sequence
  Description of Artificial Sequence: Synthetic oligonucleotide
  Sense strand starting at position 610 of SEQ ID NO: 4042
guguguggaucccugagga

SEQ ID NO: 314775 - RNA, 19 nt, Artificial Sequence
  Description of Artificial Sequence: Synthetic oligonucleotide
  Antisense strand to SEQ ID NO: 314774
uccucagggauccacacac

SEQ ID NO: 314776 - RNA, 19 nt, Artificial Sequence
  Description of Artificial Sequence: Synthetic oligonucleotide
  Sense strand starting at position 630 of SEQ ID NO: 4042
cuuguuaaacucuggcuca

SEQ ID NO: 314777 - RNA, 19 nt, Artificial Sequence
  Description of Artificial Sequence: Synthetic oligonucleotide
  Antisense strand to SEQ ID NO: 314776
ugagccagaguuuaacaag

SEQ ID NO: 314778 - RNA, 19 nt, Artificial Sequence
  Description of Artificial Sequence: Synthetic oligonucleotide
  Sense strand starting at position 633 of SEQ ID NO: 4042
guuaaacucuggcucaaga

SEQ ID NO: 314779 - RNA, 19 nt, Artificial Sequence
  Description of Artificial Sequence: Synthetic oligonucleotide
  Antisense strand to SEQ ID NO: 314778
ucuugagccagaguuuaac

SEQ ID NO: 314780 - RNA, 19 nt, Artificial Sequence
  Description of Artificial Sequence: Synthetic oligonucleotide
  Sense strand starting at position 653 of SEQ ID NO: 4042
uugcuaagacacuguuuga

SEQ ID NO: 314781 - RNA, 19 nt, Artificial Sequence
  Description of Artificial Sequence: Synthetic oligonucleotide
  Antisense strand to SEQ ID NO: 314780
ucaaacagugucuuagcaa

SEQ ID NO: 314782 - RNA, 19 nt, Artificial Sequence
  Description of Artificial Sequence: Synthetic oligonucleotide
  Sense strand starting at position 657 of SEQ ID NO: 4042
uaagacacuguuugaggau

SEQ ID NO: 314783 - RNA, 19 nt, Artificial Sequence
  Description of Artificial Sequence: Synthetic oligonucleotide
  Antisense strand to SEQ ID NO: 314782
auccucaaacagugucuua

SEQ ID NO: 314784 - RNA, 19 nt, Artificial Sequence
  Description of Artificial Sequence: Synthetic oligonucleotide
  Sense strand starting at position 817 of SEQ ID NO: 4042
ccaguuauguguccuugag

SEQ ID NO: 314785 - RNA, 19 nt, Artificial Sequence
  Description of Artificial Sequence: Synthetic oligonucleotide
  Antisense strand to SEQ ID NO: 314784
cucaaggacacauaacugg

SEQ ID NO: 314786 - RNA, 19 nt, Artificial Sequence
  Description of Artificial Sequence: Synthetic oligonucleotide
  Sense strand starting at position 819 of SEQ ID NO: 4042
aguuauguguccuugagca

SEQ ID NO: 314787 - RNA, 19 nt, Artificial Sequence
  Description of Artificial Sequence: Synthetic oligonucleotide
  Antisense strand to SEQ ID NO: 314786
ugcucaaggacacauaacu

SEQ ID NO: 314788 - RNA, 19 nt, Artificial Sequence
  Description of Artificial Sequence: Synthetic oligonucleotide
  Sense strand starting at position 821 of SEQ ID NO: 4042
uuauguguccuugagcaug

SEQ ID NO: 314789 - RNA, 19 nt, Artificial Sequence
  Description of Artificial Sequence: Synthetic oligonucleotide
  Antisense strand to SEQ ID NO: 314788
caugcucaaggacacauaa

SEQ ID NO: 314790 - RNA, 19 nt, Artificial Sequence
  Description of Artificial Sequence: Synthetic oligonucleotide
  Sense strand starting at position 849 of SEQ ID NO: 4042
ggaugaacagucggauuaa

SEQ ID NO: 314791 - RNA, 19 nt, Artificial Sequence
  Description of Artificial Sequence: Synthetic oligonucleotide
  Antisense strand to SEQ ID NO: 314790
uuaauccgacuguucaucc

SEQ ID NO: 314792 - RNA, 19 nt, Artificial Sequence
  Description of Artificial Sequence: Synthetic oligonucleotide
  Sense strand starting at position 850 of SEQ ID NO: 4042
gaugaacagucggauuaaa

SEQ ID NO: 314793 - RNA, 19 nt, Artificial Sequence
  Description of Artificial Sequence: Synthetic oligonucleotide
  Antisense strand to SEQ ID NO: 314792
uuuaauccgacuguucauc

SEQ ID NO: 314794 - RNA, 19 nt, Artificial Sequence
  Description of Artificial Sequence: Synthetic oligonucleotide
  Sense strand starting at position 870 of SEQ ID NO: 4042
ugcccaccugguuagagau

SEQ ID NO: 314795 - RNA, 19 nt, Artificial Sequence
  Description of Artificial Sequence: Synthetic oligonucleotide
  Antisense strand to SEQ ID NO: 314794
aucucuaaccaggugggca

SEQ ID NO: 314796 - RNA, 19 nt, Artificial Sequence
  Description of Artificial Sequence: Synthetic oligonucleotide
  Sense strand starting at position 992 of SEQ ID NO: 4042
guacacugcugaccuuaua

SEQ ID NO: 314797 - RNA, 19 nt, Artificial Sequence
  Description of Artificial Sequence: Synthetic oligonucleotide
  Antisense strand to SEQ ID NO: 314796
uauaaggucagcaguguac

SEQ ID NO: 314798 - RNA, 19 nt, Artificial Sequence
  Description of Artificial Sequence: Synthetic oligonucleotide
  Sense strand starting at position 1020 of SEQ ID NO: 4042
gcuagaacgacuggaagaa

SEQ ID NO: 314799 - RNA, 19 nt, Artificial Sequence
  Description of Artificial Sequence: Synthetic oligonucleotide
  Antisense strand to SEQ ID NO: 314798
uucuuccagucguucuagc

SEQ ID NO: 314800 - RNA, 19 nt, Artificial Sequence
  Description of Artificial Sequence: Synthetic oligonucleotide
  Sense strand starting at position 1051 of SEQ ID NO: 4042
ggugauuaaggagguggau

SEQ ID NO: 314801 - RNA, 19 nt, Artificial Sequence
  Description of Artificial Sequence: Synthetic oligonucleotide
  Antisense strand to SEQ ID NO: 314800
auccaccuccuuaaucacc

SEQ ID NO: 314802 - RNA, 19 nt, Artificial Sequence
  Description of Artificial Sequence: Synthetic oligonucleotide
  Sense strand starting at position 1086 of SEQ ID NO: 4042
gcccuaucguccucugauc

SEQ ID NO: 314803 - RNA, 19 nt, Artificial Sequence
  Description of Artificial Sequence: Synthetic oligonucleotide
  Antisense strand to SEQ ID NO: 314802
gaucagaggacgauagggc

SEQ ID NO: 314804 - RNA, 19 nt, Artificial Sequence
  Description of Artificial Sequence: Synthetic oligonucleotide
  Sense strand starting at position 1095 of SEQ ID NO: 4042
uccucugaucccuggccaa

SEQ ID NO: 314805 - RNA, 19 nt, Artificial Sequence
  Description of Artificial Sequence: Synthetic oligonucleotide
  Antisense strand to SEQ ID NO: 314804
uuggccagggaucagagga

SEQ ID NO: 314806 - RNA, 19 nt, Artificial Sequence
  Description of Artificial Sequence: Synthetic oligonucleotide
  Sense strand starting at position 1498 of SEQ ID NO: 4042
gguccaaaucucugucuuu

SEQ ID NO: 314807 - RNA, 19 nt, Artificial Sequence
  Description of Artificial Sequence: Synthetic oligonucleotide
  Antisense strand to SEQ ID NO: 314806
aaagacagagauuuggacc

SEQ ID NO: 314808 - RNA, 19 nt, Artificial Sequence
  Description of Artificial Sequence: Synthetic oligonucleotide
  Sense strand starting at position 1499 of SEQ ID NO: 4042
guccaaaucucugucuuuc

SEQ ID NO: 314809 - RNA, 19 nt, Artificial Sequence
  Description of Artificial Sequence: Synthetic oligonucleotide
  Antisense strand to SEQ ID NO: 314808
gaaagacagagauuuggac

SEQ ID NO: 314810 - RNA, 19 nt, Artificial Sequence
  Description of Artificial Sequence: Synthetic oligonucleotide
  Sense strand starting at position 2570 of SEQ ID NO: 4042
accugucuucuggguacaa

SEQ ID NO: 314811 - RNA, 19 nt, Artificial Sequence
  Description of Artificial Sequence: Synthetic oligonucleotide
  Antisense strand to SEQ ID NO: 314810
uuguacccagaagacaggu

SEQ ID NO: 314812 - RNA, 19 nt, Artificial Sequence
  Description of Artificial Sequence: Synthetic oligonucleotide
  Sense strand starting at position 2572 of SEQ ID NO: 4042
cugucuucuggguacaagu

SEQ ID NO: 314813 - RNA, 19 nt, Artificial Sequence
  Description of Artificial Sequence: Synthetic oligonucleotide
  Antisense strand to SEQ ID NO: 314812
acuuguacccagaagacag

SEQ ID NO: 314814 - RNA, 19 nt, Artificial Sequence
  Description of Artificial Sequence: Synthetic oligonucleotide
  Sense strand starting at position 2574 of SEQ ID NO: 4042
gucuucuggguacaaguaa

SEQ ID NO: 314815 - RNA, 19 nt, Artificial Sequence
  Description of Artificial Sequence: Synthetic oligonucleotide
  Antisense strand to SEQ ID NO: 314814
uuacuuguacccagaagac

SEQ ID NO: 314816 - RNA, 19 nt, Artificial Sequence
  Description of Artificial Sequence: Synthetic oligonucleotide
  Sense strand starting at position 2706 of SEQ ID NO: 4042
cucgaauucugaccucaga

SEQ ID NO: 314817 - RNA, 19 nt, Artificial Sequence
  Description of Artificial Sequence: Synthetic oligonucleotide
  Antisense strand to SEQ ID NO: 314816
ucugaggucagaauucgag

SEQ ID NO: 314818 - RNA, 19 nt, Artificial Sequence
  Description of Artificial Sequence: Synthetic oligonucleotide
  Sense strand starting at position 2786 of SEQ ID NO: 4042
ccugcauaucucgauguaa

SEQ ID NO: 314819 - RNA, 19 nt, Artificial Sequence
  Description of Artificial Sequence: Synthetic oligonucleotide
  Antisense strand to SEQ ID NO: 314818
uuacaucgagauaugcagg

SEQ ID NO: 314820 - RNA, 19 nt, Artificial Sequence
  Description of Artificial Sequence: Synthetic oligonucleotide
  Sense strand starting at position 2788 of SEQ ID NO: 4042
ugcauaucucgauguaagg

SEQ ID NO: 314821 - RNA, 19 nt, Artificial Sequence
  Description of Artificial Sequence: Synthetic oligonucleotide
  Antisense strand to SEQ ID NO: 314820
ccuuacaucgagauaugca

SEQ ID NO: 314822 - RNA, 19 nt, Artificial Sequence
  Description of Artificial Sequence: Synthetic oligonucleotide
  Sense strand starting at position 2902 of SEQ ID NO: 4042
gcuagauacugcuucuaca

SEQ ID NO: 314823 - RNA, 19 nt, Artificial Sequence
  Description of Artificial Sequence: Synthetic oligonucleotide
  Antisense strand to SEQ ID NO: 314822
uguagaagcaguaucuagc

SEQ ID NO: 314824 - RNA, 19 nt, Artificial Sequence
  Description of Artificial Sequence: Synthetic oligonucleotide
  Sense strand starting at position 3147 of SEQ ID NO: 4042
ggaagacucugcccucaug

SEQ ID NO: 314825 - RNA, 19 nt, Artificial Sequence
  Description of Artificial Sequence: Synthetic oligonucleotide
  Antisense strand to SEQ ID NO: 314824
caugagggcagagucuucc

SEQ ID NO: 314826 - RNA, 19 nt, Artificial Sequence
  Description of Artificial Sequence: Synthetic oligonucleotide
  Sense strand starting at position 3684 of SEQ ID NO: 4042
uuaagacacucuguuauag

SEQ ID NO: 314827 - RNA, 19 nt, Artificial Sequence
  Description of Artificial Sequence: Synthetic oligonucleotide
  Antisense strand to SEQ ID NO: 314826
cuauaacagagugucuuaa

SEQ ID NO: 314828 - RNA, 19 nt, Artificial Sequence
  Description of Artificial Sequence: Synthetic oligonucleotide
  Sense strand starting at position 3717 of SEQ ID NO: 4042
aagacacagucugaguauu

SEQ ID NO: 314829 - RNA, 19 nt, Artificial Sequence
  Description of Artificial Sequence: Synthetic oligonucleotide
  Antisense strand to SEQ ID NO: 314828
aauacucagacugugucuu

SEQ ID NO: 314830 - RNA, 19 nt, Artificial Sequence
  Description of Artificial Sequence: Synthetic oligonucleotide
  Sense strand starting at position 3719 of SEQ ID NO: 4042
gacacagucugaguauuaa

SEQ ID NO: 314831 - RNA, 19 nt, Artificial Sequence
  Description of Artificial Sequence: Synthetic oligonucleotide
  Antisense strand to SEQ ID NO: 314830
uuaauacucagacuguguc

SEQ ID NO: 314832 - RNA, 19 nt, Artificial Sequence
  Description of Artificial Sequence: Synthetic oligonucleotide
  Sense strand starting at position 3756 of SEQ ID NO: 4042
gcaguccucagccagagaa

SEQ ID NO: 314833 - RNA, 19 nt, Artificial Sequence
  Description of Artificial Sequence: Synthetic oligonucleotide
  Antisense strand to SEQ ID NO: 314832
uucucuggcugaggacugc

SEQ ID NO: 314834 - RNA, 19 nt, Artificial Sequence
  Description of Artificial Sequence: Synthetic oligonucleotide
  Sense strand starting at position 3791 of SEQ ID NO: 4042
cagagagauugguuuauca

SEQ ID NO: 314835 - RNA, 19 nt, Artificial Sequence
  Description of Artificial Sequence: Synthetic oligonucleotide
  Antisense strand to SEQ ID NO: 314834
ugauaaaccaaucucucug

SEQ ID NO: 314836 - RNA, 19 nt, Artificial Sequence
  Description of Artificial Sequence: Synthetic oligonucleotide
  Sense strand starting at position 70 of SEQ ID NO: 4043
agaucuuccgacugcaaag

SEQ ID NO: 314837 - RNA, 19 nt, Artificial Sequence
  Description of Artificial Sequence: Synthetic oligonucleotide
  Antisense strand to SEQ ID NO: 314836
cuuugcagucggaagaucu

SEQ ID NO: 314838 - RNA, 19 nt, Artificial Sequence
  Description of Artificial Sequence: Synthetic oligonucleotide
  Sense strand starting at position 185 of SEQ ID NO: 4043
acccuaagauagucaagua

SEQ ID NO: 314839 - RNA, 19 nt, Artificial Sequence
  Description of Artificial Sequence: Synthetic oligonucleotide
  Antisense strand to SEQ ID NO: 314838
uacuugacuaucuuagggu

SEQ ID NO: 314840 - RNA, 19 nt, Artificial Sequence
  Description of Artificial Sequence: Synthetic oligonucleotide
  Sense strand starting at position 382 of SEQ ID NO: 4043
ugugauuucuuccaacugu

SEQ ID NO: 314841 - RNA, 19 nt, Artificial Sequence
  Description of Artificial Sequence: Synthetic oligonucleotide
  Antisense strand to SEQ ID NO: 314840
acaguuggaagaaaucaca

SEQ ID NO: 314842 - RNA, 19 nt, Artificial Sequence
  Description of Artificial Sequence: Synthetic oligonucleotide
  Sense strand starting at position 481 of SEQ ID NO: 4043
ugggacgcccuguaauuau

SEQ ID NO: 314843 - RNA, 19 nt, Artificial Sequence
  Description of Artificial Sequence: Synthetic oligonucleotide
  Antisense strand to SEQ ID NO: 314842
auaauuacagggcguccca

SEQ ID NO: 314844 - RNA, 19 nt, Artificial Sequence
  Description of Artificial Sequence: Synthetic oligonucleotide
  Sense strand starting at position 484 of SEQ ID NO: 4043
gacgcccuguaauuauuua

SEQ ID NO: 314845 - RNA, 19 nt, Artificial Sequence
  Description of Artificial Sequence: Synthetic oligonucleotide
  Antisense strand to SEQ ID NO: 314844
uaaauaauuacagggcguc

SEQ ID NO: 314846 - RNA, 19 nt, Artificial Sequence
  Description of Artificial Sequence: Synthetic oligonucleotide
  Sense strand starting at position 502 of SEQ ID NO: 4043
agaaguacauauuacagaa

SEQ ID NO: 314847 - RNA, 19 nt, Artificial Sequence
  Description of Artificial Sequence: Synthetic oligonucleotide
  Antisense strand to SEQ ID NO: 314846
uucuguaauauguacuucu

SEQ ID NO: 314848 - RNA, 19 nt, Artificial Sequence
  Description of Artificial Sequence: Synthetic oligonucleotide
  Sense strand starting at position 575 of SEQ ID NO: 4043
acauaaguccacuaagucu

SEQ ID NO: 314849 - RNA, 19 nt, Artificial Sequence
  Description of Artificial Sequence: Synthetic oligonucleotide
  Antisense strand to SEQ ID NO: 314848
agacuuaguggacuuaugu

SEQ ID NO: 314850 - RNA, 19 nt, Artificial Sequence
  Description of Artificial Sequence: Synthetic oligonucleotide
  Sense strand starting at position 589 of SEQ ID NO: 4043
agucucaaaugucuaauca

SEQ ID NO: 314851 - RNA, 19 nt, Artificial Sequence
  Description of Artificial Sequence: Synthetic oligonucleotide
  Antisense strand to SEQ ID NO: 314850
ugauuagacauuugagacu

SEQ ID NO: 314852 - RNA, 19 nt, Artificial Sequence
  Description of Artificial Sequence: Synthetic oligonucleotide
  Sense strand starting at position 590 of SEQ ID NO: 4043
gucucaaaugucuaaucau

SEQ ID NO: 314853 - RNA, 19 nt, Artificial Sequence
  Description of Artificial Sequence: Synthetic oligonucleotide
  Antisense strand to SEQ ID NO: 314852
augauuagacauuugagac

SEQ ID NO: 314854 - RNA, 19 nt, Artificial Sequence
  Description of Artificial Sequence: Synthetic oligonucleotide
  Sense strand starting at position 839 of SEQ ID NO: 4043
gaacauaaaucgcuggauc

SEQ ID NO: 314855 - RNA, 19 nt, Artificial Sequence
  Description of Artificial Sequence: Synthetic oligonucleotide
  Antisense strand to SEQ ID NO: 314854
gauccagcgauuuauguuc

SEQ ID NO: 314856 - RNA, 19 nt, Artificial Sequence
  Description of Artificial Sequence: Synthetic oligonucleotide
  Sense strand starting at position 841 of SEQ ID NO: 4043
acauaaaucgcuggauccu

SEQ ID NO: 314857 - RNA, 19 nt, Artificial Sequence
  Description of Artificial Sequence: Synthetic oligonucleotide
  Antisense strand to SEQ ID NO: 314856
aggauccagcgauuuaugu

SEQ ID NO: 314858 - RNA, 19 nt, Artificial Sequence
  Description of Artificial Sequence: Synthetic oligonucleotide
  Sense strand starting at position 876 of SEQ ID NO: 4043
ucgggacuccuuuaaacua

SEQ ID NO: 314859 - RNA, 19 nt, Artificial Sequence
  Description of Artificial Sequence: Synthetic oligonucleotide
  Antisense strand to SEQ ID NO: 314858
uaguuuaaaggagucccga

SEQ ID NO: 314860 - RNA, 19 nt, Artificial Sequence
  Description of Artificial Sequence: Synthetic oligonucleotide
  Sense strand starting at position 1067 of SEQ ID NO: 4043
aggauuccagucugugaua

SEQ ID NO: 314861 - RNA, 19 nt, Artificial Sequence
  Description of Artificial Sequence: Synthetic oligonucleotide
  Antisense strand to SEQ ID NO: 314860
uaucacagacuggaauccu

SEQ ID NO: 314862 - RNA, 19 nt, Artificial Sequence
  Description of Artificial Sequence: Synthetic oligonucleotide
  Sense strand starting at position 1068 of SEQ ID NO: 4043
ggauuccagucugugauau

SEQ ID NO: 314863 - RNA, 19 nt, Artificial Sequence
  Description of Artificial Sequence: Synthetic oligonucleotide
  Antisense strand to SEQ ID NO: 314862
auaucacagacuggaaucc

SEQ ID NO: 314864 - RNA, 19 nt, Artificial Sequence
  Description of Artificial Sequence: Synthetic oligonucleotide
  Sense strand starting at position 1069 of SEQ ID NO: 4043
gauuccagucugugauaua

SEQ ID NO: 314865 - RNA, 19 nt, Artificial Sequence
  Description of Artificial Sequence: Synthetic oligonucleotide
  Antisense strand to SEQ ID NO: 314864
uauaucacagacuggaauc

SEQ ID NO: 314866 - RNA, 19 nt, Artificial Sequence
  Description of Artificial Sequence: Synthetic oligonucleotide
  Sense strand starting at position 1184 of SEQ ID NO: 4043
uggaaauacuguuagguau

SEQ ID NO: 314867 - RNA, 19 nt, Artificial Sequence
  Description of Artificial Sequence: Synthetic oligonucleotide
  Antisense strand to SEQ ID NO: 314866
auaccuaacaguauuucca

SEQ ID NO: 314868 - RNA, 19 nt, Artificial Sequence
  Description of Artificial Sequence: Synthetic oligonucleotide
  Sense strand starting at position 1384 of SEQ ID NO: 4043
cacaaugucgcuggucaga

SEQ ID NO: 314869 - RNA, 19 nt, Artificial Sequence
  Description of Artificial Sequence: Synthetic oligonucleotide
  Antisense strand to SEQ ID NO: 314868
ucugaccagcgacauugug

SEQ ID NO: 314870 - RNA, 19 nt, Artificial Sequence
  Description of Artificial Sequence: Synthetic oligonucleotide
  Sense strand starting at position 1647 of SEQ ID NO: 4043
cggguagcgaagugaauaa

SEQ ID NO: 314871 - RNA, 19 nt, Artificial Sequence
  Description of Artificial Sequence: Synthetic oligonucleotide
  Antisense strand to SEQ ID NO: 314870
uuauucacuucgcuacccg

SEQ ID NO: 314872 - RNA, 19 nt, Artificial Sequence
  Description of Artificial Sequence: Synthetic oligonucleotide
  Sense strand starting at position 2591 of SEQ ID NO: 4043
cagguuauauucgcgccua

SEQ ID NO: 314873 - RNA, 19 nt, Artificial Sequence
  Description of Artificial Sequence: Synthetic oligonucleotide
  Antisense strand to SEQ ID NO: 314872
uaggcgcgaauauaaccug

SEQ ID NO: 314874 - RNA, 19 nt, Artificial Sequence
  Description of Artificial Sequence: Synthetic oligonucleotide
  Sense strand starting at position 2594 of SEQ ID NO: 4043
guuauauucgcgccuagca

SEQ ID NO: 314875 - RNA, 19 nt, Artificial Sequence
  Description of Artificial Sequence: Synthetic oligonucleotide
  Antisense strand to SEQ ID NO: 314874
ugcuaggcgcgaauauaac

SEQ ID NO: 314876 - RNA, 19 nt, Artificial Sequence
  Description of Artificial Sequence: Synthetic oligonucleotide
  Sense strand starting at position 2602 of SEQ ID NO: 4043
cgcgccuagcacguuaaua

SEQ ID NO: 314877 - RNA, 19 nt, Artificial Sequence
  Description of Artificial Sequence: Synthetic oligonucleotide
  Antisense strand to SEQ ID NO: 314876
uauuaacgugcuaggcgcg

SEQ ID NO: 314878 - RNA, 19 nt, Artificial Sequence
  Description of Artificial Sequence: Synthetic oligonucleotide
  Sense strand starting at position 2603 of SEQ ID NO: 4043
gcgccuagcacguuaauau

SEQ ID NO: 314879 - RNA, 19 nt, Artificial Sequence
  Description of Artificial Sequence: Synthetic oligonucleotide
  Antisense strand to SEQ ID NO: 314878
auauuaacgugcuaggcgc

SEQ ID NO: 314880 - RNA, 19 nt, Artificial Sequence
  Description of Artificial Sequence: Synthetic oligonucleotide
  Sense strand starting at position 2604 of SEQ ID NO: 4043
cgccuagcacguuaauaua

SEQ ID NO: 314881 - RNA, 19 nt, Artificial Sequence
  Description of Artificial Sequence: Synthetic oligonucleotide
  Antisense strand to SEQ ID NO: 314880
uauauuaacgugcuaggcg

SEQ ID NO: 314882 - RNA, 19 nt, Artificial Sequence
  Description of Artificial Sequence: Synthetic oligonucleotide
  Sense strand starting at position 2618 of SEQ ID NO: 4043
auauaaugcuuuguauggu

SEQ ID NO: 314883 - RNA, 19 nt, Artificial Sequence
  Description of Artificial Sequence: Synthetic oligonucleotide
  Antisense strand to SEQ ID NO: 314882
accauacaaagcauuauau

SEQ ID NO: 314884 - RNA, 19 nt, Artificial Sequence
  Description of Artificial Sequence: Synthetic oligonucleotide
  Sense strand starting at position 2621 of SEQ ID NO: 4043
uaaugcuuuguauggucaa

SEQ ID NO: 314885 - RNA, 19 nt, Artificial Sequence
  Description of Artificial Sequence: Synthetic oligonucleotide
  Antisense strand to SEQ ID NO: 314884
uugaccauacaaagcauua

SEQ ID NO: 314886 - RNA, 19 nt, Artificial Sequence
  Description of Artificial Sequence: Synthetic oligonucleotide
  Sense strand starting at position 2624 of SEQ ID NO: 4043
ugcuuuguauggucaagau

SEQ ID NO: 314887 - RNA, 19 nt, Artificial Sequence
  Description of Artificial Sequence: Synthetic oligonucleotide
  Antisense strand to SEQ ID NO: 314886
aucuugaccauacaaagca

SEQ ID NO: 314888 - RNA, 19 nt, Artificial Sequence
  Description of Artificial Sequence: Synthetic oligonucleotide
  Sense strand starting at position 2685 of SEQ ID NO: 4043
auggcaaugauguguguca

SEQ ID NO: 314889 - RNA, 19 nt, Artificial Sequence
  Description of Artificial Sequence: Synthetic oligonucleotide
  Antisense strand to SEQ ID NO: 314888
ugacacacaucauugccau

SEQ ID NO: 314890 - RNA, 19 nt, Artificial Sequence
  Description of Artificial Sequence: Synthetic oligonucleotide
  Sense strand starting at position 2686 of SEQ ID NO: 4043
uggcaaugaugugugucau

SEQ ID NO: 314891 - RNA, 19 nt, Artificial Sequence
  Description of Artificial Sequence: Synthetic oligonucleotide
  Antisense strand to SEQ ID NO: 314890
augacacacaucauugcca

SEQ ID NO: 314892 - RNA, 19 nt, Artificial Sequence
  Description of Artificial Sequence: Synthetic oligonucleotide
  Sense strand starting at position 2687 of SEQ ID NO: 4043
ggcaaugaugugugucaua

SEQ ID NO: 314893 - RNA, 19 nt, Artificial Sequence
  Description of Artificial Sequence: Synthetic oligonucleotide
  Antisense strand to SEQ ID NO: 314892
uaugacacacaucauugcc

SEQ ID NO: 314894 - RNA, 19 nt, Artificial Sequence
  Description of Artificial Sequence: Synthetic oligonucleotide
  Sense strand starting at position 2696 of SEQ ID NO: 4043
gugugucauagcuacucaa

SEQ ID NO: 314895 - RNA, 19 nt, Artificial Sequence
  Description of Artificial Sequence: Synthetic oligonucleotide
  Antisense strand to SEQ ID NO: 314894
uugaguagcuaugacacac

SEQ ID NO: 314896 - RNA, 19 nt, Artificial Sequence
  Description of Artificial Sequence: Synthetic oligonucleotide
  Sense strand starting at position 2795 of SEQ ID NO: 4043
aagcccuaucuguguggua

SEQ ID NO: 314897 - RNA, 19 nt, Artificial Sequence
  Description of Artificial Sequence: Synthetic oligonucleotide
  Antisense strand to SEQ ID NO: 314896
uaccacacagauagggcuu

SEQ ID NO: 314898 - RNA, 19 nt, Artificial Sequence
  Description of Artificial Sequence: Synthetic oligonucleotide
  Sense strand starting at position 2797 of SEQ ID NO: 4043
gcccuaucugugugguaga

SEQ ID NO: 314899 - RNA, 19 nt, Artificial Sequence
  Description of Artificial Sequence: Synthetic oligonucleotide
  Antisense strand to SEQ ID NO: 314898
ucuaccacacagauagggc

SEQ ID NO: 314900 - RNA, 19 nt, Artificial Sequence
  Description of Artificial Sequence: Synthetic oligonucleotide
  Sense strand starting at position 2810 of SEQ ID NO: 4043
gguagauauuuguaaucuc

SEQ ID NO: 314901 - RNA, 19 nt, Artificial Sequence
  Description of Artificial Sequence: Synthetic oligonucleotide
  Antisense strand to SEQ ID NO: 314900
gagauuacaaauaucuacc

SEQ ID NO: 314902 - RNA, 19 nt, Artificial Sequence
  Description of Artificial Sequence: Synthetic oligonucleotide
  Sense strand starting at position 2850 of SEQ ID NO: 4043
ugggaugacagacguuaaa

SEQ ID NO: 314903 - RNA, 19 nt, Artificial Sequence
  Description of Artificial Sequence: Synthetic oligonucleotide
  Antisense strand to SEQ ID NO: 314902
uuuaacgucugucauccca

SEQ ID NO: 314904 - RNA, 19 nt, Artificial Sequence
  Description of Artificial Sequence: Synthetic oligonucleotide
  Sense strand starting at position 2861 of SEQ ID NO: 4043
acguuaaagaacuguguua

SEQ ID NO: 314905 - RNA, 19 nt, Artificial Sequence
  Description of Artificial Sequence: Synthetic oligonucleotide
  Antisense strand to SEQ ID NO: 314904
uaacacaguucuuuaacgu

SEQ ID NO: 314906 - RNA, 19 nt, Artificial Sequence
  Description of Artificial Sequence: Synthetic oligonucleotide
  Sense strand starting at position 2863 of SEQ ID NO: 4043
guuaaagaacuguguuaug

SEQ ID NO: 314907 - RNA, 19 nt, Artificial Sequence
  Description of Artificial Sequence: Synthetic oligonucleotide
  Antisense strand to SEQ ID NO: 314906
cauaacacaguucuuuaac

SEQ ID NO: 314908 - RNA, 19 nt, Artificial Sequence
  Description of Artificial Sequence: Synthetic oligonucleotide
  Sense strand starting at position 3393 of SEQ ID NO: 4043
auagcugccucagcaauua

SEQ ID NO: 314909 - RNA, 19 nt, Artificial Sequence
  Description of Artificial Sequence: Synthetic oligonucleotide
  Antisense strand to SEQ ID NO: 314908
uaauugcugaggcagcuau

SEQ ID NO: 314910 - RNA, 19 nt, Artificial Sequence
  Description of Artificial Sequence: Synthetic oligonucleotide
  Sense strand starting at position 3420 of SEQ ID NO: 4043
guuguugaacacugaaguu

SEQ ID NO: 314911 - RNA, 19 nt, Artificial Sequence
  Description of Artificial Sequence: Synthetic oligonucleotide
  Antisense strand to SEQ ID NO: 314910
aacuucaguguucaacaac

SEQ ID NO: 314912 - RNA, 19 nt, Artificial Sequence
  Description of Artificial Sequence: Synthetic oligonucleotide
  Sense strand starting at position 3510 of SEQ ID NO: 4043
aggcuagaaucaucauagu

SEQ ID NO: 314913 - RNA, 19 nt, Artificial Sequence
  Description of Artificial Sequence: Synthetic oligonucleotide
  Antisense strand to SEQ ID NO: 314912
acuaugaugauucuagccu

SEQ ID NO: 314914 - RNA, 19 nt, Artificial Sequence
  Description of Artificial Sequence: Synthetic oligonucleotide
  Sense strand starting at position 3516 of SEQ ID NO: 4043
gaaucaucauagugggaau

SEQ ID NO: 314915 - RNA, 19 nt, Artificial Sequence
  Description of Artificial Sequence: Synthetic oligonucleotide
  Antisense strand to SEQ ID NO: 314914
auucccacuaugaugauuc

SEQ ID NO: 314916 - RNA, 19 nt, Artificial Sequence
  Description of Artificial Sequence: Synthetic oligonucleotide
  Sense strand starting at position 32 of SEQ ID NO: 4044
gcaaguagccaagagauuc

SEQ ID NO: 314917 - RNA, 19 nt, Artificial Sequence
  Description of Artificial Sequence: Synthetic oligonucleotide
  Antisense strand to SEQ ID NO: 314916
gaaucucuuggcuacuugc

SEQ ID NO: 314918 - RNA, 19 nt, Artificial Sequence
  Description of Artificial Sequence: Synthetic oligonucleotide
  Sense strand starting at position 219 of SEQ ID NO: 4044
cuauuugagucuguccuua

SEQ ID NO: 314919 - RNA, 19 nt, Artificial Sequence
  Description of Artificial Sequence: Synthetic oligonucleotide
  Antisense strand to SEQ ID NO: 314918
uaaggacagacucaaauag

SEQ ID NO: 314920 - RNA, 19 nt, Artificial Sequence
  Description of Artificial Sequence: Synthetic oligonucleotide
  Sense strand starting at position 224 of SEQ ID NO: 4044
ugagucuguccuuaaacuu

SEQ ID NO: 314921 - RNA, 19 nt, Artificial Sequence
  Description of Artificial Sequence: Synthetic oligonucleotide
  Antisense strand to SEQ ID NO: 314920
aaguuuaaggacagacuca

SEQ ID NO: 314922 - RNA, 19 nt, Artificial Sequence
  Description of Artificial Sequence: Synthetic oligonucleotide
  Sense strand starting at position 263 of SEQ ID NO: 4044
aaguuaccacuguguaaga

SEQ ID NO: 314923 - RNA, 19 nt, Artificial Sequence
  Description of Artificial Sequence: Synthetic oligonucleotide
  Antisense strand to SEQ ID NO: 314922
ucuuacacagugguaacuu

SEQ ID NO: 314924 - RNA, 19 nt, Artificial Sequence
  Description of Artificial Sequence: Synthetic oligonucleotide
  Sense strand starting at position 264 of SEQ ID NO: 4044
aguuaccacuguguaagaa

SEQ ID NO: 314925 - RNA, 19 nt, Artificial Sequence
  Description of Artificial Sequence: Synthetic oligonucleotide
  Antisense strand to SEQ ID NO: 314924
uucuuacacagugguaacu

SEQ ID NO: 314926 - RNA, 19 nt, Artificial Sequence
  Description of Artificial Sequence: Synthetic oligonucleotide
  Sense strand starting at position 265 of SEQ ID NO: 4044
guuaccacuguguaagaaa

SEQ ID NO: 314927 - RNA, 19 nt, Artificial Sequence
  Description of Artificial Sequence: Synthetic oligonucleotide
  Antisense strand to SEQ ID NO: 314926
uuucuuacacagugguaac

SEQ ID NO: 314928 - RNA, 19 nt, Artificial Sequence
  Description of Artificial Sequence: Synthetic oligonucleotide
  Sense strand starting at position 412 of SEQ ID NO: 4044
acuuuauggagguguauag

SEQ ID NO: 314929 - RNA, 19 nt, Artificial Sequence
  Description of Artificial Sequence: Synthetic oligonucleotide
  Antisense strand to SEQ ID NO: 314928
cuauacaccuccauaaagu

SEQ ID NO: 314930 - RNA, 19 nt, Artificial Sequence
  Description of Artificial Sequence: Synthetic oligonucleotide
  Sense strand starting at position 424 of SEQ ID NO: 4044
uguauaguucuccaaacau

SEQ ID NO: 314931 - RNA, 19 nt, Artificial Sequence
  Description of Artificial Sequence: Synthetic oligonucleotide
  Antisense strand to SEQ ID NO: 314930
auguuuggagaacuauaca

SEQ ID NO: 314932 - RNA, 19 nt, Artificial Sequence
  Description of Artificial Sequence: Synthetic oligonucleotide
  Sense strand starting at position 491 of SEQ ID NO: 4044
ggauuuggaugagaaguag

SEQ ID NO: 314933 - RNA, 19 nt, Artificial Sequence
  Description of Artificial Sequence: Synthetic oligonucleotide
  Antisense strand to SEQ ID NO: 314932
cuacuucucauccaaaucc

SEQ ID NO: 314934 - RNA, 19 nt, Artificial Sequence
  Description of Artificial Sequence: Synthetic oligonucleotide
  Sense strand starting at position 592 of SEQ ID NO: 4044
aaugaagcucugugaucca

SEQ ID NO: 314935 - RNA, 19 nt, Artificial Sequence
  Description of Artificial Sequence: Synthetic oligonucleotide
  Antisense strand to SEQ ID NO: 314934
uggaucacagagcuucauu

SEQ ID NO: 314936 - RNA, 19 nt, Artificial Sequence
  Description of Artificial Sequence: Synthetic oligonucleotide
  Sense strand starting at position 637 of SEQ ID NO: 4044
guucuaucugccucacguu

SEQ ID NO: 314937 - RNA, 19 nt, Artificial Sequence
  Description of Artificial Sequence: Synthetic oligonucleotide
  Antisense strand to SEQ ID NO: 314936
aacgugaggcagauagaac

SEQ ID NO: 314938 - RNA, 19 nt, Artificial Sequence
  Description of Artificial Sequence: Synthetic oligonucleotide
  Sense strand starting at position 709 of SEQ ID NO: 4044
accacuuuacagugaauag

SEQ ID NO: 314939 - RNA, 19 nt, Artificial Sequence
  Description of Artificial Sequence: Synthetic oligonucleotide
  Antisense strand to SEQ ID NO: 314938
cuauucacuguaaaguggu

SEQ ID NO: 314940 - RNA, 19 nt, Artificial Sequence
  Description of Artificial Sequence: Synthetic oligonucleotide
  Sense strand starting at position 792 of SEQ ID NO: 4044
uggagaaguuugcuaucag

SEQ ID NO: 314941 - RNA, 19 nt, Artificial Sequence
  Description of Artificial Sequence: Synthetic oligonucleotide
  Antisense strand to SEQ ID NO: 314940
cugauagcaaacuucucca

SEQ ID NO: 314942 - RNA, 19 nt, Artificial Sequence
  Description of Artificial Sequence: Synthetic oligonucleotide
  Sense strand starting at position 1061 of SEQ ID NO: 4044
gcuuaauggagugagguga

SEQ ID NO: 314943 - RNA, 19 nt, Artificial Sequence
  Description of Artificial Sequence: Synthetic oligonucleotide
  Antisense strand to SEQ ID NO: 314942
ucaccucacuccauuaagc

SEQ ID NO: 314944 - RNA, 19 nt, Artificial Sequence
  Description of Artificial Sequence: Synthetic oligonucleotide
  Sense strand starting at position 1077 of SEQ ID NO: 4044
ugagauaguccagagcauu

SEQ ID NO: 314945 - RNA, 19 nt, Artificial Sequence
  Description of Artificial Sequence: Synthetic oligonucleotide
  Antisense strand to SEQ ID NO: 314944
aaugcucuggacuaucuca

SEQ ID NO: 314946 - RNA, 19 nt, Artificial Sequence
  Description of Artificial Sequence: Synthetic oligonucleotide
  Sense strand starting at position 2301 of SEQ ID NO: 4044
uauuuaauguguguuuggu

SEQ ID NO: 314947 - RNA, 19 nt, Artificial Sequence
  Description of Artificial Sequence: Synthetic oligonucleotide
  Antisense strand to SEQ ID NO: 314946
accaaacacacauuaaaua

SEQ ID NO: 314948 - RNA, 19 nt, Artificial Sequence
  Description of Artificial Sequence: Synthetic oligonucleotide
  Sense strand starting at position 2410 of SEQ ID NO: 4044
ccguaagugcuuguguuga

SEQ ID NO: 314949 - RNA, 19 nt, Artificial Sequence
  Description of Artificial Sequence: Synthetic oligonucleotide
  Antisense strand to SEQ ID NO: 314948
ucaacacaagcacuuacgg

SEQ ID NO: 314950 - RNA, 19 nt, Artificial Sequence
  Description of Artificial Sequence: Synthetic oligonucleotide
  Sense strand starting at position 2461 of SEQ ID NO: 4044
gcgaguacaagugaguaga

SEQ ID NO: 314951 - RNA, 19 nt, Artificial Sequence
  Description of Artificial Sequence: Synthetic oligonucleotide
  Antisense strand to SEQ ID NO: 314950
ucuacucacuuguacucgc

SEQ ID NO: 314952 - RNA, 19 nt, Artificial Sequence
  Description of Artificial Sequence: Synthetic oligonucleotide
  Sense strand starting at position 2543 of SEQ ID NO: 4044
cccugagaaccucaguucu

SEQ ID NO: 314953 - RNA, 19 nt, Artificial Sequence
  Description of Artificial Sequence: Synthetic oligonucleotide
  Antisense strand to SEQ ID NO: 314952
agaacugagguucucaggg

SEQ ID NO: 314954 - RNA, 19 nt, Artificial Sequence
  Description of Artificial Sequence: Synthetic oligonucleotide
  Sense strand starting at position 2660 of SEQ ID NO: 4044
cagagugguagcgaacaaa

SEQ ID NO: 314955 - RNA, 19 nt, Artificial Sequence
  Description of Artificial Sequence: Synthetic oligonucleotide
  Antisense strand to SEQ ID NO: 314954
uuuguucgcuaccacucug

SEQ ID NO: 314956 - RNA, 19 nt, Artificial Sequence
  Description of Artificial Sequence: Synthetic oligonucleotide
  Sense strand starting at position 2730 of SEQ ID NO: 4044
ggguuugucacggaaagua

SEQ ID NO: 314957 - RNA, 19 nt, Artificial Sequence
  Description of Artificial Sequence: Synthetic oligonucleotide
  Antisense strand to SEQ ID NO: 314956
uacuuuccgugacaaaccc

SEQ ID NO: 314958 - RNA, 19 nt, Artificial Sequence
  Description of Artificial Sequence: Synthetic oligonucleotide
  Sense strand starting at position 2978 of SEQ ID NO: 4044
gggagaugguaccuucaau

SEQ ID NO: 314959 - RNA, 19 nt, Artificial Sequence
  Description of Artificial Sequence: Synthetic oligonucleotide
  Antisense strand to SEQ ID NO: 314958
auugaagguaccaucuccc

SEQ ID NO: 314960 - RNA, 19 nt, Artificial Sequence
  Description of Artificial Sequence: Synthetic oligonucleotide
  Sense strand starting at position 3035 of SEQ ID NO: 4044
ggcuuaauugguuaaagca

SEQ ID NO: 314961 - RNA, 19 nt, Artificial Sequence
  Description of Artificial Sequence: Synthetic oligonucleotide
  Antisense strand to SEQ ID NO: 314960
ugcuuuaaccaauuaagcc

SEQ ID NO: 314962 - RNA, 19 nt, Artificial Sequence
  Description of Artificial Sequence: Synthetic oligonucleotide
  Sense strand starting at position 3137 of SEQ ID NO: 4044
gagaaucgagauugcaaua

SEQ ID NO: 314963 - RNA, 19 nt, Artificial Sequence
  Description of Artificial Sequence: Synthetic oligonucleotide
  Antisense strand to SEQ ID NO: 314962
uauugcaaucucgauucuc

SEQ ID NO: 314964 - RNA, 19 nt, Artificial Sequence
  Description of Artificial Sequence: Synthetic oligonucleotide
  Sense strand starting at position 3142 of SEQ ID NO: 4044
ucgagauugcaauacauuc

SEQ ID NO: 314965 - RNA, 19 nt, Artificial Sequence
  Description of Artificial Sequence: Synthetic oligonucleotide
  Antisense strand to SEQ ID NO: 314964
gaauguauugcaaucucga

SEQ ID NO: 314966 - RNA, 19 nt, Artificial Sequence
  Description of Artificial Sequence: Synthetic oligonucleotide
  Sense strand starting at position 3169 of SEQ ID NO: 4044
gugucucauauguaggauu

SEQ ID NO: 314967 - RNA, 19 nt, Artificial Sequence
  Description of Artificial Sequence: Synthetic oligonucleotide
  Antisense strand to SEQ ID NO: 314966
aauccuacauaugagacac

SEQ ID NO: 314968 - RNA, 19 nt, Artificial Sequence
  Description of Artificial Sequence: Synthetic oligonucleotide
  Sense strand starting at position 3354 of SEQ ID NO: 4044
ucauucuuccuguauuaug

SEQ ID NO: 314969 - RNA, 19 nt, Artificial Sequence
  Description of Artificial Sequence: Synthetic oligonucleotide
  Antisense strand to SEQ ID NO: 314968
cauaauacaggaagaauga

SEQ ID NO: 314970 - RNA, 19 nt, Artificial Sequence
  Description of Artificial Sequence: Synthetic oligonucleotide
  Sense strand starting at position 3422 of SEQ ID NO: 4044
cucauuaugaagggucaga

SEQ ID NO: 314971 - RNA, 19 nt, Artificial Sequence
  Description of Artificial Sequence: Synthetic oligonucleotide
  Antisense strand to SEQ ID NO: 314970
ucugacccuucauaaugag

SEQ ID NO: 314972 - RNA, 19 nt, Artificial Sequence
  Description of Artificial Sequence: Synthetic oligonucleotide
  Sense strand starting at position 3433 of SEQ ID NO: 4044
gggucagaguuguuuagag

SEQ ID NO: 314973 - RNA, 19 nt, Artificial Sequence
  Description of Artificial Sequence: Synthetic oligonucleotide
  Antisense strand to SEQ ID NO: 314972
cucuaaacaacucugaccc

SEQ ID NO: 314974 - RNA, 19 nt, Artificial Sequence
  Description of Artificial Sequence: Synthetic oligonucleotide
  Sense strand starting at position 3448 of SEQ ID NO: 4044
agaggcacuuggcuaaauu

SEQ ID NO: 314975 - RNA, 19 nt, Artificial Sequence
  Description of Artificial Sequence: Synthetic oligonucleotide
  Antisense strand to SEQ ID NO: 314974
aauuuagccaagugccucu

SEQ ID NO: 314976 - RNA, 19 nt, Artificial Sequence
  Description of Artificial Sequence: Synthetic oligonucleotide
  Sense strand starting at position 3500 of SEQ ID NO: 4044
ucgggagaaagcgagaauu

SEQ ID NO: 314977 - RNA, 19 nt, Artificial Sequence
  Description of Artificial Sequence: Synthetic oligonucleotide
  Antisense strand to SEQ ID NO: 314976
aauucucgcuuucucccga

SEQ ID NO: 314978 - RNA, 19 nt, Artificial Sequence
  Description of Artificial Sequence: Synthetic oligonucleotide
  Sense strand starting at position 3529 of SEQ ID NO: 4044
cuguacucuguggaacaga

SEQ ID NO: 314979 - RNA, 19 nt, Artificial Sequence
  Description of Artificial Sequence: Synthetic oligonucleotide
  Antisense strand to SEQ ID NO: 314978
ucuguuccacagaguacag

SEQ ID NO: 314980 - RNA, 19 nt, Artificial Sequence
  Description of Artificial Sequence: Synthetic oligonucleotide
  Sense strand starting at position 3619 of SEQ ID NO: 4044
cuaaauauugcauggaaau

SEQ ID NO: 314981 - RNA, 19 nt, Artificial Sequence
  Description of Artificial Sequence: Synthetic oligonucleotide
  Antisense strand to SEQ ID NO: 314980
auuuccaugcaauauuuag

SEQ ID NO: 314982 - RNA, 19 nt, Artificial Sequence
  Description of Artificial Sequence: Synthetic oligonucleotide
  Sense strand starting at position 3742 of SEQ ID NO: 4044
ugauuucuaguaugucuuu

SEQ ID NO: 314983 - RNA, 19 nt, Artificial Sequence
  Description of Artificial Sequence: Synthetic oligonucleotide
  Antisense strand to SEQ ID NO: 314982
aaagacauacuagaaauca

SEQ ID NO: 314984 - RNA, 19 nt, Artificial Sequence
  Description of Artificial Sequence: Synthetic oligonucleotide
  Sense strand starting at position 3748 of SEQ ID NO: 4044
cuaguaugucuuuggaagg

SEQ ID NO: 314985 - RNA, 19 nt, Artificial Sequence
  Description of Artificial Sequence: Synthetic oligonucleotide
  Antisense strand to SEQ ID NO: 314984
ccuuccaaagacauacuag

SEQ ID NO: 314986 - RNA, 19 nt, Artificial Sequence
  Description of Artificial Sequence: Synthetic oligonucleotide
  Sense strand starting at position 3758 of SEQ ID NO: 4044
uuuggaagguuuguaaacu

SEQ ID NO: 314987 - RNA, 19 nt, Artificial Sequence
  Description of Artificial Sequence: Synthetic oligonucleotide
  Antisense strand to SEQ ID NO: 314986
aguuuacaaaccuuccaaa

SEQ ID NO: 314988 - RNA, 19 nt, Artificial Sequence
  Description of Artificial Sequence: Synthetic oligonucleotide
  Sense strand starting at position 3798 of SEQ ID NO: 4044
aggagauaacauuguuagu

SEQ ID NO: 314989 - RNA, 19 nt, Artificial Sequence
  Description of Artificial Sequence: Synthetic oligonucleotide
  Antisense strand to SEQ ID NO: 314988
acuaacaauguuaucuccu

SEQ ID NO: 314990 - RNA, 19 nt, Artificial Sequence
  Description of Artificial Sequence: Synthetic oligonucleotide
  Sense strand starting at position 3800 of SEQ ID NO: 4044
gagauaacauuguuaguau

SEQ ID NO: 314991 - RNA, 19 nt, Artificial Sequence
  Description of Artificial Sequence: Synthetic oligonucleotide
  Antisense strand to SEQ ID NO: 314990
auacuaacaauguuaucuc

SEQ ID NO: 314992 - RNA, 19 nt, Artificial Sequence
  Description of Artificial Sequence: Synthetic oligonucleotide
  Sense strand starting at position 3856 of SEQ ID NO: 4044
agaagcaccaugugugaaa

SEQ ID NO: 314993 - RNA, 19 nt, Artificial Sequence
  Description of Artificial Sequence: Synthetic oligonucleotide
  Antisense strand to SEQ ID NO: 314992
uuucacacauggugcuucu

SEQ ID NO: 314994 - RNA, 19 nt, Artificial Sequence
  Description of Artificial Sequence: Synthetic oligonucleotide
  Sense strand starting at position 3878 of SEQ ID NO: 4044
ccagaugauguagguuauu

SEQ ID NO: 314995 - RNA, 19 nt, Artificial Sequence
  Description of Artificial Sequence: Synthetic oligonucleotide
  Antisense strand to SEQ ID NO: 314994
aauaaccuacaucaucugg

SEQ ID NO: 314996 - RNA, 19 nt, Artificial Sequence
  Description of Artificial Sequence: Synthetic oligonucleotide
  Sense strand starting at position 1 of SEQ ID NO: 4045
aacacuuugccugguagau

SEQ ID NO: 314997 - RNA, 19 nt, Artificial Sequence
  Description of Artificial Sequence: Synthetic oligonucleotide
  Antisense strand to SEQ ID NO: 314996
aucuaccaggcaaaguguu

SEQ ID NO: 314998 - RNA, 19 nt, Artificial Sequence
  Description of Artificial Sequence: Synthetic oligonucleotide
  Sense strand starting at position 48 of SEQ ID NO: 4045
guuacauuccuauaucuag

SEQ ID NO: 314999 - RNA, 19 nt, Artificial Sequence
  Description of Artificial Sequence: Synthetic oligonucleotide
  Antisense strand to SEQ ID NO: 314998
cuagauauaggaauguaac

SEQ ID NO: 315000 - RNA, 19 nt, Artificial Sequence
  Description of Artificial Sequence: Synthetic oligonucleotide
  Sense strand starting at position 131 of SEQ ID NO: 4045
acagauuagugcuuuagua

SEQ ID NO: 315001 - RNA, 19 nt, Artificial Sequence
  Description of Artificial Sequence: Synthetic oligonucleotide
  Antisense strand to SEQ ID NO: 315000
uacuaaagcacuaaucugu

SEQ ID NO: 315002 - RNA, 19 nt, Artificial Sequence
  Description of Artificial Sequence: Synthetic oligonucleotide
  Sense strand starting at position 133 of SEQ ID NO: 4045
agauuagugcuuuaguaaa

SEQ ID NO: 315003 - RNA, 19 nt, Artificial Sequence
  Description of Artificial Sequence: Synthetic oligonucleotide
  Antisense strand to SEQ ID NO: 315002
uuuacuaaagcacuaaucu

SEQ ID NO: 315004 - RNA, 19 nt, Artificial Sequence
  Description of Artificial Sequence: Synthetic oligonucleotide
  Sense strand starting at position 314 of SEQ ID NO: 4045
ggacaaggagccugucuuu

SEQ ID NO: 315005 - RNA, 19 nt, Artificial Sequence
  Description of Artificial Sequence: Synthetic oligonucleotide
  Antisense strand to SEQ ID NO: 315004
aaagacaggcuccuugucc

SEQ ID NO: 315006 - RNA, 19 nt, Artificial Sequence
  Description of Artificial Sequence: Synthetic oligonucleotide
  Sense strand starting at position 345 of SEQ ID NO: 4045
cuacccaaagucugguaua

SEQ ID NO: 315007 - RNA, 19 nt, Artificial Sequence
  Description of Artificial Sequence: Synthetic oligonucleotide
  Antisense strand to SEQ ID NO: 315006
uauaccagacuuuggguag

SEQ ID NO: 315008 - RNA, 19 nt, Artificial Sequence
  Description of Artificial Sequence: Synthetic oligonucleotide
  Sense strand starting at position 383 of SEQ ID NO: 4045
gcgcucauaccauaaauac

SEQ ID NO: 315009 - RNA, 19 nt, Artificial Sequence
  Description of Artificial Sequence: Synthetic oligonucleotide
  Antisense strand to SEQ ID NO: 315008
guauuuaugguaugagcgc

SEQ ID NO: 315010 - RNA, 19 nt, Artificial Sequence
  Description of Artificial Sequence: Synthetic oligonucleotide
  Sense strand starting at position 454 of SEQ ID NO: 4045
gaauuuaucugagaaaguc

SEQ ID NO: 315011 - RNA, 19 nt, Artificial Sequence
  Description of Artificial Sequence: Synthetic oligonucleotide
  Antisense strand to SEQ ID NO: 315010
gacuuucucagauaaauuc

SEQ ID NO: 315012 - RNA, 19 nt, Artificial Sequence
  Description of Artificial Sequence: Synthetic oligonucleotide
  Sense strand starting at position 584 of SEQ ID NO: 4045
ccuuaaauggaauguccaa

SEQ ID NO: 315013 - RNA, 19 nt, Artificial Sequence
  Description of Artificial Sequence: Synthetic oligonucleotide
  Antisense strand to SEQ ID NO: 315012
uuggacauuccauuuaagg

SEQ ID NO: 315014 - RNA, 19 nt, Artificial Sequence
  Description of Artificial Sequence: Synthetic oligonucleotide
  Sense strand starting at position 619 of SEQ ID NO: 4045
gcccuugaacucugaagga

SEQ ID NO: 315015 - RNA, 19 nt, Artificial Sequence
  Description of Artificial Sequence: Synthetic oligonucleotide
  Antisense strand to SEQ ID NO: 315014
uccuucagaguucaagggc

SEQ ID NO: 315016 - RNA, 19 nt, Artificial Sequence
  Description of Artificial Sequence: Synthetic oligonucleotide
  Sense strand starting at position 638 of SEQ ID NO: 4045
ggcauaaaucagggccuua

SEQ ID NO: 315017 - RNA, 19 nt, Artificial Sequence
  Description of Artificial Sequence: Synthetic oligonucleotide
  Antisense strand to SEQ ID NO: 315016
uaaggcccugauuuaugcc

SEQ ID NO: 315018 - RNA, 19 nt, Artificial Sequence
  Description of Artificial Sequence: Synthetic oligonucleotide
  Sense strand starting at position 682 of SEQ ID NO: 4045
cuccauguggccgaugaau

SEQ ID NO: 315019 - RNA, 19 nt, Artificial Sequence
  Description of Artificial Sequence: Synthetic oligonucleotide
  Antisense strand to SEQ ID NO: 315018
auucaucggccacauggag

SEQ ID NO: 315020 - RNA, 19 nt, Artificial Sequence
  Description of Artificial Sequence: Synthetic oligonucleotide
  Sense strand starting at position 684 of SEQ ID NO: 4045
ccauguggccgaugaauaa

SEQ ID NO: 315021 - RNA, 19 nt, Artificial Sequence
  Description of Artificial Sequence: Synthetic oligonucleotide
  Antisense strand to SEQ ID NO: 315020
uuauucaucggccacaugg

SEQ ID NO: 315022 - RNA, 19 nt, Artificial Sequence
  Description of Artificial Sequence: Synthetic oligonucleotide
  Sense strand starting at position 1083 of SEQ ID NO: 4045
cugccacucguuuaauaaa

SEQ ID NO: 315023 - RNA, 19 nt, Artificial Sequence
  Description of Artificial Sequence: Synthetic oligonucleotide
  Antisense strand to SEQ ID NO: 315022
uuuauuaaacgaguggcag

SEQ ID NO: 315024 - RNA, 19 nt, Artificial Sequence
  Description of Artificial Sequence: Synthetic oligonucleotide
  Sense strand starting at position 1094 of SEQ ID NO: 4045
uuaauaaauggucguuacu

SEQ ID NO: 315025 - RNA, 19 nt, Artificial Sequence
  Description of Artificial Sequence: Synthetic oligonucleotide
  Antisense strand to SEQ ID NO: 315024
aguaacgaccauuuauuaa

SEQ ID NO: 315026 - RNA, 19 nt, Artificial Sequence
  Description of Artificial Sequence: Synthetic oligonucleotide
  Sense strand starting at position 1096 of SEQ ID NO: 4045
aauaaauggucguuacuca

SEQ ID NO: 315027 - RNA, 19 nt, Artificial Sequence
  Description of Artificial Sequence: Synthetic oligonucleotide
  Antisense strand to SEQ ID NO: 315026
ugaguaacgaccauuuauu

SEQ ID NO: 315028 - RNA, 19 nt, Artificial Sequence
  Description of Artificial Sequence: Synthetic oligonucleotide
  Sense strand starting at position 1097 of SEQ ID NO: 4045
auaaauggucguuacucaa

SEQ ID NO: 315029 - RNA, 19 nt, Artificial Sequence
  Description of Artificial Sequence: Synthetic oligonucleotide
  Antisense strand to SEQ ID NO: 315028
uugaguaacgaccauuuau

SEQ ID NO: 315030 - RNA, 19 nt, Artificial Sequence
  Description of Artificial Sequence: Synthetic oligonucleotide
  Sense strand starting at position 1100 of SEQ ID NO: 4045
aauggucguuacucaaaga

SEQ ID NO: 315031 - RNA, 19 nt, Artificial Sequence
  Description of Artificial Sequence: Synthetic oligonucleotide
  Antisense strand to SEQ ID NO: 315030
ucuuugaguaacgaccauu

SEQ ID NO: 315032 - RNA, 19 nt, Artificial Sequence
  Description of Artificial Sequence: Synthetic oligonucleotide
  Sense strand starting at position 1129 of SEQ ID NO: 4045
ggccacucuugauuaucaa

SEQ ID NO: 315033 - RNA, 19 nt, Artificial Sequence
  Description of Artificial Sequence: Synthetic oligonucleotide
  Antisense strand to SEQ ID NO: 315032
uugauaaucaagaguggcc

SEQ ID NO: 315034 - RNA, 19 nt, Artificial Sequence
  Description of Artificial Sequence: Synthetic oligonucleotide
  Sense strand starting at position 1186 of SEQ ID NO: 4045
cuuccaagcugacuuuaga

SEQ ID NO: 315035 - RNA, 19 nt, Artificial Sequence
  Description of Artificial Sequence: Synthetic oligonucleotide
  Antisense strand to SEQ ID NO: 315034
ucuaaagucagcuuggaag

SEQ ID NO: 315036 - RNA, 19 nt, Artificial Sequence
  Description of Artificial Sequence: Synthetic oligonucleotide
  Sense strand starting at position 1189 of SEQ ID NO: 4045
ccaagcugacuuuagaagu

SEQ ID NO: 315037 - RNA, 19 nt, Artificial Sequence
  Description of Artificial Sequence: Synthetic oligonucleotide
  Antisense strand to SEQ ID NO: 315036
acuucuaaagucagcuugg

SEQ ID NO: 315038 - RNA, 19 nt, Artificial Sequence
  Description of Artificial Sequence: Synthetic oligonucleotide
  Sense strand starting at position 1414 of SEQ ID NO: 4045
gugaaucagugagccaaga

SEQ ID NO: 315039 - RNA, 19 nt, Artificial Sequence
  Description of Artificial Sequence: Synthetic oligonucleotide
  Antisense strand to SEQ ID NO: 315038
ucuuggcucacugauucac

SEQ ID NO: 315040 - RNA, 19 nt, Artificial Sequence
  Description of Artificial Sequence: Synthetic oligonucleotide
  Sense strand starting at position 1589 of SEQ ID NO: 4045
caaauuuagccgugcaauc

SEQ ID NO: 315041 - RNA, 19 nt, Artificial Sequence
  Description of Artificial Sequence: Synthetic oligonucleotide
  Antisense strand to SEQ ID NO: 315040
gauugcacggcuaaauuug

SEQ ID NO: 315042 - RNA, 19 nt, Artificial Sequence
  Description of Artificial Sequence: Synthetic oligonucleotide
  Sense strand starting at position 1591 of SEQ ID NO: 4045
aauuuagccgugcaaucua

SEQ ID NO: 315043 - RNA, 19 nt, Artificial Sequence
  Description of Artificial Sequence: Synthetic oligonucleotide
  Antisense strand to SEQ ID NO: 315042
uagauugcacggcuaaauu

SEQ ID NO: 315044 - RNA, 19 nt, Artificial Sequence
  Description of Artificial Sequence: Synthetic oligonucleotide
  Sense strand starting at position 1659 of SEQ ID NO: 4045
uaauaagggcccuggaaau

SEQ ID NO: 315045 - RNA, 19 nt, Artificial Sequence
  Description of Artificial Sequence: Synthetic oligonucleotide
  Antisense strand to SEQ ID NO: 315044
auuuccagggcccuuauua

SEQ ID NO: 315046 - RNA, 19 nt, Artificial Sequence
  Description of Artificial Sequence: Synthetic oligonucleotide
  Sense strand starting at position 1798 of SEQ ID NO: 4045
ggcguauucgccgcagaau

SEQ ID NO: 315047 - RNA, 19 nt, Artificial Sequence
  Description of Artificial Sequence: Synthetic oligonucleotide
  Antisense strand to SEQ ID NO: 315046
auucugcggcgaauacgcc

SEQ ID NO: 315048 - RNA, 19 nt, Artificial Sequence
  Description of Artificial Sequence: Synthetic oligonucleotide
  Sense strand starting at position 1883 of SEQ ID NO: 4045
cgugaaaguagaugaguuu

SEQ ID NO: 315049 - RNA, 19 nt, Artificial Sequence
  Description of Artificial Sequence: Synthetic oligonucleotide
  Antisense strand to SEQ ID NO: 315048
aaacucaucuacuuucacg

SEQ ID NO: 315050 - RNA, 19 nt, Artificial Sequence
  Description of Artificial Sequence: Synthetic oligonucleotide
  Sense strand starting at position 1884 of SEQ ID NO: 4045
gugaaaguagaugaguuua

SEQ ID NO: 315051 - RNA, 19 nt, Artificial Sequence
  Description of Artificial Sequence: Synthetic oligonucleotide
  Antisense strand to SEQ ID NO: 315050
uaaacucaucuacuuucac

SEQ ID NO: 315052 - RNA, 19 nt, Artificial Sequence
  Description of Artificial Sequence: Synthetic oligonucleotide
  Sense strand starting at position 1896 of SEQ ID NO: 4045
gaguuuaaauacguacuaa

SEQ ID NO: 315053 - RNA, 19 nt, Artificial Sequence
  Description of Artificial Sequence: Synthetic oligonucleotide
  Antisense strand to SEQ ID NO: 315052
uuaguacguauuuaaacuc

SEQ ID NO: 315054 - RNA, 19 nt, Artificial Sequence
  Description of Artificial Sequence: Synthetic oligonucleotide
  Sense strand starting at position 2022 of SEQ ID NO: 4045
acucguucuccgcccuaau

SEQ ID NO: 315055 - RNA, 19 nt, Artificial Sequence
  Description of Artificial Sequence: Synthetic oligonucleotide
  Antisense strand to SEQ ID NO: 315054
auuagggcggagaacgagu

SEQ ID NO: 315056 - RNA, 19 nt, Artificial Sequence
  Description of Artificial Sequence: Synthetic oligonucleotide
  Sense strand starting at position 2023 of SEQ ID NO: 4045
cucguucuccgcccuaauu

SEQ ID NO: 315057 - RNA, 19 nt, Artificial Sequence
  Description of Artificial Sequence: Synthetic oligonucleotide
  Antisense strand to SEQ ID NO: 315056
aauuagggcggagaacgag

SEQ ID NO: 315058 - RNA, 19 nt, Artificial Sequence
  Description of Artificial Sequence: Synthetic oligonucleotide
  Sense strand starting at position 2371 of SEQ ID NO: 4045
aggagaucugguugucuuu

SEQ ID NO: 315059 - RNA, 19 nt, Artificial Sequence
  Description of Artificial Sequence: Synthetic oligonucleotide
  Antisense strand to SEQ ID NO: 315058
aaagacaaccagaucuccu

SEQ ID NO: 315060 - RNA, 19 nt, Artificial Sequence
  Description of Artificial Sequence: Synthetic oligonucleotide
  Sense strand starting at position 3013 of SEQ ID NO: 4045
agagaugugguguguggaa

SEQ ID NO: 315061 - RNA, 19 nt, Artificial Sequence
  Description of Artificial Sequence: Synthetic oligonucleotide
  Antisense strand to SEQ ID NO: 315060
uuccacacaccacaucucu

SEQ ID NO: 315062 - RNA, 19 nt, Artificial Sequence
  Description of Artificial Sequence: Synthetic oligonucleotide
  Sense strand starting at position 3604 of SEQ ID NO: 4045
aaaucuuugugggcuuuga

SEQ ID NO: 315063 - RNA, 19 nt, Artificial Sequence
  Description of Artificial Sequence: Synthetic oligonucleotide
  Antisense strand to SEQ ID NO: 315062
ucaaagcccacaaagauuu

SEQ ID NO: 315064 - RNA, 19 nt, Artificial Sequence
  Description of Artificial Sequence: Synthetic oligonucleotide
  Sense strand starting at position 3734 of SEQ ID NO: 4045
uguaauuguccugggauag

SEQ ID NO: 315065 - RNA, 19 nt, Artificial Sequence
  Description of Artificial Sequence: Synthetic oligonucleotide
  Antisense strand to SEQ ID NO: 315064
cuaucccaggacaauuaca

SEQ ID NO: 315066 - RNA, 19 nt, Artificial Sequence
  Description of Artificial Sequence: Synthetic oligonucleotide
  Sense strand starting at position 3735 of SEQ ID NO: 4045
guaauuguccugggauagu

SEQ ID NO: 315067 - RNA, 19 nt, Artificial Sequence
  Description of Artificial Sequence: Synthetic oligonucleotide
  Antisense strand to SEQ ID NO: 315066
acuaucccaggacaauuac

SEQ ID NO: 315068 - RNA, 19 nt, Artificial Sequence
  Description of Artificial Sequence: Synthetic oligonucleotide
  Sense strand starting at position 3738 of SEQ ID NO: 4045
auuguccugggauaguuaa

SEQ ID NO: 315069 - RNA, 19 nt, Artificial Sequence
  Description of Artificial Sequence: Synthetic oligonucleotide
  Antisense strand to SEQ ID NO: 315068
uuaacuaucccaggacaau

SEQ ID NO: 315070 - RNA, 19 nt, Artificial Sequence
  Description of Artificial Sequence: Synthetic oligonucleotide
  Sense strand starting at position 3855 of SEQ ID NO: 4045
gguuauaguuuaccuaauu

SEQ ID NO: 315071 - RNA, 19 nt, Artificial Sequence
  Description of Artificial Sequence: Synthetic oligonucleotide
  Antisense strand to SEQ ID NO: 315070
aauuagguaaacuauaacc

SEQ ID NO: 315072 - RNA, 19 nt, Artificial Sequence
  Description of Artificial Sequence: Synthetic oligonucleotide
  Sense strand starting at position 3856 of SEQ ID NO: 4045
guuauaguuuaccuaauug

SEQ ID NO: 315073 - RNA, 19 nt, Artificial Sequence
  Description of Artificial Sequence: Synthetic oligonucleotide
  Antisense strand to SEQ ID NO: 315072
caauuagguaaacuauaac

SEQ ID NO: 315074 - RNA, 19 nt, Artificial Sequence
  Description of Artificial Sequence: Synthetic oligonucleotide
  Sense strand starting at position 3897 of SEQ ID NO: 4045
gcuuaaauaucauugauga

SEQ ID NO: 315075 - RNA, 19 nt, Artificial Sequence
  Description of Artificial Sequence: Synthetic oligonucleotide
  Antisense strand to SEQ ID NO: 315074
ucaucaaugauauuuaagc

SEQ ID NO: 315076 - RNA, 19 nt, Artificial Sequence
  Description of Artificial Sequence: Synthetic oligonucleotide
  Sense strand starting at position 78 of SEQ ID NO: 4046
ccuuaaauggaauguccaa

SEQ ID NO: 315077 - RNA, 19 nt, Artificial Sequence
  Description of Artificial Sequence: Synthetic oligonucleotide
  Antisense strand to SEQ ID NO: 315076
uuggacauuccauuuaagg

SEQ ID NO: 315078 - RNA, 19 nt, Artificial Sequence
  Description of Artificial Sequence: Synthetic oligonucleotide
  Sense strand starting at position 113 of SEQ ID NO: 4046
gcccuugaacucugaagga

SEQ ID NO: 315079 - RNA, 19 nt, Artificial Sequence
  Description of Artificial Sequence: Synthetic oligonucleotide
  Antisense strand to SEQ ID NO: 315078
uccuucagaguucaagggc

SEQ ID NO: 315080 - RNA, 19 nt, Artificial Sequence
  Description of Artificial Sequence: Synthetic oligonucleotide
  Sense strand starting at position 132 of SEQ ID NO: 4046
ggcauaaaucagggccuua

SEQ ID NO: 315081 - RNA, 19 nt, Artificial Sequence
  Description of Artificial Sequence: Synthetic oligonucleotide
  Antisense strand to SEQ ID NO: 315080
uaaggcccugauuuaugcc

SEQ ID NO: 315082 - RNA, 19 nt, Artificial Sequence
  Description of Artificial Sequence: Synthetic oligonucleotide
  Sense strand starting at position 176 of SEQ ID NO: 4046
cuccauguggccgaugaau

SEQ ID NO: 315083 - RNA, 19 nt, Artificial Sequence
  Description of Artificial Sequence: Synthetic oligonucleotide
  Antisense strand to SEQ ID NO: 315082
auucaucggccacauggag

SEQ ID NO: 315084 - RNA, 19 nt, Artificial Sequence
  Description of Artificial Sequence: Synthetic oligonucleotide
  Sense strand starting at position 178 of SEQ ID NO: 4046
ccauguggccgaugaauaa

SEQ ID NO: 315085 - RNA, 19 nt, Artificial Sequence
  Description of Artificial Sequence: Synthetic oligonucleotide
  Antisense strand to SEQ ID NO: 315084
uuauucaucggccacaugg

SEQ ID NO: 315086 - RNA, 19 nt, Artificial Sequence
  Description of Artificial Sequence: Synthetic oligonucleotide
  Sense strand starting at position 577 of SEQ ID NO: 4046
cugccacucguuuaauaaa

SEQ ID NO: 315087 - RNA, 19 nt, Artificial Sequence
  Description of Artificial Sequence: Synthetic oligonucleotide
  Antisense strand to SEQ ID NO: 315086
uuuauuaaacgaguggcag

SEQ ID NO: 315088 - RNA, 19 nt, Artificial Sequence
  Description of Artificial Sequence: Synthetic oligonucleotide
  Sense strand starting at position 590 of SEQ ID NO: 4046
aauaaauggucguuacuca

SEQ ID NO: 315089 - RNA, 19 nt, Artificial Sequence
  Description of Artificial Sequence: Synthetic oligonucleotide
  Antisense strand to SEQ ID NO: 315088
ugaguaacgaccauuuauu

SEQ ID NO: 315090 - RNA, 19 nt, Artificial Sequence
  Description of Artificial Sequence: Synthetic oligonucleotide
  Sense strand starting at position 591 of SEQ ID NO: 4046
auaaauggucguuacucaa

SEQ ID NO: 315091 - RNA, 19 nt, Artificial Sequence
  Description of Artificial Sequence: Synthetic oligonucleotide
  Antisense strand to SEQ ID NO: 315090
uugaguaacgaccauuuau

SEQ ID NO: 315092 - RNA, 19 nt, Artificial Sequence
  Description of Artificial Sequence: Synthetic oligonucleotide
  Sense strand starting at position 594 of SEQ ID NO: 4046
aauggucguuacucaaaga

SEQ ID NO: 315093 - RNA, 19 nt, Artificial Sequence
  Description of Artificial Sequence: Synthetic oligonucleotide
  Antisense strand to SEQ ID NO: 315092
ucuuugaguaacgaccauu

SEQ ID NO: 315094 - RNA, 19 nt, Artificial Sequence
  Description of Artificial Sequence: Synthetic oligonucleotide
  Sense strand starting at position 623 of SEQ ID NO: 4046
ggccacucuugauuaucaa

SEQ ID NO: 315095 - RNA, 19 nt, Artificial Sequence
  Description of Artificial Sequence: Synthetic oligonucleotide
  Antisense strand to SEQ ID NO: 315094
uugauaaucaagaguggcc

SEQ ID NO: 315096 - RNA, 19 nt, Artificial Sequence
  Description of Artificial Sequence: Synthetic oligonucleotide
  Sense strand starting at position 680 of SEQ ID NO: 4046
cuuccaagcugacuuuaga

SEQ ID NO: 315097 - RNA, 19 nt, Artificial Sequence
  Description of Artificial Sequence: Synthetic oligonucleotide
  Antisense strand to SEQ ID NO: 315096
ucuaaagucagcuuggaag

SEQ ID NO: 315098 - RNA, 19 nt, Artificial Sequence
  Description of Artificial Sequence: Synthetic oligonucleotide
  Sense strand starting at position 683 of SEQ ID NO: 4046
ccaagcugacuuuagaagu

SEQ ID NO: 315099 - RNA, 19 nt, Artificial Sequence
  Description of Artificial Sequence: Synthetic oligonucleotide
  Antisense strand to SEQ ID NO: 315098
acuucuaaagucagcuugg

SEQ ID NO: 315100 - RNA, 19 nt, Artificial Sequence
  Description of Artificial Sequence: Synthetic oligonucleotide
  Sense strand starting at position 908 of SEQ ID NO: 4046
gugaaucagugagccaaga

SEQ ID NO: 315101 - RNA, 19 nt, Artificial Sequence
  Description of Artificial Sequence: Synthetic oligonucleotide
  Antisense strand to SEQ ID NO: 315100
ucuuggcucacugauucac

SEQ ID NO: 315102 - RNA, 19 nt, Artificial Sequence
  Description of Artificial Sequence: Synthetic oligonucleotide
  Sense strand starting at position 1083 of SEQ ID NO: 4046
caaauuuagccgugcaauc

SEQ ID NO: 315103 - RNA, 19 nt, Artificial Sequence
  Description of Artificial Sequence: Synthetic oligonucleotide
  Antisense strand to SEQ ID NO: 315102
gauugcacggcuaaauuug

SEQ ID NO: 315104 - RNA, 19 nt, Artificial Sequence
  Description of Artificial Sequence: Synthetic oligonucleotide
  Sense strand starting at position 1085 of SEQ ID NO: 4046
aauuuagccgugcaaucua

SEQ ID NO: 315105 - RNA, 19 nt, Artificial Sequence
  Description of Artificial Sequence: Synthetic oligonucleotide
  Antisense strand to SEQ ID NO: 315104
uagauugcacggcuaaauu

SEQ ID NO: 315106 - RNA, 19 nt, Artificial Sequence
  Description of Artificial Sequence: Synthetic oligonucleotide
  Sense strand starting at position 1153 of SEQ ID NO: 4046
uaauaagggcccuggaaau

SEQ ID NO: 315107 - RNA, 19 nt, Artificial Sequence
  Description of Artificial Sequence: Synthetic oligonucleotide
  Antisense strand to SEQ ID NO: 315106
auuuccagggcccuuauua

SEQ ID NO: 315108 - RNA, 19 nt, Artificial Sequence
  Description of Artificial Sequence: Synthetic oligonucleotide
  Sense strand starting at position 1292 of SEQ ID NO: 4046
ggcguauucgccgcagaau

SEQ ID NO: 315109 - RNA, 19 nt, Artificial Sequence
  Description of Artificial Sequence: Synthetic oligonucleotide
  Antisense strand to SEQ ID NO: 315108
auucugcggcgaauacgcc

SEQ ID NO: 315110 - RNA, 19 nt, Artificial Sequence
  Description of Artificial Sequence: Synthetic oligonucleotide
  Sense strand starting at position 1378 of SEQ ID NO: 4046
gugaaaguagaugaguuua

SEQ ID NO: 315111 - RNA, 19 nt, Artificial Sequence
  Description of Artificial Sequence: Synthetic oligonucleotide
  Antisense strand to SEQ ID NO: 315110
uaaacucaucuacuuucac

SEQ ID NO: 315112 - RNA, 19 nt, Artificial Sequence
  Description of Artificial Sequence: Synthetic oligonucleotide
  Sense strand starting at position 1390 of SEQ ID NO: 4046
gaguuuaaauacguacuaa

SEQ ID NO: 315113 - RNA, 19 nt, Artificial Sequence
  Description of Artificial Sequence: Synthetic oligonucleotide
  Antisense strand to SEQ ID NO: 315112
uuaguacguauuuaaacuc

SEQ ID NO: 315114 - RNA, 19 nt, Artificial Sequence
  Description of Artificial Sequence: Synthetic oligonucleotide
  Sense strand starting at position 1516 of SEQ ID NO: 4046
acucguucuccgcccuaau

SEQ ID NO: 315115 - RNA, 19 nt, Artificial Sequence
  Description of Artificial Sequence: Synthetic oligonucleotide
  Antisense strand to SEQ ID NO: 315114
auuagggcggagaacgagu

SEQ ID NO: 315116 - RNA, 19 nt, Artificial Sequence
  Description of Artificial Sequence: Synthetic oligonucleotide
  Sense strand starting at position 1517 of SEQ ID NO: 4046
cucguucuccgcccuaauu

SEQ ID NO: 315117 - RNA, 19 nt, Artificial Sequence
  Description of Artificial Sequence: Synthetic oligonucleotide
  Antisense strand to SEQ ID NO: 315116
aauuagggcggagaacgag

SEQ ID NO: 315118 - RNA, 19 nt, Artificial Sequence
  Description of Artificial Sequence: Synthetic oligonucleotide
  Sense strand starting at position 1865 of SEQ ID NO: 4046
aggagaucugguugucuuu

SEQ ID NO: 315119 - RNA, 19 nt, Artificial Sequence
  Description of Artificial Sequence: Synthetic oligonucleotide
  Antisense strand to SEQ ID NO: 315118
aaagacaaccagaucuccu

SEQ ID NO: 315120 - RNA, 19 nt, Artificial Sequence
  Description of Artificial Sequence: Synthetic oligonucleotide
  Sense strand starting at position 2507 of SEQ ID NO: 4046
agagaugugguguguggaa

SEQ ID NO: 315121 - RNA, 19 nt, Artificial Sequence
  Description of Artificial Sequence: Synthetic oligonucleotide
  Antisense strand to SEQ ID NO: 315120
uuccacacaccacaucucu

SEQ ID NO: 315122 - RNA, 19 nt, Artificial Sequence
  Description of Artificial Sequence: Synthetic oligonucleotide
  Sense strand starting at position 3098 of SEQ ID NO: 4046
aaaucuuugugggcuuuga

SEQ ID NO: 315123 - RNA, 19 nt, Artificial Sequence
  Description of Artificial Sequence: Synthetic oligonucleotide
  Antisense strand to SEQ ID NO: 315122
ucaaagcccacaaagauuu

SEQ ID NO: 315124 - RNA, 19 nt, Artificial Sequence
  Description of Artificial Sequence: Synthetic oligonucleotide
  Sense strand starting at position 3228 of SEQ ID NO: 4046
uguaauuguccugggauag

SEQ ID NO: 315125 - RNA, 19 nt, Artificial Sequence
  Description of Artificial Sequence: Synthetic oligonucleotide
  Antisense strand to SEQ ID NO: 315124
cuaucccaggacaauuaca

SEQ ID NO: 315126 - RNA, 19 nt, Artificial Sequence
  Description of Artificial Sequence: Synthetic oligonucleotide
  Sense strand starting at position 3232 of SEQ ID NO: 4046
auuguccugggauaguuaa

SEQ ID NO: 315127 - RNA, 19 nt, Artificial Sequence
  Description of Artificial Sequence: Synthetic oligonucleotide
  Antisense strand to SEQ ID NO: 315126
uuaacuaucccaggacaau

SEQ ID NO: 315128 - RNA, 19 nt, Artificial Sequence
  Description of Artificial Sequence: Synthetic oligonucleotide
  Sense strand starting at position 3349 of SEQ ID NO: 4046
gguuauaguuuaccuaauu

SEQ ID NO: 315129 - RNA, 19 nt, Artificial Sequence
  Description of Artificial Sequence: Synthetic oligonucleotide
  Antisense strand to SEQ ID NO: 315128
aauuagguaaacuauaacc

SEQ ID NO: 315130 - RNA, 19 nt, Artificial Sequence
  Description of Artificial Sequence: Synthetic oligonucleotide
  Sense strand starting at position 3350 of SEQ ID NO: 4046
guuauaguuuaccuaauug

SEQ ID NO: 315131 - RNA, 19 nt, Artificial Sequence
  Description of Artificial Sequence: Synthetic oligonucleotide
  Antisense strand to SEQ ID NO: 315130
caauuagguaaacuauaac

SEQ ID NO: 315132 - RNA, 19 nt, Artificial Sequence
  Description of Artificial Sequence: Synthetic oligonucleotide
  Sense strand starting at position 3391 of SEQ ID NO: 4046
gcuuaaauaucauugauga

SEQ ID NO: 315133 - RNA, 19 nt, Artificial Sequence
  Description of Artificial Sequence: Synthetic oligonucleotide
  Antisense strand to SEQ ID NO: 315132
ucaucaaugauauuuaagc

SEQ ID NO: 315134 - RNA, 19 nt, Artificial Sequence
  Description of Artificial Sequence: Synthetic oligonucleotide
  Sense strand starting at position 3644 of SEQ ID NO: 4046
cuggaagaauaugucuuua

SEQ ID NO: 315135 - RNA, 19 nt, Artificial Sequence
  Description of Artificial Sequence: Synthetic oligonucleotide
  Antisense strand to SEQ ID NO: 315134
uaaagacauauucuuccag

SEQ ID NO: 315136 - RNA, 19 nt, Artificial Sequence
  Description of Artificial Sequence: Synthetic oligonucleotide
  Sense strand starting at position 3672 of SEQ ID NO: 4046
uucuauagucuguaguaga

SEQ ID NO: 315137 - RNA, 19 nt, Artificial Sequence
  Description of Artificial Sequence: Synthetic oligonucleotide
  Antisense strand to SEQ ID NO: 315136
ucuacuacagacuauagaa

SEQ ID NO: 315138 - RNA, 19 nt, Artificial Sequence
  Description of Artificial Sequence: Synthetic oligonucleotide
  Sense strand starting at position 3677 of SEQ ID NO: 4046
uagucuguaguagacauaa

SEQ ID NO: 315139 - RNA, 19 nt, Artificial Sequence
  Description of Artificial Sequence: Synthetic oligonucleotide
  Antisense strand to SEQ ID NO: 315138
uuaugucuacuacagacua

SEQ ID NO: 315140 - RNA, 19 nt, Artificial Sequence
  Description of Artificial Sequence: Synthetic oligonucleotide
  Sense strand starting at position 3679 of SEQ ID NO: 4046
gucuguaguagacauaacu

SEQ ID NO: 315141 - RNA, 19 nt, Artificial Sequence
  Description of Artificial Sequence: Synthetic oligonucleotide
  Antisense strand to SEQ ID NO: 315140
aguuaugucuacuacagac

SEQ ID NO: 315142 - RNA, 19 nt, Artificial Sequence
  Description of Artificial Sequence: Synthetic oligonucleotide
  Sense strand starting at position 3687 of SEQ ID NO: 4046
uagacauaacugugaucag

SEQ ID NO: 315143 - RNA, 19 nt, Artificial Sequence
  Description of Artificial Sequence: Synthetic oligonucleotide
  Antisense strand to SEQ ID NO: 315142
cugaucacaguuaugucua

SEQ ID NO: 315144 - RNA, 19 nt, Artificial Sequence
  Description of Artificial Sequence: Synthetic oligonucleotide
  Sense strand starting at position 3739 of SEQ ID NO: 4046
uuguuagcagaauaaacuu

SEQ ID NO: 315145 - RNA, 19 nt, Artificial Sequence
  Description of Artificial Sequence: Synthetic oligonucleotide
  Antisense strand to SEQ ID NO: 315144
aaguuuauucugcuaacaa

SEQ ID NO: 315146 - RNA, 19 nt, Artificial Sequence
  Description of Artificial Sequence: Synthetic oligonucleotide
  Sense strand starting at position 3745 of SEQ ID NO: 4046
gcagaauaaacuuggguuc

SEQ ID NO: 315147 - RNA, 19 nt, Artificial Sequence
  Description of Artificial Sequence: Synthetic oligonucleotide
  Antisense strand to SEQ ID NO: 315146
gaacccaaguuuauucugc

SEQ ID NO: 315148 - RNA, 19 nt, Artificial Sequence
  Description of Artificial Sequence: Synthetic oligonucleotide
  Sense strand starting at position 3764 of SEQ ID NO: 4046
ugaggaaacaucugaguuu

SEQ ID NO: 315149 - RNA, 19 nt, Artificial Sequence
  Description of Artificial Sequence: Synthetic oligonucleotide
  Antisense strand to SEQ ID NO: 315148
aaacucagauguuuccuca

SEQ ID NO: 315150 - RNA, 19 nt, Artificial Sequence
  Description of Artificial Sequence: Synthetic oligonucleotide
  Sense strand starting at position 3805 of SEQ ID NO: 4046
gaagacuaugguggcuuaa

SEQ ID NO: 315151 - RNA, 19 nt, Artificial Sequence
  Description of Artificial Sequence: Synthetic oligonucleotide
  Antisense strand to SEQ ID NO: 315150
uuaagccaccauagucuuc

SEQ ID NO: 315152 - RNA, 19 nt, Artificial Sequence
  Description of Artificial Sequence: Synthetic oligonucleotide
  Sense strand starting at position 3807 of SEQ ID NO: 4046
agacuaugguggcuuaaug

SEQ ID NO: 315153 - RNA, 19 nt, Artificial Sequence
  Description of Artificial Sequence: Synthetic oligonucleotide
  Antisense strand to SEQ ID NO: 315152
cauuaagccaccauagucu

SEQ ID NO: 315154 - RNA, 19 nt, Artificial Sequence
  Description of Artificial Sequence: Synthetic oligonucleotide
  Sense strand starting at position 3880 of SEQ ID NO: 4046
ucagguccuggaggaaauu

SEQ ID NO: 315155 - RNA, 19 nt, Artificial Sequence
  Description of Artificial Sequence: Synthetic oligonucleotide
  Antisense strand to SEQ ID NO: 315154
aauuuccuccaggaccuga

SEQ ID NO: 315156 - RNA, 19 nt, Artificial Sequence
  Description of Artificial Sequence: Synthetic oligonucleotide
  Sense strand starting at position 79 of SEQ ID NO: 4047
uugaaacuugacugccaua

SEQ ID NO: 315157 - RNA, 19 nt, Artificial Sequence
  Description of Artificial Sequence: Synthetic oligonucleotide
  Antisense strand to SEQ ID NO: 315156
uauggcagucaaguuucaa

SEQ ID NO: 315158 - RNA, 19 nt, Artificial Sequence
  Description of Artificial Sequence: Synthetic oligonucleotide
  Sense strand starting at position 225 of SEQ ID NO: 4047
auauaauuaucagcaguga

SEQ ID NO: 315159 - RNA, 19 nt, Artificial Sequence
  Description of Artificial Sequence: Synthetic oligonucleotide
  Antisense strand to SEQ ID NO: 315158
ucacugcugauaauuauau

SEQ ID NO: 315160 - RNA, 19 nt, Artificial Sequence
  Description of Artificial Sequence: Synthetic oligonucleotide
  Sense strand starting at position 285 of SEQ ID NO: 4047
auuuguacaugagaaucua

SEQ ID NO: 315161 - RNA, 19 nt, Artificial Sequence
  Description of Artificial Sequence: Synthetic oligonucleotide
  Antisense strand to SEQ ID NO: 315160
uagauucucauguacaaau

SEQ ID NO: 315162 - RNA, 19 nt, Artificial Sequence
  Description of Artificial Sequence: Synthetic oligonucleotide
  Sense strand starting at position 402 of SEQ ID NO: 4047
auugguaagcuaugaccau

SEQ ID NO: 315163 - RNA, 19 nt, Artificial Sequence
  Description of Artificial Sequence: Synthetic oligonucleotide
  Antisense strand to SEQ ID NO: 315162
auggucauagcuuaccaau

SEQ ID NO: 315164 - RNA, 19 nt, Artificial Sequence
  Description of Artificial Sequence: Synthetic oligonucleotide
  Sense strand starting at position 540 of SEQ ID NO: 4047
gucacuuaccagcagauau

SEQ ID NO: 315165 - RNA, 19 nt, Artificial Sequence
  Description of Artificial Sequence: Synthetic oligonucleotide
  Antisense strand to SEQ ID NO: 315164
auaucugcugguaagugac

SEQ ID NO: 315166 - RNA, 19 nt, Artificial Sequence
  Description of Artificial Sequence: Synthetic oligonucleotide
  Sense strand starting at position 550 of SEQ ID NO: 4047
agcagauaugcuuacaaag

SEQ ID NO: 315167 - RNA, 19 nt, Artificial Sequence
  Description of Artificial Sequence: Synthetic oligonucleotide
  Antisense strand to SEQ ID NO: 315166
cuuuguaagcauaucugcu

SEQ ID NO: 315168 - RNA, 19 nt, Artificial Sequence
  Description of Artificial Sequence: Synthetic oligonucleotide
  Sense strand starting at position 575 of SEQ ID NO: 4047
uccuuucggaaauguggaa

SEQ ID NO: 315169 - RNA, 19 nt, Artificial Sequence
  Description of Artificial Sequence: Synthetic oligonucleotide
  Antisense strand to SEQ ID NO: 315168
uuccacauuuccgaaagga

SEQ ID NO: 315170 - RNA, 19 nt, Artificial Sequence
  Description of Artificial Sequence: Synthetic oligonucleotide
  Sense strand starting at position 594 of SEQ ID NO: 4047
caguuacaaacgugaggau

SEQ ID NO: 315171 - RNA, 19 nt, Artificial Sequence
  Description of Artificial Sequence: Synthetic oligonucleotide
  Antisense strand to SEQ ID NO: 315170
auccucacguuuguaacug

SEQ ID NO: 315172 - RNA, 19 nt, Artificial Sequence
  Description of Artificial Sequence: Synthetic oligonucleotide
  Sense strand starting at position 595 of SEQ ID NO: 4047
aguuacaaacgugaggauu

SEQ ID NO: 315173 - RNA, 19 nt, Artificial Sequence
  Description of Artificial Sequence: Synthetic oligonucleotide
  Antisense strand to SEQ ID NO: 315172
aauccucacguuuguaacu

SEQ ID NO: 315174 - RNA, 19 nt, Artificial Sequence
  Description of Artificial Sequence: Synthetic oligonucleotide
  Sense strand starting at position 664 of SEQ ID NO: 4047
auuugagaguuagagcaaa

SEQ ID NO: 315175 - RNA, 19 nt, Artificial Sequence
  Description of Artificial Sequence: Synthetic oligonucleotide
  Antisense strand to SEQ ID NO: 315174
uuugcucuaacucucaaau

SEQ ID NO: 315176 - RNA, 19 nt, Artificial Sequence
  Description of Artificial Sequence: Synthetic oligonucleotide
  Sense strand starting at position 768 of SEQ ID NO: 4047
ucuugauacuagucucuag

SEQ ID NO: 315177 - RNA, 19 nt, Artificial Sequence
  Description of Artificial Sequence: Synthetic oligonucleotide
  Antisense strand to SEQ ID NO: 315176
cuagagacuaguaucaaga

SEQ ID NO: 315178 - RNA, 19 nt, Artificial Sequence
  Description of Artificial Sequence: Synthetic oligonucleotide
  Sense strand starting at position 772 of SEQ ID NO: 4047
gauacuagucucuaggcuu

SEQ ID NO: 315179 - RNA, 19 nt, Artificial Sequence
  Description of Artificial Sequence: Synthetic oligonucleotide
  Antisense strand to SEQ ID NO: 315178
aagccuagagacuaguauc

SEQ ID NO: 315180 - RNA, 19 nt, Artificial Sequence
  Description of Artificial Sequence: Synthetic oligonucleotide
  Sense strand starting at position 996 of SEQ ID NO: 4047
gugcauuugagucggugaa

SEQ ID NO: 315181 - RNA, 19 nt, Artificial Sequence
  Description of Artificial Sequence: Synthetic oligonucleotide
  Antisense strand to SEQ ID NO: 315180
uucaccgacucaaaugcac

SEQ ID NO: 315182 - RNA, 19 nt, Artificial Sequence
  Description of Artificial Sequence: Synthetic oligonucleotide
  Sense strand starting at position 997 of SEQ ID NO: 4047
ugcauuugagucggugaau

SEQ ID NO: 315183 - RNA, 19 nt, Artificial Sequence
  Description of Artificial Sequence: Synthetic oligonucleotide
  Antisense strand to SEQ ID NO: 315182
auucaccgacucaaaugca

SEQ ID NO: 315184 - RNA, 19 nt, Artificial Sequence
  Description of Artificial Sequence: Synthetic oligonucleotide
  Sense strand starting at position 998 of SEQ ID NO: 4047
gcauuugagucggugaauu

SEQ ID NO: 315185 - RNA, 19 nt, Artificial Sequence
  Description of Artificial Sequence: Synthetic oligonucleotide
  Antisense strand to SEQ ID NO: 315184
aauucaccgacucaaaugc

SEQ ID NO: 315186 - RNA, 19 nt, Artificial Sequence
  Description of Artificial Sequence: Synthetic oligonucleotide
  Sense strand starting at position 1052 of SEQ ID NO: 4047
ccaagacuaguuuggcuaa

SEQ ID NO: 315187 - RNA, 19 nt, Artificial Sequence
  Description of Artificial Sequence: Synthetic oligonucleotide
  Antisense strand to SEQ ID NO: 315186
uuagccaaacuagucuugg

SEQ ID NO: 315188 - RNA, 19 nt, Artificial Sequence
  Description of Artificial Sequence: Synthetic oligonucleotide
  Sense strand starting at position 1189 of SEQ ID NO: 4047
agucaacuccuaggaggua

SEQ ID NO: 315189 - RNA, 19 nt, Artificial Sequence
  Description of Artificial Sequence: Synthetic oligonucleotide
  Antisense strand to SEQ ID NO: 315188
uaccuccuaggaguugacu

SEQ ID NO: 315190 - RNA, 19 nt, Artificial Sequence
  Description of Artificial Sequence: Synthetic oligonucleotide
  Sense strand starting at position 1227 of SEQ ID NO: 4047
agugguuaaggaugggaua

SEQ ID NO: 315191 - RNA, 19 nt, Artificial Sequence
  Description of Artificial Sequence: Synthetic oligonucleotide
  Antisense strand to SEQ ID NO: 315190
uaucccauccuuaaccacu

SEQ ID NO: 315192 - RNA, 19 nt, Artificial Sequence
  Description of Artificial Sequence: Synthetic oligonucleotide
  Sense strand starting at position 1228 of SEQ ID NO: 4047
gugguuaaggaugggauau

SEQ ID NO: 315193 - RNA, 19 nt, Artificial Sequence
  Description of Artificial Sequence: Synthetic oligonucleotide
  Antisense strand to SEQ ID NO: 315192
auaucccauccuuaaccac

SEQ ID NO: 315194 - RNA, 19 nt, Artificial Sequence
  Description of Artificial Sequence: Synthetic oligonucleotide
  Sense strand starting at position 1252 of SEQ ID NO: 4047
uaugaaauaucuguggucu

SEQ ID NO: 315195 - RNA, 19 nt, Artificial Sequence
  Description of Artificial Sequence: Synthetic oligonucleotide
  Antisense strand to SEQ ID NO: 315194
agaccacagauauuucaua

SEQ ID NO: 315196 - RNA, 19 nt, Artificial Sequence
  Description of Artificial Sequence: Synthetic oligonucleotide
  Sense strand starting at position 1253 of SEQ ID NO: 4047
augaaauaucuguggucuu

SEQ ID NO: 315197 - RNA, 19 nt, Artificial Sequence
  Description of Artificial Sequence: Synthetic oligonucleotide
  Antisense strand to SEQ ID NO: 315196
aagaccacagauauuucau

SEQ ID NO: 315198 - RNA, 19 nt, Artificial Sequence
  Description of Artificial Sequence: Synthetic oligonucleotide
  Sense strand starting at position 1299 of SEQ ID NO: 4047
auaucuuuccaagguauug

SEQ ID NO: 315199 - RNA, 19 nt, Artificial Sequence
  Description of Artificial Sequence: Synthetic oligonucleotide
  Antisense strand to SEQ ID NO: 315198
caauaccuuggaaagauau

SEQ ID NO: 315200 - RNA, 19 nt, Artificial Sequence
  Description of Artificial Sequence: Synthetic oligonucleotide
  Sense strand starting at position 1353 of SEQ ID NO: 4047
guuucagagugagcaaaga

SEQ ID NO: 315201 - RNA, 19 nt, Artificial Sequence
  Description of Artificial Sequence: Synthetic oligonucleotide
  Antisense strand to SEQ ID NO: 315200
ucuuugcucacucugaaac

SEQ ID NO: 315202 - RNA, 19 nt, Artificial Sequence
  Description of Artificial Sequence: Synthetic oligonucleotide
  Sense strand starting at position 1687 of SEQ ID NO: 4047
caaguauccgcagagauug

SEQ ID NO: 315203 - RNA, 19 nt, Artificial Sequence
  Description of Artificial Sequence: Synthetic oligonucleotide
  Antisense strand to SEQ ID NO: 315202
caaucucugcggauacuug

SEQ ID NO: 315204 - RNA, 19 nt, Artificial Sequence
  Description of Artificial Sequence: Synthetic oligonucleotide
  Sense strand starting at position 2283 of SEQ ID NO: 4047
ggugaaaucuacuuguuag

SEQ ID NO: 315205 - RNA, 19 nt, Artificial Sequence
  Description of Artificial Sequence: Synthetic oligonucleotide
  Antisense strand to SEQ ID NO: 315204
cuaacaaguagauuucacc

SEQ ID NO: 315206 - RNA, 19 nt, Artificial Sequence
  Description of Artificial Sequence: Synthetic oligonucleotide
  Sense strand starting at position 2284 of SEQ ID NO: 4047
gugaaaucuacuuguuagg

SEQ ID NO: 315207 - RNA, 19 nt, Artificial Sequence
  Description of Artificial Sequence: Synthetic oligonucleotide
  Antisense strand to SEQ ID NO: 315206
ccuaacaaguagauuucac

SEQ ID NO: 315208 - RNA, 19 nt, Artificial Sequence
  Description of Artificial Sequence: Synthetic oligonucleotide
  Sense strand starting at position 2286 of SEQ ID NO: 4047
gaaaucuacuuguuaggac

SEQ ID NO: 315209 - RNA, 19 nt, Artificial Sequence
  Description of Artificial Sequence: Synthetic oligonucleotide
  Antisense strand to SEQ ID NO: 315208
guccuaacaaguagauuuc

SEQ ID NO: 315210 - RNA, 19 nt, Artificial Sequence
  Description of Artificial Sequence: Synthetic oligonucleotide
  Sense strand starting at position 2338 of SEQ ID NO: 4047
ugcugaaauuauccuguga

SEQ ID NO: 315211 - RNA, 19 nt, Artificial Sequence
  Description of Artificial Sequence: Synthetic oligonucleotide
  Antisense strand to SEQ ID NO: 315210
ucacaggauaauuucagca

SEQ ID NO: 315212 - RNA, 19 nt, Artificial Sequence
  Description of Artificial Sequence: Synthetic oligonucleotide
  Sense strand starting at position 2342 of SEQ ID NO: 4047
gaaauuauccugugaugau

SEQ ID NO: 315213 - RNA, 19 nt, Artificial Sequence
  Description of Artificial Sequence: Synthetic oligonucleotide
  Antisense strand to SEQ ID NO: 315212
aucaucacaggauaauuuc

SEQ ID NO: 315214 - RNA, 19 nt, Artificial Sequence
  Description of Artificial Sequence: Synthetic oligonucleotide
  Sense strand starting at position 2407 of SEQ ID NO: 4047
uuugacguuccacaauauu

SEQ ID NO: 315215 - RNA, 19 nt, Artificial Sequence
  Description of Artificial Sequence: Synthetic oligonucleotide
  Antisense strand to SEQ ID NO: 315214
aauauuguggaacgucaaa

SEQ ID NO: 315216 - RNA, 19 nt, Artificial Sequence
  Description of Artificial Sequence: Synthetic oligonucleotide
  Sense strand starting at position 2438 of SEQ ID NO: 4047
ucugauugcucacuauaug

SEQ ID NO: 315217 - RNA, 19 nt, Artificial Sequence
  Description of Artificial Sequence: Synthetic oligonucleotide
  Antisense strand to SEQ ID NO: 315216
cauauagugagcaaucaga

SEQ ID NO: 315218 - RNA, 19 nt, Artificial Sequence
  Description of Artificial Sequence: Synthetic oligonucleotide
  Sense strand starting at position 2447 of SEQ ID NO: 4047
ucacuauaugcauagauug

SEQ ID NO: 315219 - RNA, 19 nt, Artificial Sequence
  Description of Artificial Sequence: Synthetic oligonucleotide
  Antisense strand to SEQ ID NO: 315218
caaucuaugcauauaguga

SEQ ID NO: 315220 - RNA, 19 nt, Artificial Sequence
  Description of Artificial Sequence: Synthetic oligonucleotide
  Sense strand starting at position 2665 of SEQ ID NO: 4047
gggaaauggucuuccaagu

SEQ ID NO: 315221 - RNA, 19 nt, Artificial Sequence
  Description of Artificial Sequence: Synthetic oligonucleotide
  Antisense strand to SEQ ID NO: 315220
acuuggaagaccauuuccc

SEQ ID NO: 315222 - RNA, 19 nt, Artificial Sequence
  Description of Artificial Sequence: Synthetic oligonucleotide
  Sense strand starting at position 3037 of SEQ ID NO: 4047
ugccuugguggccaaagau

SEQ ID NO: 315223 - RNA, 19 nt, Artificial Sequence
  Description of Artificial Sequence: Synthetic oligonucleotide
  Antisense strand to SEQ ID NO: 315222
aucuuuggccaccaaggca

SEQ ID NO: 315224 - RNA, 19 nt, Artificial Sequence
  Description of Artificial Sequence: Synthetic oligonucleotide
  Sense strand starting at position 3113 of SEQ ID NO: 4047
gcaggagaguucucagaaa

SEQ ID NO: 315225 - RNA, 19 nt, Artificial Sequence
  Description of Artificial Sequence: Synthetic oligonucleotide
  Antisense strand to SEQ ID NO: 315224
uuucugagaacucuccugc

SEQ ID NO: 315226 - RNA, 19 nt, Artificial Sequence
  Description of Artificial Sequence: Synthetic oligonucleotide
  Sense strand starting at position 3326 of SEQ ID NO: 4047
ucaauuuaaugguacuaga

SEQ ID NO: 315227 - RNA, 19 nt, Artificial Sequence
  Description of Artificial Sequence: Synthetic oligonucleotide
  Antisense strand to SEQ ID NO: 315226
ucuaguaccauuaaauuga

SEQ ID NO: 315228 - RNA, 19 nt, Artificial Sequence
  Description of Artificial Sequence: Synthetic oligonucleotide
  Sense strand starting at position 3616 of SEQ ID NO: 4047
uuguuaaagcuguuguguu

SEQ ID NO: 315229 - RNA, 19 nt, Artificial Sequence
  Description of Artificial Sequence: Synthetic oligonucleotide
  Antisense strand to SEQ ID NO: 315228
aacacaacagcuuuaacaa

SEQ ID NO: 315230 - RNA, 19 nt, Artificial Sequence
  Description of Artificial Sequence: Synthetic oligonucleotide
  Sense strand starting at position 3863 of SEQ ID NO: 4047
ugauaucugucaguuauga

SEQ ID NO: 315231 - RNA, 19 nt, Artificial Sequence
  Description of Artificial Sequence: Synthetic oligonucleotide
  Antisense strand to SEQ ID NO: 315230
ucauaacugacagauauca

SEQ ID NO: 315232 - RNA, 19 nt, Artificial Sequence
  Description of Artificial Sequence: Synthetic oligonucleotide
  Sense strand starting at position 3902 of SEQ ID NO: 4047
ucaggugacuaucccauau

SEQ ID NO: 315233 - RNA, 19 nt, Artificial Sequence
  Description of Artificial Sequence: Synthetic oligonucleotide
  Antisense strand to SEQ ID NO: 315232
auaugggauagucaccuga

SEQ ID NO: 315234 - RNA, 19 nt, Artificial Sequence
  Description of Artificial Sequence: Synthetic oligonucleotide
  Sense strand starting at position 3906 of SEQ ID NO: 4047
gugacuaucccauauguuu

SEQ ID NO: 315235 - RNA, 19 nt, Artificial Sequence
  Description of Artificial Sequence: Synthetic oligonucleotide
  Antisense strand to SEQ ID NO: 315234
aaacauaugggauagucac

SEQ ID NO: 315236 - DNA, 4001 bp, Homo sapiens
gtttctcaatcatatcttaatacaacccaatctcatatcgcagcatttcatccatccttcatgaattttctacttacatcattttcatgttaaatattgcctggtttccactttaggtgaaaaaaaaaataaagtttaacataagtggatttaaaactgtagtgaaaaataagtgtcctatacacctagaaaagatataaaaactcattcagttaagaatagtctccaaagtaaccaagatcctaaaagaaataaggctagaagcaaaagacagcagaataaagatgcacctaatgtaagtcttccctctttatttgaatcagttctcaacatggtaaaaagagggccaaatgagagtcaacccaaatgtgggttctattcccatctccgacctgagtccttaccctcagtttacccatatatacaattcgttgacattttaagtttccctaaacacttacttgattgtaccatgaaaacaatggtgtgtcttcaagcagccttttcatatccaaagggaagaggaaaacgttgtctattgctgacaggaaggaaaaagctgggtatgtggagtttgagggcatcggtgtggaatcagtaagacccttcataaagaacaccacaggccactcaggataaatcttggcagcagactctacggaacaggagaccaaatggggtggctccattctctctgaggtctctagaaacacaatgccacgtctgtggctcaggagggcttccagcccctggtgggacttgaaagaaggcaaacagaagaggcagctggacttcagggtgaactggtagaggaagccacagacaagcagcaaggtgactgacagggagagctggagctccttccgcatgtcctcttctctgtgccagcctgctcctttaaatcaacacaattaattaaaaatcacagctgcaaaacctgacaaagatagcacacaagaaaatgatacatgaatatcatttaaaaacttaaattttaaatatcctaaataaaatatgatgaaatcaagtccagcaatattaaaaaaaaaatgcagccaggcatggtggcatatgcctgtagtcccaactactagggaggctgaggcaggaggatcccctgagtccaagagttcaagactagcttgggcagcatagtgaaaatcatcacaaaaatttaaaaaaaaagaaaaagaaaaagacaagaaatatgtgagaaagaaaaatgcatcataaccaatcaggatttatcttagattttaaaatgatttgacattaaaaataattagttaatagggaaaactattgataaaatgcattatcttaacagtctaaagaagaaaagccatatgatcattttggctcaagagatgccaagaatgtgactaactttaagatccattcacaatttttttaaagtacaaggaaactttcttaagctgattttaaacaatgtctaccagaacatatagcaattatcatacttaatatgaaacatttgaaacatcccattaagatcaggaatatgatatgaatgtccattgtcattgtcactgacatcattggttacaatctgataattgtaaccaatgcaataaaacaagagaaatgaatttctactacgaatattaaaagaggcaaaagtatctctaggttcagaaaacataactgaaaaactaatagaactaagaaaaaaaattaacaaaggaagcaaactgaaggctaaagagttaaataaattgccaagatcacacgattagcaagtagcagagctgtgactgtaacttgcatccacctgccaccaaagtccaggctctgaaccgttacctgcagtgctttcctcaccaaaaatgttagctctaaccaaggagaacacagatctcacgtcttggcaggtctatctttcaaattacatataacccttttagaaaatacaaaacagtgaatcagagcctaacttctagctgcaaatgcagttaaccagtatttgaggtcttagaaatgacaagttcttcctgctacactttctgataaatcaccacccaatcttccaactcaacaacacaggggtaagtaaatcattggcagattgagactaaacacaaaaagttcccaggaagctcctccctttactaagttctcccaaacacagccacttgggaacaagaggggtttaccagatttttaaggtgacccacacactaatcctgcctgtttgtggatctattatgggggttataaagggattatttcacctggagaaaactgtatcctggcataaccttggagccaacatatcctgcacttgatcagtttagcttgaatcaaaattatggacagagaccctgtaaggtggtacaaactcccctttgcaagcacaaagtttgattaaaaggaaagagagcccatcaccacaaataagcaatgaacaaagccctgcagtccaaaggcccagtgatctagaatgagaagtgattccccagtgtcagtcacagtggctgcaggaaggctcctttttccccaaggtcccccttatggggtataagcctcgtcccagtctcaggaagccagctttgttgtcctccactgatgtggcagtccccacatttcccaaggtgttagcactcacctgtggcctattctccaccgcccctgaaatgagctcttagcaatcttctttggagccatcctctgctgagagtcacctgtcttggccatgagcaggtattcacagttccccctggatgctctagtgtgagcaggtaggcctgctcctgagcagactttagattctaacatagcaggtcctacatgaagggagttaaagctgccccactcattgatggcttctggttttctatgtgtccaaggaccccagaaacagcttgtaggtctccacaaacctcttccttttggagctgaatttcttctctggacctcattaattctgggctcagagtgccttggcatctttccaaagttctctgtaattggacagattggttgttctttcctatgaaggggagtggagattagtgctcctgctccttgcccaggggtaactagaggaccccatctgtgggagtgataacacattcctgggcctcaggtgggtcacatatcttagtgcctcccaactgctagcccagtggctaaaactattgaacaagtggtcaaggcagagatcagtgatgtagttaatggcctttgtcaggtgaggatgaatgtgagcatcagcaatgcagtgaaatcccaagcacaaaagtaggacctatctgaccaagaaccaagtagaaagcatgatggaagtagcactgagcttggagttatgcctccagccaccacaggctgagggcactagacaagcccctaaactgcccagagcctcaactcccttgaaaagtgcagaaaatgaccgacctcaggctcactgtgagaatgaaagttctctttaaaccaaagaagttattgtcactttctaccaaggaaaatagaagagaaaaatagaattatatcaatatggatggtatttgtactccctgataacaaacattaagttgttttgttttgttcagatgagtgaaatctattccctattctaaccttgttttttttttttttgtttttttttgagacagagtctccctctgttgcacaggctggagtgctgtggtgtgatcttggctcactgcaacctctgcctccctggttcaagtgattctccttccttggcctcccaagtagctgggactacaggcatgtgccaccattcctagataatctttgtatttttagtagagacagggtttcaccatattggccaggctggtctcgaactcctgacctcaagtgatccgcccactttggcctcccaaagtgctgggattacaggcatgagccaccgcgcctggtccccagtgaacttttaagagggaaatcttcaaccctgtataagagttgatgagatgcgttcagaagccaggtcactggtacttggagcctct

SEQ ID NO: 315237 - DNA, 4001 bp, Homo sapiens
tatgggaggaagataacattttcttatccatgtcagatatgaggaaagtgagcccaggaaggttaaatatgtcgtccatgcctacacaactagtaaatgatatttaccaggattctcaatccagtagtttgattcttgatgtaatgttcataacataatcctttaataaagggtatgaacactcaaagattgccagacatttcagagaagccagcaaaactaatcaggaaaaaagggacaaaccaggagcataaacgatcacaaaaaagcaagcaaacaaacaagcagataattcaggaataagaaagggcattaaaacaacttttaaaaggtatatcgactgagagctctgaaaatacattactttcataaattgtggacagaatgtaagtaaatgaatgaattaattaattaaaaggctaccagagaagaatatatatataattgcttaaataaataaaaattaatataaagactccaagaaaaaaatcaaagacctctcacatattgtagcacagacagcaaatatgagggaaaaaaatgtgtccctttcttaaagctctttaatagctctgcatcacatacagaattaaatcaaaacttactaccagtgcccacaaagcactgtatgatatggcttctaacctctccaaactaattgcaacaatttccccattaaacccaaatgtttcatatgatttcttggacttgtcaatattctgtagctggggtgtttttacttgttggtgtctctgctggaaaacatttttcttagcacttagaatggttggtttcttttcattcttctggtccctaagtagctgtttcctcttcagaatggctttttctcaccatgcatacagtagcccactcttgccttctgcccaaattactctcttttcttccatcttacctccttaaaggtacttctcatgaactaaaatcatttattcatttaattctaatttatttttttctccaccactagaatgtcaactgtgtggggatagactacttgtttgcctaataggatttgagacagttgaattgttgaataaatgcaaaataaaagattaatccaggagttacaacatttatctggtttaagttctgaaaagagatttgttttaatgaagataataaaataaccaaagaagtaatagtaaaatatcatcaaggatccagagagagctacacctttttaatttgccagcatccaagctgcccagttgccaggacacccaggtctccctccccctctcatttgtgcatattgtgccgtctcgtggttaaccctaggcatgtgccaaccagcctgcccattgaatcttttcttgagaacttatttacgtgtccttagtctatattctgaatcccaaagataagtgcataaaaatctgtaactaacacagtgctgcataatcagatgatctctaatttgagtataaaatttaaggaacaaaccatacctaagataagaatttcaaaggagagccactatcgtgatattaaagctacctaaacaaagtactttttagcaaaacctattcaaatgactccttgcttgctgttcttgatatttttttaacatgattccaatacataagacagaaaacaaacaacatttctaagtaacacattgtcaaaggccacagcagttattttaaaagatgaataagtcaataaatcaaaagaatagaatcttgaaaaacttaattctctgggtcaaatggtggtgtatgcacatctgaattcataaaattccaaacttaccaaattttgtatagttttcagatgtgcgtttatccacatcattctccatggctcctcaacgttatctgggagaggcgtataaatataatatgctatgaggatccccacaatcagaaggtacagcgattttcttcccatggtgaacgtcccgcttcttggtctctagaaacacagaaagtaaacctacatgatatgcctgaatagtgtactttaataagcagtgtgcttcagctccacccaaaagctttgaaaacagagttgctcacttagtttaagggttggcataataaggccaaaattttatctgttatccagatacagtcatgttaagtgcaacttcaaggtttaatgagtaataggaaactagggcaaagtttgtcaatgatcatgctgttatctgtattccaataaacagcatgtattgagtaataactcgggaacaaattctttaactctaacaaaattatccatagaaaacatacagaattcagaatctttgttttaaaatagcttatcatggaaaaaacaaattatatatatacacacacacatatatatacatatatatgtgtgtgtgtatatatatatattttttgatacagaatcttcctctgtcacccaggctgagtccataagaagcgttttgtgtcaataagtagtttgtttgagggtgtgttaggcagtgggatttccatgcattgggaagtggggacggggtttaggcaagtgttccaccctgcgatttctatgcagggcctgtgtcagttattgcagaatcctgatgtttctcccgtgacttgggtctgacgggggttggagattttgagagtttgtgtggggtttttttctgttattgtttggatgcctgtcgggggagtgagtgttagggtacagttgcataagctagaggagagggtgcctaggggcactcctttggaaagttcacgctttatgcatagggatgctggttgactgagttctgagtctggggtaagtgttcctaagataaccttgtgttctgcagtatgtgtggtaagattgagtttgtaacttttgagtgcatttacttctccaaaactttggtagcgggggtggagggtcatattgctgagaacccagtctttgaggggagctgggaagacatcttttgatacggtttctgaggggtgtaccagcaggccttggccagggaggggttagtttgactgagtatcatatgtgcctgtggaatggtgcgctgtaggtggagcggtagcgagaaggaggagggaagaaggagtaaatagacagagagcaagtgtaaaggtaaagaattcggcttcatctggagtgaattcctgtaaatccccttgaaatataagattggtgatccaatcaaggaatgctgtgagggtgggatgttctgggtaggaccatgaaaggttttctgtgatgcagtgaaggaagagtgtgaaatgccaggatgggcaaagacaggacatttaggaggggccactatctgttggtggtggctattatacctgctatgaggaggattatgaggcaagaggttacgaatattgagttttttttgtctgaaattccacccaggaggcaagacagtatatattcctatggcaaagagtagagtaagtagggtgattcctgcaagggcagcgtaatggatgatttccattaataagggtttggatacttaatggtaaggggtgataacttatctgctatggttcatgagggaagagtggggtcttcaggcatgggcgttaggcggagtcgaattggtctgagaagagtgctggagtatttgcagggaacagctggttggttagttggtgatgggtcagctgcaggtgctctttttaacctggaaagatggtaccaagacttgtgttctcaaagtttggctgcagtggaggtagcgagaaggacttggaaagggatttcgcactttggcatgagacttgttgatttttaggaagacatattctcctggaaggagtgtttggtcagtggtgccttggtggggttttgtgggggcctggtcagcttgttcgcagaggagatgatggatgagggagagtgttgggaggtattctaattgatactcaggagggggtctgttttgtaagaggaaagggcatccatacattaagtcgaatggactgaggaaggagggggcctttggactggctctgatatgagccagtgctatgggtaaaatggaggtc

SEQ ID NO: 315238 - DNA, 4001 bp, Homo sapiens
tactcataaaaaaacttaaatattacatggttaataacacattaaacaatctttattattataattattccaaggaaattaaggtatttgcagggcaattgagaacatctagccactatactttattttcttaattttaatttaatttttttattttttgagaaggagtcttgctctgtcatccaggctagagtgcaatggcacgatctcagctcactgcaacctccgcctcctggattcaagtgattctcctgcctcagcctccccagtagctgggattacaggcgtgcaccacaacagctggctaatttttgtatttttagtagagatggggtttccccatgttggccaggcaggtcctgaactcctagcctcaggtgatctacctgccttggcctcccaaagtactgaaattacaatcgtgagccaccatgctaacccttataatttaaagacgaggaagtatgcagaaactctaagttgtagccagtaaatgtcaaagccaagtctgcatccatttaaaccagcatcttatgctactacttactagctgatagacattgagaaaattactctctgtagctcaatttccttgtctatatgacagtaataataatacttcagtgggttgtagtagggtttaaacaagttaatgccctgagatacaaattagataatcaagaaagggagcatagtattttctctgtggaagtgacacttgcttacccacttatgcttactcaagaagtaagagcattggagaaaatttatggagaaggtaagcctctagaagtgattacaggggaaactattagcagacatcagaaggagttgactgtggtttcacaaagcaaatatactgtttgctgtacaaagcatcataagacagcctcttctttttataccatgggttgctctctttttttctgatcatcttctgtggccttctcctttgagcctcttattgttaccctttctggaagctgtctggcttggcagaaagagtatgggtttcaaaatgagacagtttatagttcaaattatggagttgttactttttacctgcatatgttcttctcaatctcttccccaaccccataacctgataaaaataattgcaggatagcggggaatcaatggaagtacatattatacaaagcctatacaacttaagaactcaaaaatattagtttctaaccctatctctcccttttaaaggagctatttttgcatgaatttataattcattctgcacatgccaagtcagataatgcctgaaaaccagcaatttagaattgaagatggacaatgaaagccattaaataataagagccttaaattaatatcaaagagttacaaatatcaataatgtgtatctaaacaactaaaagataattacaggactaggttgtccctgaaagttcaaatttaagtcaagttctcaaataaacctcaaagccttttcctttagcaataccatttattttatacatgtcacaataaatttattttatacatgtcacgtttagacataaagtcttagaattgagaattctgtctcactgttactcacagatatagggagttttatttacttaatgttgtttaattaatttactcaaacaagcaatggttctttcaaaatggtgatattaatactattaataaaagagttcataagcacccatttttagtcaataagtcatcccaatttccaacagaaaaaataaatgttaaccttaccgtaaatgtacaagttttagcgatggcatccaaggccattattttccagctttcttcaatgttgtctggcatgggtgtgtaaaaatgagagacaaaaagaacacaaagcagccccaaacagagagcttttagccccataatatccctttttccagcttcttcacagtactgagattaaaatttttcacaaacactgaatagtaactagtagagcaattgtagacttgggaactctctcaggtgatatgatcatcttaacaacatgaagctaattttcaattcaaatgttacagtgtcagtagtaacttgttttgcaagcacacagactggaacagatctcataattcatgagggcgtgcatgcattattatcatgcaatgtaatactcttacagtgtttcttcaccctgtgataccatcatcagcccaaaacaactttattattgagacttaaacctaaatgaaacctaaatgaacctaaatgacagcactgaataagtcatgaagtaaatttttgtgattgggtggtggttgcaacatattttaagaacaggttttttttttttagcttgctgatattaagtcaaaatccaggctaatgccattatcatggattattaaacatgttaacaaaactttcttgtggtgaaacaagttttggattaaaaaacaaggaatgaggcaacttgtccgagttctattaagcatcaaactagaatttttccatagactaagcctggaagctcagtgcaattatctgttttcttagaggattacatagtatgatgatgaactttatgtgtcaatttgactgagctaagggatgcttgtgaacagtaaatagcttgtaaaaaagtatttctaggtatgtctttgagagtgtttctggaaaaaatcagcatttgaactggtagagtgaatgaagaaaatcaccttccccagtgtgggtgggcagaatccaatccattgatggactgaacagaacaaaaatgtgaaggaaaggtaaattcactctcttcttgggctgggacattgttgtaacgctaattcatattagtgctgcctcagcaccaccttcttggtccgtccccagcttgtcacaaatgtcctacatattttgagacagtctccacccagtttctgtttcaacatagatgtggtcccatttgctgccttatttttgctttaagtctggtgaacacaatcatgtaacccaagttctcacacttaaactcatgcttccttcaaattaaccaatccaactctgttgtggaaaacccatctaggtaatcctgaaccccaataaagggttctacccataggtccctccatctctcacttgcttttcatctgctgggtgagagacagtgtccttgactgcctcaccctttccattggctctgcaaggcattttacactcctctttctggaatctgcaagtaattgtagtctaattgtgctgtacctgactacaccaaacctaacttaaattcttcttcacttaacaaaccacaacagacatccatcttctcctgcccttggatatcagagctcctagttcctatgcccttagactctgaaactcacaccagacaccacctccctgctcccagttctcaggtcttcagactcagactggttttatagaacattaactttcctggttctggttctccaccttatatacagcatactgtgggacttctttgcctagataattgcatgggccaatttacacttttttatatatatatacacacacacacacacacacacatatgcatatatacatgctaatatatggatagagacacacatttatatattataactatacaatatataaatttatatattgtatagttatatattatatatgtatatataataaattatatataaatttatatattataaatatatataaatatgtgtgtatataacatataaatttatatatctttatatattatatatgtatatataattatatatagaaatttatatattataactatatataaatatatgtatctatccatatgttatatataatacaatagataatagatatatagatatagatatatagatgtatatagatatatagatgtatatatagatatggatatataaatataatgtatgatcgatatctatatataggtatatagatatacccgtgtttgtgtgtgtgtggatgtgtctatctatctatctatctatctatctatctcctgttggttctattcctttaga

SEQ ID NO: 315239 - DNA, 4001 bp, Homo sapiens
aagattagtactacctttttaaaaggtgggggttggggcggtgagcagtttgaaacagaggaggtcactggaactcatccacaatatgaaatgccacatcaagaagaacacgaacataatcttaattatctaagcacccatgataaccaaagattctttcaaccacttttatttcaaaggatgaagtagaatcagtggagcacaggagcagagagaggcagggacaaaacgacttccctgttatgacacaaataatgactgttttgtgcctacagtgactgctgtggtagacactgctaaactatcctaagggactaagttattctatgtatgaagggtgtggggaacagtgttccattatctctaacacactcatctctactttcctggaaaaagaggcacaatcaggagagcaggcaggcccaaagtaggcacaaagttactgtctgtggccttgaacataaggacaccatcgtctgtgtatctggaacataaaagagggcaccccacgtggaggccggcgaagagctgggaatcctgacaggtttggaaagaaacaaagccccagtctgaagcaagcaagcaagcaaggatggatccccaggccagccattttactgatactatttatatttccctatcttctcgtgtcctcctttaaagttgttggaatatcttttttaaatgctcacttgcctcagctatcaagagaggaagaaagagaagggatttttgtttgtaaaaaacaaacctgttgtccagacatgtacaagggtagaagcagaataatcaacgtgggagaaccccaaagaagtgcccaatagggttgaggccacttagtcagctgcccttttttaccaagattctctttccactgataaaagtgtagacactctccctgcacaatgatactgattcaactgcatggcaggaggagagttgcacgggattaccagactggtgtgtgcaagctgcagtcatcccaacactcatgagtaggtttccatcacctccaggccctcaagctgcacgaggaagacaccacgctaaagggatacgtatttaccacacccactgtaatccacttgttgcgtctccaagcagcctcacctttcatacacgctgcggaccacagtaaaacctagccatctcctcctccaagacctcctgaaactttccccgtcgttcctgtgcccacctgcctccagcctctccgtctgtgcagaaaccaaatggcccctgtgtgataaacacaaagccacccgcggctctgtgtggcagaagcgaaaagagcactggatgaccgtggagagatctgggctgcgttcccggcacagccacggctttgctgcgcgtgcttatgtcacgtacctccatttacccgcttgcaaaaacgaaggggatgacttacttcgaaggtcgctggcggctccgctgcgggttgagcagggtgccccgagccacccgctgcacagcctcccaggtgggcgtttctctcagacccgcttcgcctgggatgcccgggccctagggcgttcccacagcccgctccggcctgcccaggcgagcgcgacccacacccacggcccgcgggcgcagcgccccctggcggccgcggccagggacgtagcccgcgtccctgcccgctcatcccgatcctacctgcctgtcttccagcacacgaccccgtcaccagaccccgggctcacaggcctaggaggcggcggcaggagaccagggggaggccatacgccgttccccaagtctccagtgtcccccgaactgctcgcagccctggccacatcccgccacgccccgaggaaatgcaaaggggtgatccccgtgacaaccgagctggagggcaggggtgcggcagcagccatcacctacctgcgcccctgctccaggacaaccgcgccagccgctcaaccacgctcccgagcatgagccctgcagcaaaacaagcctttatagcggcatcggccgccacaccgcgcaagcgcgctgcacaaagcattcccaaggctgaagggaactgtagtcctccttccgagtgcccagggctgcggacgcggcgaaggactacatttcccagaagcgccggtgacatcccgggggcggtgcgggctgcccctcttcccaccgagctcccggctctgttccatccttccccgtgcctctgcgagactgtctggaatcttctcaggggtcgtgttccctgggggaggcagccgggaggcttaaccgtggccctgtgttcgcacacagtgctgttcgtaggcagagcagtcccaccctgcgtggccgtgtagctgccagaaaagatcgtgaaggtcatcgtagcccgcgtctaacccgttgagagtcgtcaggccggccagccccagttcttatctgttgtggcagatacgattgcttgctcatggttcgaccctgcagtctgcgcagataccgcctttctcactttaacaccaactgcccatcaatgtctcgctgcctggtctctagataataaaatgccaggatcacagtcttagaagtggcaagagccttagaaatgttatgctaactcatcttcttctttttataaatgaaactgaagctcccagaaagattgatccctttatttctctgtttcatcggtaccttcagcatcattaaataaaagccactgttgagttcttccctaccttgtatccgatgctttacataccattcttgtttcctttaatctccattacagccctatgagtaggtattatgagtttttttttttttttaaggagtctggctctgttgcccaggctggagtgcaatggcgcgatctcggctcactgcagcgtccgccttccgggttcaagcagttctccttgcctcagcctcccgagtagctgggattacaggcgtccgccaccacgcccggctaattttcgtattttttaagtagagacagggtttcgccatattggccaggctggtctcgaactcccgacctcaggtaatccgcccgcctcggcttcccaaagtgctgggattacaggcgcgagccacctcaccccgccgtatttttttttaattcaaagattaaaaaagaagaagaagaagaggaagaggaagaaggagaaggtaaagtgacttgtccatctttataacagctagctagttagctagtgtgaagacactactgtatcgtaaagcagcatattcttgcgcacggattgatagaccaatgcaatagaataaagagcccccaaacagactggtgcatccatgtaacttgatctgtgacagaaaaccttacgaatccgtggggaaagcaagaagagtcagtaaatagtactggaacaattggttatacatatgaaaaaacaatcagggattaccgcttcataccacacagaaaaaacccatttcaggtagatcaaacgcttaaatgtgaaagggaaaacttaaaaacttttagaagaagataggaaatatctttatgaacttgggagtaggaaagaactttttaaacaagaaacaaagaataaaggaagaaagattgataatttttgccatattaaaagatggcataaattgaaaagataaaccacaagttataactgacaaagtttttgaataataaatattcaaaataatttctaagttcagtaagaaacggcagataacccaataggaaaataggtaaatgacatgaacagacagctcacagaataggaaacttgagcagccactcaaatatgaaaagacacccaatctcattcataatcagggaaattgatttttttttttttttttttgagacagagtctttctctgtccctcaggttggagtgcagtggtgccacctcagctcactgcaacctccacctccagagttcaagtaattctcctgcctcagcctctggagtagctgggactacagacaccggccaccgcacccagctgatttttgtatttttcgtagagatggggtttcaccatattggccaggctgg

SEQ ID NO: 315240 - DNA, 4001 bp, Homo sapiens
aacctaacattgtttatagccccgtttcacctctccaaattgtcctctaattagaaaaagaaagccaacccctgccaccactattccctcacctatcgccaaaagacacatcaaagttctcaattcgcacatcataggatttgttcttgccagatgattccaaccgactctcctttctgctgcctgcctggctggctgatgcctcttctaagactctttaaagggagaaatggacagctcttagtgctccccaccaccttctgtccaggcaaaagctgctctgctctcttctgagccatgcttcccccactcacagagggttgctggtcttgagcgtgtccttctctgagcgcttctcctgctttgccttaagtcgagcctcggccttctctaacttctttgcattcactgtctaagggtccaaacacatcgacttcactctcgggtgtaggctcagaaaggaaccccaagagagaacatctcgagtaaaccctcttaacttacccatgatgaacagactcaaaggctcaggaaaagacatagtcagaaatccccccaaaagatactccaattagacagtcaactcccaaccccatcacagacagtcccctcccttgcttcctcctcctcaccgaggactgttccctctttagcagtcctggaagtttggttccacagtctgtaagcgataagaaaagcagtcaccttctccctgagggaagggaaactaacattttgagtgactaataggaaccaggcacagacacagatgttttctacaaaaccttataatactgcagatagatggctattatcttccctgcactaaaaacaaaacaaaacaaaacaaaacaaaactcacgtagaaggatacagaggcatagacaaggctggggacagataaccaactcttacaagatcatgcagctggttagcaagttgcaaaactgggggtgaaagcaagtctgtccagctccaggctcttatgcttcctatcctacccaagagcttggagggagaaccctccaacctcctccccacccccatcatgggctcttctgccctcggtaaagacatcaactagctcctacaaccttgtcctgtggaaaagacgtaggagccctaagctgcaggcagcagatggttgggggcggagaaaagcacaggggggcagttagttcaacctcccctcactctcaccgtagttctccgttatctttgacaactggataggggcgtccagtagcacctggctatttccctggctttgtggctcagccctatgtgggtagggatagaaagcgcagagttaggagttgagggaaaagctctatggccatcagatcttcctcccccacctcttgtctccggaccgttcgccgtcccttcgcccccatcaacccctactccctggcacatacagacgcagagtgttgtacatgcgctggcacacggccctgatgcccgcgtcatccttgctgtccccggacacctcttgcaatagttcccctacagcttccaccaggtcatccacagactcgaagtccgcgctgccgctgtgcaagacgcctgggcagggcgtggtagaacgaggaaggtatcgggtagggtggacacacaagcagtttcagaccccagacagaggccccagtccaggctccagacccaaccagcccccgggacaagaggtcatgcagaggagaggcctggcaacagtcccgggcacgacgctcgcttagactttcccccggcctccacttcggtctccccagccggccgattcagttctgcttaccggtcacgtagtcgaagacttgtccgtcaatttcggggaactcgctccgcaggatttcggcgcaagtcgccatgttccactcaggaacccgtccgcgcagtcgctgtgagaccccggcctaggcccgccccccgccctgcccccgaaatctcgcccttccttgcaaggcgcatgtgtagcggtgacgcaggaaaggagcggagtgcgcagagcccggtgggcggggcgagcggggccttgaggagaggcgccgagtctgcgccggagccgcgctctctgcgcgtgcgcgacaccttttccgctgaaagattagccacatgtgcggttctcgctgccttctgggaggtggagttccgggagcgaggggtggggcaaaggctgggagctcaaggtttatcggggccgcgaggcacccgtggtctggcgggtgggagcctcccaagaggcaggcggctgataaagcactttggctttgccaggttttatgcgctccctcgaggcgcgtctgctgctggtgcgtacccagtcaggcccattttggagcctgcccagagctttgctgactcaccccggtccctgactctcagaagccccctgctcagtgctttgctttcgcgggtccccagaccctacgggcttctcagcctggtggccagcgccacccgcctccccgccgcgaccgccttttcactgtgtaattcagccgacctttgtgaattaagcccattcagttcttccaccaccccagggcacgaccaaatccaccgccaaagggcaagaaaaccaggacaacgtggcctgtataaattattccctacctacaccctgagcagacttctctgcactcaataaatgccaataaaaggctatttcctttcaccgattccctcgggaagttaggaatttcctccaaaatgatgctactgctttatatttaacgtgaatattcctccaattggtctctaaaagtggcaccgaaaattacattattacccattcatccctttggattaaacattgccatcatgaggcatcaatcccgatattgaaccattttacaggaaatacaggtaaagaggaatatgttaagtgacttcatggggacaacaggcaaattctgatgtggtaaactacagaactctggtttcttccacaaaattgcaagacctgaagggaaacatcaatttttaaaatttgaggagcattaaccaaccacaatggaccttatctggaaaaatttgataagacacctggttaagtgaacacaaactggatgtgatattaaggaactggccacgcattgatcatagttgaagctgggtgatgagacatggagattcattatattctttttttttttttttttaatttgagaaggagtttcgctcttgttgcccaggctggagtacagtggcgtgatcttggctcaccgcagcctccacctcctgggttcgagcgattctcctgcctcagcccccgaatagctgggattaccggcatgcaccaccacgcccggctaattttgtaattttagtagagacgaggtttccccatgttggtcaggctggtctcgaattccggacctcgggtgatccacccgtctcggcctcccagagtgctgggattacagtgtgagccaccgcgcccagtccattatgttattctccttgcaaatctttcctcctaccacccagtcagcaagatttgggaagcttgggtaaatgatggaattaaaaggtcaatttcttaggatggctacaagaccaaatgtaaacttcacacttaatttatgcttaatctaattagaaaacatctgcctaagaattagagaaagagctgggtgctgtggtggtgcgtgcttgtgatcccagctactccagaggctggggcaggtaagatctcttgagcctaggagtccgaggaccagggggaataaaaaggagctagggaaagaatctatccccagggtactggggcccgctgcggctgcatgcccttgaggctttctaagaggagccaggaaacctgggcccagaacccacaaggataagggcttggatggcccaggaggggcctaactgggacaagacaaggaaagagcctttagagtattcagtacagaaaactgcacggagagcaacaccagttccctccccatgtagctcccacatcaacactaagccagcaactccactctacagagttt

SEQ ID NO: 315241 - DNA, 4001 bp, Homo sapiens
atgagccatggtaacaactcataattttattgtcagctgaggtgggttcaatgagcagtttctttaaaaacaacatatgatagtatcgtttttggaaagagatttcttatagacctatgcaatcactttgcgttttgttggtttggctttctgtaaatggtacacagagattttagtgtaatttaagtacaacagtacaattggtgaacttcataagattatcctacttcatctttttcaaattttcccccattataaaatctatacttgctcttaagaaacaagtagatatttttttaaaagagtcatttataatcccacctcttctttccaaagacactagttttgtgtacttccttagagtctttggactaatacattttctttttttatattaaatgaagccgtcctccactttgaaaacttctcagtcttgagaagagaatccatgtgtgctgctaaagttttccccattttgtaattaagaagttgattttttaaagatgtaactgaaggccttaaagttatcctttttacataaaagcttgtttcaaagtatagagaaatatgccaaatttaaaacttttggtaaggaccagttatgctgatccactcatgttcatttcccatctactcagctgagcactaaaaaaaattctcactatcctcttccagaaatcacctcttaaaacataatttccccgagatgattataatttatttaatgtaagttctaagtagacagattcatataattatattcataaatcatctttgaacataaggattaattcaaagcctggtgcataagtgctcaatgaataagtgctaactagatgaaataatattatactctggttaatgaattgacatactacattttactaggagtatttgcatgtgtaacatgccttttggttgcgcacaattaaatgcaagttaatctgattataaaagtttaaaaactggatacaaaaatctccatacaaaagatctctgccgtgacattaattaccactccaagcaccatgcatcatctgacagctacgtggcaatggtgtgaaccacacacaaagccaaaaaaataaaaggatctaattcaaagactatatatacatataagaggttctctgatttttagcccaaattctagtttcctttgtgcaataatgattatggttctttcactgagtgggtgcagcaagaaagcagaactagaaattaggcttatgagggcgtctacacttttacaaagaacatgcctcgcattgttaggttccctaaactcaaaggagagtcagtctaagcattttaggagtcacaatctacaaattcctagaagtaactaataataatgcattaaatgcacattttaattttttctagtgttggcctttaatgcaggggaggcaggtaaggagcaggagctctttaaactgcacagtgtaaaacgccagcgagggcccggggtgcccagaatgccgcagggccgcggcagagctctcctcacagccttcaccagaagtctacaaagcgcctagaactggggtgttgagaaagggggaggagcatttttgaaccgggcgccaaagacgcactgcacaggcacggtaactgacggaacccgaggcgttcgaaagaacgcatcctactcccgcctttcggacactgacctgggagccaccgtggcgcccgctgaggtatccgtgcaagcagcacgctgaggccacggtggggaccgaaggggacggctgcccagccccagctccgacaaggtacccaggccgccacagctgccaagcgcgcaaccgccatcttcgtagttgtccccgcaccctgcagtgtcccactgagggacacgctacgcaacggaaccgaggctgcgcatgcgcttcaggctggaaggcggaacttgctaaagagctccccgcaagattttcagcttgcgaagagcgcacatgcgcagagcgtcgtggctctttcgtttagactgttggttctactagtagcggggtttggcttggggcctttaagatgttttgagtggcgtcgggaggctgccctatcagcgggctgatagatactacagagctggaagctcagaaaggaaccctatccaacggtcctagatgggaaacgtctcctgtcgaggacaccaggcttgctgcatcacctgcaatcccgccgaccgcgtgacagttttaacctgtactggaaatgctcccaagatctgacattaatctcgcctgtataacctggaatggtatcggacattccccgctctagatctatatgcctgattaacgaaatactgaattatcttggccccctcctcgtgctatatgcgaaaataaatttcagtaaaaaaagatttcaacggaagaatacaactgagaggattaaataaattttaggagaatattatataatccggggacagaagggactttcttaaccaagatttcaaaaccccaacatcataaataaaaaatatatttgtatacgaatttaaactttttgaatggcaaaagacacctcaagttaagagcttagaaaaatggattttgtagcatagatacattaatacttctactcagcctgctcctataaataagaaatataattcaaataaaattggccaacagctataaataggcagcccatataaggaaacatgatgctcaaactcactaaatgaaaaactggaattaaaaaaataatgcctttttccccccattcagttggcaaaaaagaaaaataattggcaaggatgctagacactagcacttatgtatgattgctaggaaggtgaattactaaaatttgttgtgaagtaatatggccacatctattacaattttaaaatatgcatccattccagtgccttttaacgcagtggcaccaatttgtgattatcctatagaaaaacaacactagttcttaagactgcatattatctactacaccgtttttagaggcaaagagaaggaaaaaaatgggaatggctaacaatagaaaaatagttgaataaattgtagtacaagggtttccggactccagctctaaatacctttcaaactaattcctgggggcctcaagcatcaaccatggagttttacgtagtagtttcctatttaaaagttatggtggcttgtgtaatactttgagtatatataagatagtaaagtaacttttattatcctggttataaatttggggggcagtaattggtaccagaattaaaggcaaagtttggatatagtgaatccagcatgtctttggagtcgtgagaacctggactgttggaacagtctggaacagttagataaataaagactgaatagatctctttcttgagaggtgggatgcctctctctactaaggacatatagttaaggacagcaacttgatttcaggacatactccaaaagatgctgagctatgttgcccgttctccattagacctgttgtagactctaagggactaaatcactaaggtgatgcctgatgcatgtcatttcatcatcccttatatttcttttttgggtttttgtgtgtgtgtgtgtgtatgttttagactgagtctcgctcttgtcacccagcctggagtgcaatggggcgatctcagctcactgcaacctccacctcctgggttcaagcgattctcctgcttcagcctcctgaatagctgggattacaggcaccgaccaccatgcctggttaatttttgtatttttagtagagatggggtttcaccatgttggccaggctggtctcgaactcctgactgcaggtgatccaccccccttggcttcccaaagtgctggaattacaggtgtgagccaccgcacctggcccatcccttatatcttaacaaacacttctctctgcatgttttggataattgcaaatattctcaatcacttctctcccttttcttcccctttatttttgcaagtcttcttgcattttacttgcagtaagatgaaaaatctgactgg

SEQ ID NO: 315242 - DNA, 4001 bp, Homo sapiens
gagagatgaatgccgcctgctactccccatcctacacacagacagcttctggccaaatgactgcttcgtggactcctccaatctggggtctctgccaccccagaggacagcccttaggacccaggactcaaacaggacaggcctttgagactgccacttcctgaccttgtgtcttcagtttgtcagtaaaatgggataacctcgtggctgccctcctaagcttcctgtgagatttagataataccgtggactggatcagggctgtccctgtcatttcttgggcctaggatgagcacgcctgcttccttccaggagtccagcaaacacatctttattttatttttatttttctgagacggagtcttgctctgtcgcccaggctagagtgcagtggtacaatctcggctcactgcaacctccgcctcccgggttcaagcaattctcctgcctcagcctcccgaatagtgggattacaggctcccgccaccgcgcccggctaatttttgtattttttagtagagacagggtttcaccatgttggccaggctgttctcgaactgctggcctcgtgtttcacccgcctcggcctcccagagtgctgggattacaggcgtgagccaccgcgccgggccagcacatctttattgagtgccaactgggcgcctgcccgaactaggagccgggggcccgtcttggttcctattcatccctccgggatgttttggggatgtttcctgagcccgcatccccaggcttcggggtcggggggcttgtgagccacagcagcagccgcctttctgctgtttctggaaaaccaggacctagtggaggaagagcgcgttcctcttttcttccagaccactaacaacctcagacgcgcgtctctaactgggcgttagtccagattcccaccgggcgcgagggacatttccttgctgcccactcggggcgcccccgcgcttctccaaagcgggaagggcggggcttaggctgttgccttggcaaccgagggtgcccgcagtactaggaaattgtagtggacctgcagctggccgcctgcgggggtttgcggggggcagggtaaactgtgcccgggttaggtcattggaatatgcgttgacaatgacacacaggtgcacacacgcacaaatacgagtcttgcccccacacgcttttcttttgcacaagctattccctgcatgtacatgcagcctctttgcacacacactggcccgtgtgcaattaatcccttgtaatggtaccctctacatcacgcacacagtcaggcatcaggaagccagagagactgatggagatgcacactttgaaaaccacaggctgatcctcagaaatactcaagcacggtcatacacacaaccgtaagactacacattcacacaagaaaggcacatgcacaggaaagcagacacgcacacacacacaaacccccagaaatgcacacacgcagacaggtagacacatacccttaaaatcacacgcacacagaaatacactcggaagacataacgctgacacaagcaggcagacatcaacgaacacaccccccccccaaaaatataagcgcgcagaaacccactgacggacaccatgcagacacacaagcgtacacatacacccagacccccaagaacatatgcagaccctgcgcgcgcacacacattacacgcgcgcacatgcacattcgcggccccagcgtctgcttcttccgcgggactctgccccggggcgccggggcaaggggcggggtaaagacggccctcccctgggccaccggccggcctccctcccccgggagactcaccgggcccaacgggatgagcgggcgggccccgcccaggcggaaccagcagccgcacagcgccccgaccatggctgcctccgcagctccgcgggccgctccggctctaggcggccaggagcgcggccatctcggcgcgcctgcgcactccgcagccgcgggcctgcaacccagttaccgagtcgtctgcgtggagggggtgctgggggcagagccccagcgctctctggcccgctccccgcccagattttcggaactgtttttggcttgagagccggcggagagccatgtggcttcttctcagtggaacatctccaccctggctcagttctctggcctgtataatggagttaaggataaaacccaccgcacagggttgtcctaggttcttaaggacgggtcaagcctcagaacagtgtccggagcagaggcctcgttgtgtaaatgccagatattgttatgcagcagctccaggtcttggccgacccactttcctgactcctacccactcctccccaccccctccccgacgcacacccacggtcagagcctgggctggccctgggctcgttcacgtctactcatggcgcctgccctggttggcgatgtgttaccaacgtctggcctgtcccagcccaaggctccgcgtggcgaccaggcccagcactgggaggctgtgcagagcgtggcgtttactgcttattgctactctgcagaggttggcaacatctgacccgctctactggcaggaaacaggctcgggggcattgggaaaacgatcaaggccacttggctggacactggcggagcctcgcactcaaacctgtcgggcctcaactccgtgccaggccaacaagttgccctgggcagttcaagctggggataagggggatggggagcaggaagacagcagcaaggatgcgatcccgaaggaactttcctcctcagactgctccatgtccatgtggggcaggtcgctgaagagttcgaaaccgtgctcagcaccgcgtttggggcatgtgagaccgagaggctttgggaaactgacgccgctgtgagaacgagtttagcggagtctatggacgctgcgagcttgtggccacaagagggcgccccggagcacggcccagtccccgcccccgctggatggggcccggcctcttcccagcgttcctcctccggccccaggtcaccgccagcacgcgcctgcttcccgtctgcgcgagtccacgcagctccccaggtacccgccctgcactcctgaccctttcttctctccagtcaaaatccaaccccacctaccccaagtcttcctttctcggatccctgggtcccctccttgggagttgccaccattccctcccggtgctcccttccagagctagcgagccagaaccgtagtccgcggaagcaacctgaccgcgaggtcaacgcgttgggccccaggtggcagcgcgttgagcaccccgcatccccggcgggtcgcctttcccactgggcgcttcggtttccgcctctagaaaatgggctttccggtgtggaagcgcgcctgtggttccagctactgggggtgagccgggaggatcacttgagcccaggaaggtcaaggctgcagtgatccatgattgcgccactgcactccagcctggacgacagagcgagacatcttctcttaaaaaaaaaaaaaagaaaaaaaaaaaaaccgaagaaaatgggcttttagttccggcgcggtggctcacgcctgtaatcccagcactttgggaggccaaggtgggtggatcacttgaggtcaggagttccggaccagctcggccaacatgatgaaaccccgtttctactaaaaatataaaaattaggccgtgcacggtggctcacgcctgtaatcccagcactttgggaggctgaggcgggcggatcacgaggtcaggagatcgagaccaccctggctaacacggcgaaaccccgtctgtactaaaaaaaaaaaaacaaaaaattagccgggcgtggtggcgcgtgcctgtagtcccagctacccgggaggctgaggcaggagaatggcgtgaacccgggaggcggagcttgcagtgagcggagatgtgccattgcactccagcctgggcgacagagcgagactccgtctcaaaaaaaaaaaaaaaaaaattagccaggcatggtgacg

SEQ ID NO: 315243 - DNA, 4001 bp, Homo sapiens
tgtggtggggctccattacaattactgttcttattctcatcgttattatccttttctataaatggggataattcaatagtactagctcataggtggttgataggattaaataaggccatgcatgtaccatgcctagcacgtagtaagggctcagtgctcaatcaacggtaagttacaggtcatgagttgtcaatgcaggccagagggagcccaaattggggtaaaaagcccattttattttattttattctatttatttattttgggacagagtttcactcttgttgcccagaatggagtgcagtggcatgatctcggctcactgcaacctccacctcctgggttcaagcgattctcctgcctcagcctcccgagtagctgggtttacaggcgtgcgtcaccatgcctggctaatttttttttttttttttttgagacggagtctcgctctgtcgcccaggctggagtgcaatggcacatctccgctcactgcaagctccgcctcccgggttcacgccattctcctgcctcagcctcccgggtagctgggactacaggcacgcgccaccacgcccggctaattttttgtttttttttttttagtacagacggggtttcgccgtgttagccagggtggtctcgatctcctgacctcgtgatccgcccgcctcagcctcccaaagtgctgggattacaggcgtgagccaccgtgcacggcctaatttttatatttttagtagaaacggggtttcatcatgttggccgagctggtccggaactcctgacctcaagtgatccacccaccttggcctcccaaagtgctgggattacaggcgtgagccaccgcgccggaactaaaagcccattttcttcggtttttttttttttcttttttttttttttaagagaagatgtctcgctctgtcgtccaggctggagtgcagtggcgcaatcatggatcactgcagccttgaccttcctgggctcaagtgatcctcccggctcacccccagtagctggaaccacaggcgcgcttccacaccggaaagcccattttctagaggcggaaaccgaagcgcccagtgggaaaggcgacccgccggggatgcggggtgctcaacgcgctgccacctggggcccaacgcgttgacctcgcggtcaggttgcttccgcggactacggttctggctcgctagctctggaagggagcaccgggagggaatggtggcaactcccaaggaggggacccagggatccgagaaaggaagacttggggtaggtggggttggattttgactggagagaagaaagggtcaggagtgcagggcgggtacctggggagctgcgtggactcgcgcagacgggaagcaggcgcgtgctggcggtgacctggggccggaggaggaacgctgggaagaggccgggccccatccagcgggggcggggactgggccgtgctccggggcgccctcttgtggccacaagctcgcagcgtccatagactccgctaaactcgttctcacagcggcgtcagtttcccaaagcctctcggtctcacatgccccaaacgcggtgctgagcacggtttcgaactcttcagcgacctgccccacatggacatggagcagtctgaggaggaaagttccttcgggatcgcatccttgctgctgtcttcctgctccccatcccccttatccccagcttgaactgcccagggcaacttgttggcctggcacggagttgaggcccgacaggtttgagtgcgaggctccgccagtgtccagccaagtggccttgatcgttttcccaatgcccccgagcctgtttcctgccagtagagcgggtcagatgttgccaacctctgcagagtagcaataagcagtaaacgccacgctctgcacagcctcccagtgctgggcctggtcgccacgcggagccttgggctgggacaggccagacgttggtaacacatcgccaaccagggcaggcgccatgagtagacgtgaacgagcccagggccagcccaggctctgaccgtgggtgtgcgtcggggagggggtggggaggagtgggtaggagtcaggaaagtgggtcggccaagacctggagctgctgcataacaatatctggcatttacacaacgaggcctctgctccggacactgttctgaggcttgacccgtccttaagaacctaggacaaccctgtgcggtgggttttatccttaactccattatacaggccagagaactgagccagggtggagatgttccactgagaagaagccacatggctctccgccggctctcaagccaaaaacagttccgaaaatctgggcggggagcgggccagagagcgctggggctctgcccccagcaccccctccacgcagacgactcggtaactgggttgcaggcccgcggctgcggagtgcgcaggcgcgccgagatggccgcgctcctggccgcctagagccggagcggcccgcggagctgcggaggcagccatggtcggggcgctgtgcggctgctggttccgcctgggcggggcccgcccgctcatcccgttgggcccggtgagtctcccgggggagggaggccggccggtggcccaggggagggccgtctttaccccgccccttgccccggcgccccggggcagagtcccgcggaagaagcagacgctggggccgcgaatgtgcatgtgcgcgcgtgtaatgtgtgtgcgcgcgcagggtctgcatatgttcttgggggtctgggtgtatgtgtacgcttgtgtgtctgcatggtgtccgtcagtgggtttctgcgcgcttatatttttggggggggggtgtgttcgttgatgtctgcctgcttgtgtcagcgttatgtcttccgagtgtatttctgtgtgcgtgtgattttaagggtatgtgtctacctgtctgcgtgtgtgcatttctgggggtttgtgtgtgtgtgcgtgtctgctttcctgtgcatgtgcctttcttgtgtgaatgtgtagtcttacggttgtgtgtatgaccgtgcttgagtatttctgaggatcagcctgtggttttcaaagtgtgcatctccatcagtctctctggcttcctgatgcctgactgtgtgcgtgatgtagagggtaccattacaagggattaattgcacacgggccagtgtgtgtgcaaagaggctgcatgtacatgcagggaatagcttgtgcaaaagaaaagcgtgtgggggcaagactcgtatttgtgcgtgtgtgcacctgtgtgtcattgtcaacgcatattccaatgacctaacccgggcacagtttaccctgccccccgcaaacccccgcaggcggccagctgcaggtccactacaatttcctagtactgcgggcaccctcggttgccaaggcaacagcctaagccccgcccttcccgctttggagaagcgcgggggcgccccgagtgggcagcaaggaaatgtccctcgcgcccggtgggaatctggactaacgcccagttagagacgcgcgtctgaggttgttagtggtctggaagaaaagaggaacgcgctcttcctccactaggtcctggttttccagaaacagcagaaaggcggctgctgctgtggctcacaagccccccgaccccgaagcctggggatgcgggctcaggaaacatccccaaaacatcccggagggatgaataggaaccaagacgggcccccggctcctagttcgggcaggcgcccagttggcactcaataaagatgtgctggcccggcgcggtggctcacgcctgtaatcccagcactctgggaggccgaggcgggtgaaacacgaggccagcagttcgagaacagcctggccaacatggtgaaaccctgtctctactaaaaaatacaaaaattagccgggcgcggtggcgggagcctgtaatcccactattcgggaggctgaggcaggagaattgcttgaacccgggaggcggaggttgcagtgagccgagattgt

SEQ ID NO: 315244 - DNA, 4001 bp, Homo sapiens
ttaagggtagggaactgtattcaaacaagagccaaacatcccacatgagtcccaattccagtgacaggcagcagggatacagggtaagcaccttagattaaatccagacacctcaaagggttccacaaagggttccaatccagccctgctacttgctggcaggctgttagcagcctttacagtggcagtttcaactgcaaaatgggaacaataatacccagcacacaggggcaaccttggatttaacaggatcacttctggggatagtcactggacactgctaaagcatattgccaagaataccagcgaagcccacttctgtctagaaactatggctgatcagctgctaaggattttttaatcatctacctccaatgacctccaaccatcactccaagccataaaaccctttcacgattgtgtcctggactccaaggccccactacatcaaaaccaaatagtccacctgaaagtagtgtcaagagtcaaaaatgttgtgacaaacaagatgagaacacaacctaccaattacgttcctacttgcgtccacatgacattcaacatttcacctcagtgcaacgaggaagttcatcaacaaacctcaacaaataaacaaaactcaagagaataacttcctttctaatatttcacaatttttccccatgacatctttccaaatatccctgtcttcatggtactccatattctatcatttaggttatgtttcctaggcaaatttctccagacgtctgaagtagaaccgacgtcaaaaaattaaatatatatgggggaagtttactttccaatacaaacgacaggccttgagaaacaaggcaataacctccataacaatttaattattccactcattaactactattcttctactaacaagtgcaagaagtcatttaggtgtagaaaagaataaactcactatacctgtatataaaaaagtttcacattagacatctgccctccaacttccacagtttcctatacattatgtgtgttcttctaaggcacatgcaacacacacttcgccagtaaagccagaataatcccagaagcgcaaacaaataagggacagtggagcttgcaagccaaagaccttcatccgaaagatgaattatgacatttgaacgtgtatctctatcttaagggctaactttctttctatgaagtatctgaaactcacagccatacacccacttccctcactccttctcccctccctccttcccggcacccccgccctcccgccgcttcccgggcgaattcgggcctctaatatcccctccaaggaagcgccgccccttcctacggctacgggaaggatcgtccagtggctgaggctggacagagcacaggtagtacctgtagacggaagccgcgatgggaggctgacagacccggtcatttcccgcgcctcgcagtcaggtgcagggtcgaccgggcaccgcccgccggcggcattggggcaggccgggtcccttggcagagcccgagccggtgcggccgccgcggccagctccgtcgccggcccgcggggtggcttatacaacaacggggcggaccctccgcgcggggtcaaggcggcctcccggcgcggccggagtccggctcagacacctcggggccccgacgctgaggggagcctctcccaggcagagcggcgccgggacgcctctgggcgccgcgcggactcatgccggggagggtcgaggaagccgcccgtcgtcgccaggcgggcggcgactccttggtgctgcccgctgggccctaacccggcccgcgcggagggtgcgcgccggagacacacgaagccccctgccggctgcgcttacctctctccggtgtcggcagagtccacctcctcctcctccgccgccatagccgccgccgcgcaagcgccgggacttatctcgaagccggctgacaggccgactgggccgccccgggctggcgcggcacttaaggcggcgcaggccgccagcgcatgcgtcttccgcgcactagcacggcccggcggcgcgcccgcgtttgcgcgtgcgcggccttgcctccggctttgcgtccgccatccccagccagcatgcactagttctcccgcccgacgctcccgggtgtaagcgcggggcgggacagtcagcccagagggactggcgagactcacccgaatgagttaggtgttttagctaatttgaataatgactgtattcatgcatcaccccgtcggtgttggctgtcaggtggcaccttggggacggaggtgcgtccggtcctggaagagcctagctagtgtccgatagatggtgcagtggcaaatgaaatggcgtaatcgaggtgctgtgtggcgtcccgccagcctttccccgcgggttggggggccagggggagagggcgactcacaggagccttcagtcagttgagcactgctctaggtgctgatgttactgtagtggccagagccagcaatttccctcccactcgactctctagatacctgggagggtgaaaagagtcggtgttggccgggcgcggtggctcaggcctgtaatcccagcactttgggcggccaaggcgggcggattttctgaggtcgggagttggagaccagcctgagctgaagaaaccccgtctctattaaaaatacaaaattagccgggcgcggtggcgcatacctgtaattccagctactcgggagcctgaggtaggagaatcgcttgaactcgggaggcggaggttgcggtgagccgagatcgcaccattgcactccagcctgggcaacaagaacgaaactccgtctcaaaaaaaaaaaaaaaagtctatgtttaggtacttcgagttattgaggtgaaatgactaacctaaatagcagtatttcttgacctgttttcaagccttttagcaatcaggtgcaacctgcttttggaattctgccacccactactactcatccatttatgtttggtgtgtgtctactatgggctcactttgttctaggtgcttgaaaacaatgggttgaaatactgctcctgttttgatagatcctacgcgaatatattaacctttattttagactcagttcattgttctccttccctgactctcctccctctttttctctcctctgagccccactgtaaacctgtctttatcacccatctagctctcaggttctcagccttgtgtaattgttacagcttttaaataaacattatcgaatatctttccaactacacgagaaagtcctctaggataggaatggtgtcttctgtaatttagaggggggaaagccacttataatctcttaggcatagtaataactaatacattttttattgtgtttgatctaattcataaaatattttagggaagaccagaacatataaaaaacatttttacaggaattcctggttgtttcatgaaagggccgtatattcaaagtgacctccaaatacagaaggagctgagaaactaaagaatgaaggagacaaatccagcttgtcagcaaaaggtgatttattagggaacttacggacagaagcatggtcttggacagcagcaagacaggtaaatctctgtgctgttaccctcccagactaaggttgttttgacctaagggcaggtaggtaagtatgtgctctgatacaatttgggtgttgtcctctctaaatctcatgttgaattgtgatctccagtgttagaggtggggtttgatgggtggtgattagattctgggggtgaatttctcatgaatgatttggcactatccccttaatgctgtccttgcaatagtaagttcttgtgagatctggttgtttaaaagtgtatggcacctacccctcactctcttgctcctgctctagtcatgtaagatgcctgctcccgctttgccctctgccgtgagtaaatgctccctgtggcctttccagaagccaagctgataccagcacctgtatagcctgcagaaccatgagccaattaacctttctttataa

SEQ ID NO: 315245 - DNA, 4001 bp, Homo sapiens
ataaaaataataaaaagatgaaaatagagaaagtctcataggcctttctgagcacacaaaatggttaatttctgtagagtcagtgtgagccatttattaattatttttttccagtaattcaaggtagtggtcaactaccactcttcataataacagctgctgctttctgagtgcttaaaacatgctgggccctgtgcattattttatctaaatattgccactaccctttaaagtgggtactattaccagaagctgagaggcccttgctggtctgagaaaaacaaattagtgctagaaacacaggtgattaatttctgttatttctaatttcctatattataacaatgttcttgataagaatttgttgaaattgggtaaaaagtctagtggttcgaggtcgggttgggggggcggttgggggaagggggtggttctgaggccagactcacttcgtgtcttgggaaggtaccacctctggaagcctcatattcctgctctcaggaatgggcacagcggtggtacctacctcaaggggctgttggggaaagtatggcaggtaattcttttaaggggcttaggacagggcctggcacacaagatttgcttattctatgtcagctattattcattataaactactttaaactcttagccaggtggagccactagggatttctgagcaggcgggagcagcggggaggggggcggcgagataaatgagggcctccaggtcccagctggagtaagacccccactttatttcctcttcctaaccacccagctcctggggcatacaaagggctcaaaatacatattctctgcatgcacagtatctagaccctctggcatcctcctcttcccccactcccccatgcctcactctgtcacctggcctcgctgtgggctcaggggcgcaaaccctgcacgtgcactgccctgcagccggcgttacacaatccgcatttctaaggcagccgtgaaacctgtgtcgctgtaggcgggggaccgcaagttgccggcgggtacctggctggacagcatcctgattcaagtgtttcgacacggaaggggcgcaagggcacgggagccggggcaggctggggaaagggaagctgaaaggctgctgggggaggggagtagcggagcgagatcttggggacggcgcggaggcggcgcgtgacacggagcaagatgctatctgggtgggcgagctgcagtccttctccaggaaatgggggaaacagggctgcaggaccccaaaatcctctcggcactgcgaggggcgcctaagggctgctgcgggcgcagggggtggggaggcgaagtagaaagagggtgcaggtcccgacccgtcctcactctgtcccccggcttcaagaggctggctggacccaggaaatggggcgccgggtttcgggcatctcaaacctatccaggcagcgggaggtgggggcagcgcccgcgcggggagcggagtggaaaggcaagtgcagatcgccgactctttccactcgatgcgccgctgcagggagacactgggggagaggtcacggggccatcagggcgccccatccccctaggagcgcaccaccgcccgcccgcccgcctccgctcacctgaccagcctcaaccgcctgggtcccgccgccgggcccggaccccggccctcggtctctagccccgggctgggacctgccgccgggctcctacccgcgccgctcccagctccggcgcccagcccagctggactccttaaaggcgcagcgtgccggttcgcgtcctccgacagaaaagccgccccgccccgacccggcgccgcgcgctgtcccccagcggccgcgctctgtttgggggctccggggcgcttatccccagttcctccgcgcgctgcctcacagcgttaaacccggagggtacagttagcgtctcgcacaacccaacgccggcaactgtctcctagcacccgaaagccacggcgagagcaggatcgcctacagaggtaccgggggcggagcccgagcgcccggtcccgcccccgcccccgcccccgcccccgccccgccccgccccggaacgcacacggtggcggggcgcggggagggcctctgagcccgcagagccacacacagttccacatccccggcccgaattcttcccggcactgtttcacttactgagcacctactgtgtgcctggcgcggctgggcattaaacccgccaaagtgactcaggcaggatctctggatctctgccccgaagggcatcagagagaaagggacaggcaggggttctcaggcagcaaagcaacactgcttgacatcggttgtctcacgtaatcctatgaggtaggcactggggtcgacttcttttctcagaagacaccgaggctcagggaggtgaggggcttgccctggatagtccaggaaatgggagaaatgggggcgcaggagcccccaaatcctctggacactgcgagggctccaccccaaggaacaccgtaggcgctcatgctcccgccctggctctcgggtgtttggagacagttgccggcgtcgggttgtgcgggacgtcagactgtaaggactgaactgggaattccaaccgaggatcgtctgactccaaagctatacgggagaaatgggcacctggaaaggccttcggccacctctggttaaacccctgctatggtcgtttctttcttttagggacagttaaaccccagcttggcctggctactcttccgtgttttccatgtctcagtttagctgccacttcctccaggaagccttcagtaagacccctttgggctcacactgcactgtgggcttctttcatcaaaacatgtattcgttcatttaacagatatttactacacctgttaggggccttagtggcacccagatcttcctgctgcactgagtgcttggcctgccactccagacgtcaaggggccagggctcagcaagactctcttggccgtttaaatcccccacaaaggcagcctttgggcctcagcctgccaaggcctccacgctggtggagcctggctgagtggtgcaggtcctgggttttaagaataggacacagtcaagaagtcccggagaagtggcaaaggggcatctctgaagccactagtgatccccatgcctgtaaaccctgctctgcagggcagctggaattcatccggagtttgggacagtccccctggcttgggctggagcattttcctttaaattgttggctgccttatcacttagacttcaatggctgcatgtgattcacttcagggaatggcccccgagtttcagtggcaatttattcaccaaacagcgggttgctcagtcccacctctctggctttatctctccttacggctgaagcagaacctttccaagccagcagtccaccaacatccccagagcaggtccacagagatagcacaaaatgtggggattaaatgtccttcagtcactactggccacctattggattagcatcttggactcaggaacattcaccaaaacaggagtccagggggtgaataaatagacaatgaaattgatgaatgacttcctggaaggccccagcctagaagccatcaatacacctggtataaagtttaaaacaattgctccttagtcttttaattttccctctccaaaaccttaaaaatgggtagttcatcagtttggtgggttttttatttaactcacagcctgtgaccctgggcgtctccaagggcctggaatttctatatcccgagggtttttttccctcagagttttatatttagaaacacctttttgagccccatgtgggagtcacattctgggtgacttatctccactggatggctgacaggagagaaaccttattagctccagttttacagtgaaggaggcaagaggagataagggaactcacctccggcccctccctgagccggtgatacccctgagtgctgtcactgaggaatcccacctaggtgggagaccagggag

SEQ ID NO: 315246 - DNA, 4001 bp, Homo sapiens
ctccacaagttattgacaggaatcagctgcccttccaccctcaccccaaactctacccattgtaggacaaacagtgcacctatgcctggagcacagtttgaaaaagatgacttcagctaaaaggtcctcaatagctttccaataaagaaaaaacataatattaaaaacaagacttgccatttcttttatcattattataatttgatgtttttttccaaattaccaaaactacaaatattttttaaataaacaacaaaagttttgtggccattttcgacaactatgtttttttttctttcccattataaataaagaaaaattgtgtcaagagatttgtgtctagtgattgcaacacgataattaaagcactgggattgtccagaagtttgcagtaacaaagttgcacctatatcatccctatgcaatgaataaaaagtaaaataaaagtcttctgtaggtattaagactgagaaaacccccagactcttctcaaatgatatgttactgttaaatattccattagtaggtacaattaactctgaatgcttgtggctcataattgatttatttaaatcacagttttattgtgatcaaggagcaaaactcttggtagaaaaagatctaagagtgcttgttttttatttttctttaattatttgatcagagttgagaaagtttacttagtcttttttattgctgttcacattatcgtgtgaaatatcaactagccaaccgcttcagccttcacatgctggattcaagtttcactttacccaccgaggaaagaacagttttcacttgggacaagatgatcctggggcagactacccagagagaggacctagggatgatcttttggatattctgacactagcaacctttctttctgactttaggcacaccaggttcttgacaagcctgcagctctgcattacttctgatgttttccatcatgactgtatggtaaattccagcctgtttttcacaatcctgctgactacagcagtctgcaaccataaaaagccttcacagacctagagttggcttagagaagtgcctctgcagagaaacaaaagtacatgcaacatttatgttcagagacaggagagaggcaacagcctcttgttttggtttctgatgggctcaaagggttgtttttagggtcaaaatttagaaattttaattttcttctgataacatttgtaaacaaaataccaacactaaaatgagagcaatttagccaagaaaggggggagtgtcctgtccaacagctcaagccctcttccaaactccactggagggacgtgtctgcaaatcagcacatgaccgtactttggtctgacctgcctagactccctcagcttcctggtcaacaggtatgtttgaggttcacaccaaagattcaaggtttcagaaccagcttcttttgaatcttaagctagtactgattcagtctctggggaggaggataaaaacaccaaacaactctttctaacagactataatatccatttacacaatatgattcaatacacaagcactatagttagaaagtatacagttcaagctctgatgaacagctgctcaatgtaataagtttgttttcatttttgcaataaagagctgtaattgaaaagtaaataacaggaggggaaagtaaaagtttaagagaccccttcacacatttgaactttgaatctctgcagaataactctattccccccgtatggtaaagcagatcatatttaaaatcaacatttaaaaacatctatatcttaatattatttttaaaacataaaacatcaggctacttgccttttggcaatttctgtgcatttcccagggctagtgtaatacttccacagagaagtagacaccccaaactggagagcatgttgcatttgccacctcgcatggggaatgatgctggtgggtgcctcgcaaccctggagctgcatttaagtggactgtctcccagtgacagaggcgggcggctgcacttagctgtgccgtgggcttactcacagggggtggagacaagatgacatcacaccctttcccacacacaccaaaaaaaaaaaaaaaaaagcacaacagcaaaaacatatcatcacatttctttctttctgctaagttgtaactgtgtctcttccttctgtgatataaaaattcaaattatggcagatctgtatttgtgaaagaagaagtatttaggcagttttgaaacatttgataaactattttaaagaatccagaaacaatgtactaaaagctatcaaaatgttaaaaatataaaataaaaccttattaagaaggaaactttttaattatccagtaaaccaacccaattcttttaaatgggagtaaactcataaagatatattttgagccattctgtagttcctgtattatgagaaacatttaagagtaagtctttggctacaaagctatacattacgttataatatatatgtgtatacacatatattcaacagatgtagatgtagagacgtagagagagcactattactatgtgagcctcaactgtggactgagttctgtaatcgagtctttacctactttactgtattttaatcttcccagtgcctctgcaggagatatggcattatccccattttgccattaagaaaagctgaggaaaaaaggttaagtgtcctgacaatgctagtatattctactgcttaataacggatgccacttactaatgaattgtccttgagcaaacttcatctctatattatcaatattgatgacatttaaatgcttgctccgtgttaggcactgatcgaatcagtttacacatgttaagacatttattcctcaaaacggtctatgaggcaggcattgtcatcatccccattttacagatagataaactgggcacagagaggtcaagtgaaagtccaaggtcacagtgttggcattttaagcagcccatttaactatagtgcttccagtcttaattactacattttagattctaaaataaagatgacagtatcaatttcttacatttgctagcagtttttcgaaagtagttgccatagagcctgacacacaggaaacatttactaaatggcagtcactggaaacaataataatgaaaatgataagcccccagttaagtagaactataattctaacctgggcatatttacctctgaagtccacatgtgtatcctttccccctacatcactttggtcaaaatatatagacgcatgggtggaatggctgggttaataaagcactttaaaccttgttggtatatttatactgactctttgaaaatcgcttacctcattggggtgctgtagctgaaccaaaaacagtaagagaaaaattaaataacactggtcaaatgaaattctagttagaaaacttatcaaaaagaaaaaagaagaaaaaatggaagagacagccccgtcttccaaataaagtgtgagaaggcaccttgttaaagtcatttagagttggctgggtctaagctctcaccataggaatgctctggcagtgactacaggaggcactggcttatttaacaggtctttttcatctctgattttttacttgaataagcagttccctcaatcggggttaggacatttatccagctggcactgctggttctgctcctatatgtcattgccatcacattaagccagtgagaccactgtgttagcaggaaatgacaggttttctgaggggaacaaacccagcagaaatattgtaaagaaggctggttcttcaaaacatttatgaggggctggtgcaagagttaggaattgacctctgcttggccagcaggaattcaggaattggcctctgcatggccagcaggcaaagtcaaatccaccttagcaatcattatttgcagttttgcaactgactgtaggctaattaaatgaagcacaatctctaattattgtgtcagaaataaaaaatggttgcattatcttagctagtaggacacttgaacatt

SEQ ID NO: 315247 - DNA, 4001 bp, Homo sapiens
agaggcaatgggaacttgctggaggatttttagccgatcagattcattgtgaaaagatcaacttggctgcaatggcaagagagaggcaggcaccgtgtccggggagaaatgctgatgactgggcccaggtcgtagaagtagagatgggcaaggtggacagagaaaaggttttaaagtagcaataatagtacttgctgattcgactgggtggtaagagaggaatcgtggtgctttgcaaatgtgtatcaaggcctttgaatgcacgcacgcatgcatgcacccacacgcacacatgcatgcacccacgcacacccgtgagccgggctccctgctctcaccattggccagaaggtagagtaccagctcctcgtgcccacacaagcaggcatagtacctgaagggaggaaggaagtacaggaggcagtcctcagtgctgaaggggtgcaccaacccccaccctccccacccctctctccagcactcacaagggggtgctgtcccacttgtcccgcacattcacctccacgtctcgctgctccagcaggtacctgggcaggaaggaggtcagagcctgggtcaggacgggttcatggtctgagaaagaaggcccgtggaaaggaacggagagaaaacatcccttttggtatggggaagcctcccccaggtgagggcaggtgacaggcagaccagagcaggagaggcactcaaggcaaagtgcaggcaaggatgtggaggtggggtcgaacaggcagacactgtgtgctatcagtgctgggggacgatgggctacagggacagaagccagagccagtgccgaggctggacctttggcctttcagcgtttgggagaggaggtgatggagccttcactcccaccagagctctctactgcaggaagaagctggccctgttagaagcagggagcccgggaaaaagctgctgcaggcctcctgatggtgtggagggcacacaattctaggaggcaggagtcgcgggatacagcaactgatgggatgcggaaggtgagcgaggggagtcgccaatgctaatgcagccccactgaggcgggggcagcccaaaggaggcctccaggctgcacctggaagtgctgtgaacccactcagcgttgacactatgcactaactcttgagtggcacgggatgtcagggagcggcccagggaggctacgggagtacagcagcccggcgccagcccaggggaggtggaagcagtcagtcagcaccaggtcaagggggaggaagggccaagaaaaaaggaggtcaaacgggatagtggaagcccaaggaggggaagggccccagaacccaactgggcaccccttccctccgcgtccggcccatggagggggcatctcagcgccagattcactttagctgcgtcaggagtttccgaatcctcagggaccggaggccgattatgggctctaggtgttccccgcgccaggtccagagagcacgagagaaaggggccacgtctggagtcccaggcctatacccgcgccctgcgcccggggggtctgacgtccgggccctaccagggcgaacagtggcccgccttctctccgcccacttctgcgccttcgggcctccgctgagcagtcccttcttacaggaagccctccgggggtcaatggccatcagtgtccccgccccagcgcgcttccgctggggggctgcggcgggggtccgggtggtctgccccgcgggggcgctccgagggctgtgacccggcagaggcgcccgcctctccgcggccgcccagccgcccgtcccagggcccgaggcgttccgagggcggccacctcccgcaccctccccgggactgcgaggtcctcaccgcactcggcccacatcccccttcctgcagctggcgaacaggtcgctggtgtccatggcgcggaggatggtacccgagccgaacgacctcgggcggcgaagccgcgcacccggcggatgtaaacacgctcagccccgccccgccccgctctgcagcggcgtccggaggacccgcccgccccggcctccccgccccgcggccccgcccctgccccggggtgccccgcccgccccgccccgccccaaccccggaaataagaatgagtcaagaaggcagacgcgctgggcccggcgtggtctccgggcgggtttaattgagtcccggggcgcaggaagcgccgcccgccgcccgcggggccggggttcaggggcgggaaagcggggccaaggcgggctttgaggcctgcccctcgggcgggagtgagggagttggtccgaagccgccgtgtgaagtcgggggaagcgggaaggagcccgcgccgagggccaggccgcgggggcggcccgggtaggcgcggggctggtgcgggctccgggccgtccgtttcggggtccacctcgcttggtcctggcggcccactcggcctgcgcctcggctgcgctcacaggtgcgtgtcctcctcgaacacgtccgagtcctcggggtcccgcttgccccccatgagcgccccccagctccccgggccgttgagggccccgccgccgttcaggctggggtgcttctcctgcatctccgactggctgtcgctggccacgtccagcgtggggttgtcgtggcagccgttctccacgaagcgcagctcctcgccgtgcgactgaggcggggtggggagaggccatgggcgagcgagccagcccccggacagcgccaggcccgcggccgtctgtgcaaccccacccagggggttcccgcggcaccctccacaggtgccagatccttcttttctgttgctgcagctcaactcctttctcaaaataaacctactagtcgttggcactacaaagccccgtggcctccctgacgtcatcgatcccccaacagccccctaagaagactccacttgcgaggtgggcagggagcatcgctagggctctgctcgcttcctcctggggaggcctctaggctgctggagcctctccttgatccttgggcaccaccaacgcagggcctgcctctggtgaggtattcaggtgctcaggccctgcagtgcctgcgccggaaaggggctggtggtgccagggaggggccccctggtggggctagcagccccctcactccctgcacctctggcacctgtcctggggctggtgccctgcagagcagtcagcagtgctaggctgaccagctgcttcacccacgggaccctgtgcgcccaggagagtcactgcctccccttgcagatgaggacacctatcgatgggcactctcctctcaactggcccccagccccacctgtccccacactcaccacgtgcttgagcttgggcagccggcgctgccagcagttgtagagcaggccaagcgcaatgatgatgatgcagatggccccaatgaccaccagcaccacgaagagcgtgccgtagtcgctgcgcacctggctggcccgcgcctggcagctgctggttgtggaatagttctggatgccaatctaggggtgggaggggccagtttcctcagctgaggtcctggggtgccatggctcctctggggtggttgcattgggctcgggtggggatgggggagcaggcttagaaggtgctggcactcccggctcctgaagttccctggcgcctgggcttgcctctaccccatgcccatcccgtttgcctcagtacacctggaggcctctccaccccatgcccatgttcccagcctccttcacatcccaccatagcttctgccccagccgctgagtctgagctcactgtggccctaggcctccagtgagagtggacccatgctgctggacaccatccaactagagagagtgcccacacctatcctaactagttagagagacaggagatgtgagccccccacacatcctccaccatacaaccgcttccacctcggtggggaggggtggaccagtcagcttcctgatgccagggccggtgcagggagggatactgagggcatgcagg

SEQ ID NO: 315248 - DNA, 4001 bp, Homo sapiens
gggcctgcccctccacacctgtgggtatttctcgcaaggtggagacgagaaactgagaaaagaaatgacacagagacaaagtatagaggaagaaaagtgggcccaggggactggtgctcagcaattgaggacctacaccagcactggtctctgagttccctcagtatttattgatcactatctctactatcttggcaagagggatgtggcattatataccattactataaggtaatggtggggagggggtcaacaggaaaaaatgtgagcaaaggactcagtgtcataagtaagtttaaggaaaggtgctgtgcctggatgtgcacataggccagatttatgtttgactttacacaaacatctcagtgcagtaaagagcagtattgccgccagcatgtctcacctgcagccataaggcggttttctcctatctcagtaaatagaatgtatggttgggttttacacccaagacattccattcccagggacaagcaggagacagatgctttcctcttatctcaactgcaaagaggccttcctcttttactaatactcctcagcaccgaccctttacgggtgtctgcaaagaggccttcctcttttactaatactcctcagcacagaccctttacgggtgtcgggctgggggactgtaaggtctttcccttcccactaggccatatctcagacaatctcagtggggggaaacctggacaatacccaggctttcttgggcagaggtccctgcggcctttcgcagtgcactgtgtacctggttaatcgagaatggagaatggcgatgacttttaccaagcatactgcctgcaaacaaatggttaacaagccacatcctgcacagccctaaatccctcaaaccttgattcaatacagcacatgtttctgtgagcacagggttggggctaaggctacagattaacagcatctcaaggcagaaaaatttttcttagtacagatcaaaatggagtttcttctgtcttccttttctacacagacacagtaacagtctgatctctcttcctttcccccacactgccgcactccccttgccgagatagtgaaaatagtaatcaataaatactgagggaactcggagaccgatgccggtcacctgggcccactctacactttgtctctgcgtcttatttcttttctcagtctctcctcccatctgacgagaaatacccacaggtgtgaaggggcaggaccccttcaaaggtcaaggccatggaggttcccccagtgaaaattcggggcggggaggtgaggagagctctggacgaacggaagaacggggaaggcccagcgcagggcctgagtggttcgctcaccgacacagatgtcccccagctgttccggcctcagattcacgtccttgagaaccgcggtcatgactgccgagagaagctcgtcgggggtggtgtcctgcagcagaaagagcagccgcagtgacccccactcccccatgcccaccccagggagacaaagcgaccacagctgggtgcggagctgcctccggcgtccaggataaccaaacatacgaaccggaccccagcccgcgccggcgtcttcccacactcggcgcccagaccctcgggcctcaccttgaagccgccgcggcccgcccggcagatggccgtgcgccgcccgtgcaccaccaccacgtccgcggccgaggcctgcggggcaccgctcaggcaaggcgcggcctgcggcatccagccggaatcggccggacccctcaggtggcccagcactacctgcagcctctgcattgcgcaggtcaaccctgcagaccagccaccagtccgggaactgaccgcggagttaacagacagccgtccgcacacgcgcagaaccacatctcagcctccaaggcctcaactccgcccacagctctgcgaacagacgcgagcgaccctccaaaagtcccgtccacctccagcctcagccaaccacaaggagagtcggcctgggaacccgcccctccccgccaccgcctaccaagccctctataggagggcccacaggcaccgcccagccgagctttccactcaatgccccgcctaccttggcctaccgcagccaaccagaaggtgtatctttacgaatccccgcccagaaatgcagaccggaagtctttccaccttttgtagccaaacccgagacctgacccccaaatccctgtctcctgcccgcagccaaacggaaggctgggcagccaggaccgcttactgcttgggggctggagatggaagccgaggctctaattcctctacccacttcctaggaggctctgctatccctccggtcccagtacccgagctgggggacctaaatacttccgagacgcccgagtcctgctccgacgtggttgggctttcccattctttcgagaagacagggaatttgggcttccgggctggccgggagaacagattttacagacatgcggggtgtgacaagctctctaactggagaatgaacatttcacacttttaccagttttacacccaattggaatgattttattagtgcccatttcccgtgctaggctggggtctccaccaaggcagagaggtaccatgtatccggggagcctgcgacacccttgacacttagtagatgatcaataagtacttgtcgaatgagtaaatgaatgaaccagggctccccaggtcaggactgtgtccctaaacctaaagggcaaggccacgtgcccccttgactcccaatagcagggccatgtcttcacctgagaccctggagagtagtgctgggctttccacagacaccaaaggacagggtgccttgtgctccccaacctagtgtcatgacgtccccaaccatttcgagggcagggccacggcatgcctcaggctccagaaggcagctgtccgtttcccactcccacctcggggagcacagcaggggtcttcccatacccctactggcaggattgcgtgttccccagagacagtggagggcagagctggtgccttcccacttgtcccctcctcgccatcctcgagggcaggaccgtatgaacccctcagattcctccgtggaagaactgtggctccaccagatcccaaaaagcaaggcccgtttcctacaacccccgaaggagggtcgtcctcactccgccgccaacctactagcaccatcaccagaccctcgagggcggtgccgtggacctctccagatctcaaaaggcagattcctacttcttacgccccccacatcacccgcctcgagacctcaagggtagaggtgggcacccccgcctccgcacttttgctcggggctccagattgtagggcagggcggcgcttctcggaaagcgaaagccggcggggcggggcgggtgccgcaggagaaagaggaagcgctggcagacaatgcgacccgaccgcgctgaggctccaggaccgcccgccatggctgcaggaggtcccggcgcggggtctgcggccccggtctcctccacatcctcccttcccctggctgctctcaacatgcgagtgcggcgccgcctgtctctgttcttgaacgtgcggacacaggtggcggccgactggaccgcgctggcggaggagatggactttgagtacttggagatccggcaactggagacacaagcggaccccactggcaggctgctggacgcctggcagggacgccctggcgcctctgtaggccgactgctcgagctgcttaccaagctgggccgcgacgacgtgctgctggagctgggacccagcattggtgaggacgtccccttcctggcctcgtacctggggggtgaggaggctgactttccgcggcctcagcatcctgtctcccatggagagaccccatttcctgcctcgggggcccgaagaagcctgcagagggagaaccatgcgggtcccgttccttcttaataaccggtcgcggttattaagaaggactggagaaaggtccggataggcggagatggg

SEQ ID NO: 315249 - DNA, 4001 bp, Homo sapiens
ggattacaagtgtgagtcactgcacctggccaaaacacacattttcaaaatataaagattgattcttttgagtttctgagacttccttcatggcctatgtgttttcaatttttataaactttttcatgtgtcctagaaatgaatgtgtgttctctgtgggatccagagttccatatatatttattaaaccaagcttatacaacatttctggaagcaatttttataccacaactaatttacaactaatttcattttttgaacacggttatggtttaacattcagcttggttcagaattaagtatctttcagttatgtacctcttcaacactcctacaatatgaacgttactatctcctttttgccaaagcaggactagatgttcaaagggtaacttgtccaaattccacagcaattgaaatagttgaaatttgaactttgatctgtttcagtttgttacaacacaaggcttctagcctagaaatctcagctattctttattccacctttcccttcatcttccaatatctattgggacatgggacctttaaattctacaccctaaaatgttccctgatccatctcatttattattattttcattttcaccaaaatcagtagtcaaagaatataaatgctagtgataaaataccactagcacactatgttgttgcaatttttacgccctttcacctatattacggtatttcatttcattaataagactaatcaaaataggtattacaacttaggaaactagttctcagagtgtttatgtaacatatttaaactcccagacagcaagtgacagatccagttttctgaatgataggactctttctgtagccctgtattagtaacaatgttatttttagaataaagttttaagaatgtattatctattgtaaaacatcagactaaagccagattcccggtggggaacgctactctcaggatcctctcactcagttccattacctcacttcaaaaaacctgaggcccaaagtggtgctgtgacctcctaagtggaaaagctagtactcgaattcggatcctccatctggtgtcattaactcagcctcccggaatacggccaatcaaacggaattacaccagcttctcagaaaaagatctaatggctgtatcacaaaagaaggcatctatttctcagaatttgtagccttaattgccttggtgaatcctcaagggacataaatccatcctttaacaaagattcctttggatagtagaatggtgaacgttattgcgcttccattaccgccctccaattgggaagcccccagcatcgaattcggagggccggcaatagcagctcatgcctgtagggtgcgtccactgactgcaggaaaagcaatcagggtgggagaaacttaggaaaccacccagggccaaaggaaggaaaactcaatgtacaaatttttttccgctggaggcaaaggctgacatccatacctgtactgggcaatggtcagcgtagcctcacgttcggccccaaagccagacaagtgctggtttaggtaggcctccagggacttgctgtcgaacttgtgctggggcagcacttcggccaaatcggactcgccagtagcacctggcttcatgatcacccccgcaggccacagcaacgcggcatccacaggtctcgagtgccgaagtccttcaggattggggcaacgtcccctctagagcatgggccgaggccggggtggggtctggctccagccaaccgcacacagcctacgcgccgttgctgagcaacgcttgcccgctgaatcccgaggttttagctctagtcaagtgccaaaagagcccaatgtgtgttcgggtttcaattctccagtcagcgtcagagttggaggcctcaattttaaagaaggcaaagccatggtcatcgttgcgggtaaggaacaacgcagaagcctcttccacccccaaatttaatgcaacagcaggcggaagacctgcagggtcccgttcagaaaaagggccgtcagactgtcgagcctaagaataaaaagaccctgtttctcttagatacccggttagcaaggcaacatcgctggcctcctgccctggacacttatcaccccggtgctgctgcggccgggtttagccggcccagcgaggaaggaagccgaaagagccaggtttttgatgagggggagcgatgtctgcgacgcaccggaagcggctccgaggaaggcctgtgggagtctcggagacgtgtctgtctgtgaggcgctgggtgcacgtccccagggctctgggctaggaaggcagcggcgaggtgcctccccacgtacccctcgcgggcccagccgagcaacgtggggcgaaggcggcggcgaaggcccgggctgggagcgttggcggccggagtcccagccatggcggagtctgtggagcgcctgcagcagcgggtccaggagctggagcgggaacttgcccaggagaggagtctgcaggtcccgaggagcggcgacggagggggcggccgggtccgcatcgagaagatgagctcagaggtggtggattcgaatccctacaggtaacctgcgtcgccggtcggaggcaggcgcgggggacgaggtcaggctccgtgaggtcagaagtgaggcgcttcccacgtcccgctcatggggacgcccgccacccttttcttggtctgcgaatcctgttcccaaatgggcaaggccacatcttagtactgatcggaagatattctttctcttttttaaaaacctccagtgagtcagccatatggtgctgctcctgtgcctgctgaggacgtgtgtccagtttcctatcacccttgcctcttaattagtccgcctcgctgtgtataagactgatagtaagaactttcagaagatgagatcaaatattaaacctgctaaggtaaactttgagtttcattaaaggcttatcaatgcatcttaaatggggtcggggcgggggagagcggggttagctctattctgagatattcgggtgctccttaacatctcaaaccattcgacattaccaagactgcccaggcctctcttttcttctttcctaacaaagcttatcaattcagcagatggaatatagtgcaatggttaagggtaaggactctaccgccagactgattgcaattcaaatctaactactctcttcgtaactgcctaacctttggcaagttgtgaaactttccgcttcagcttctcacctgtacaatgaagataatagtaatatctatctctgtcatagttgtggggattgaaaaaatcagtatgtataaaggtcttagagtagcgcttgtacatggcaagccttatacaagattttattgctaggtgcatttagtagcaagcagttattgagctttcactgtgtaagcactttacatgcattgtctcctcccaccaaaaccctatgagattgctactattttacccccattatataagtgagaaaattgaggcttagagagccacctcaggttcatgccttggtagtaaataataaggcctgtcttgcattagatttgtcttaatgtaaaattctcatgaaccgtctccccagtaaaaacaattaagtcgtgtagctaaaaattgtatagtgttaaagtagataaggaagattttattgttgcttttttcctttaaagagcataacagttttgatttttaaaaaaggttttagtttgtgatatataaagccgcagtagaagtcttagggtgcactgttttaactgtgttgccaaatatgaacggttaatggtccagaatttttagagattaaataagcatgaactgacatctctaatcagaataagtggaaactatttgacatttttaaaacattttaaaattttacaaatgaagactttgaaattttccctccagaatgaaaagcagaggaatatgggtcatgaatttaagttgtctttcagacattatttaatatgagatgatcccttgacattgtaattataaca

SEQ ID NO: 315250 - DNA, 4001 bp, Homo sapiens
agaggttggttttgccaggagcagacagttcacagtaacagaatgtagataataccggcacatatgcagcgggagggggtaactgtgcctgtgaacttctcatccgactgcatggattttcccagtggaatgggaagcaaagctgacagctgagagtaaaggcagggcagggcaggtagtgccagaggtttaaagatggaaacagatctgaaagatctgtgttctttcttcaccatgctgctggatagcaggaagtcccaggatagagcaccacactgccccaggtcctgggtaaaaggttttccaatatgttcaagacatagctccgcactttctagctgggcaaactgcttttagtctgagtcttagcttcttcatctgtaaagttgcttgctataaaggtatcagcctgacaacctcagaggaacgttccaaagagaagccagggaataacttctgtgatacaggatcagccaacattcagccaagttcaaagtagggcacctcgacgaaatagcaagtatactgttggtttccttagaagataaaatgaaatacaaaggaaagagcaagaaatgtgtttattcctattttgtagatgaatgcactgaggcacagggaggtgcagccgtcagctccaaggtcacaagactaagtgttgaagccagctctctcttctgctgcacagtactctacagtttaagaagactctccatgcaccgtttatctcactggggctctacaacacatctgtgaaggagacacaacactatctccattttaaggctgaaagaactgagtcttggccgggcgcggtggctcacccctgtaatcccagcactgtgggaggccgaggtgggcggatcacccgaggtcagttctagaccagcttggccaacatggtgaaaccccgtctctgctaaaaatacaaaaaaaaaaaaagccgggcaggcgcctgtaatcccagctactccggaggctgaggcaggagaatcgcttgaacccaggagggaggttgcagtgagcactccagcctgggcgacaagagcgcgactctgtctcaaaaaaaacaactgagtttcaaagtcaacgagccaagaccaaacccaagtcttccaactctaagaagacaatgagtgttttataaccaaactgttactattggctgggttgtgccacccttgggaagcatcttggagccagatttctgaggaacctcaatggcagggagaggcgctgggctcacctggggaaggaagccccagggcgctggaaggtgactgaggagggacatggtgtaagctgtttaggaatcagagaggaagccccgcacatttccagaccagaccagctgagatgaaggctgctttgttaattacctagcctagagttttccgaattcccctgacaaaatttagctggaacacgtcaccaccacatttccaagggtcccccgtcttggaaatgtctcaccctttctctgggaaggttttcctggaactcaggaatccggagtgttaacacgcctcggccgcagggtgtatctctctggcaggtttggggaatctcacaaagttcaacaccagtcttgcagctgagggtgaaaagcgggagccagacagcaagggttcgcccagggctcgcgttaccttcttgattttgcctaggaaaagctctttggcgaaagctcgtacaggcgggctggtgcgcagtagccgccggttcgcggtagagaccaccagaccccggcaggcacgagccgcagccgtggtgcgcaggaagagcccgcagccgctcatgctgcccgatgttccccagcctcagcctcagtctccccttcttagcgccgcagggacacacacacgtctgatgacgttactggcccgcgacaacgtgcagtactcactgcgcttgcgcggtcccccgcagcaggggatggagaggccagaagggcgggaaggctaccacctgccgcgcccaaggccttagtcacgtgcacctggctggcccgcgccgcctgatgacgtcacacgcctacgcttcccgccggccccactgcgcttgcgcggccaaaggagctggccggaggaaattgtaggccctgggccgcgggcatctcggcgggtataatctctggccgtcgtgacggcggtgacggacctgtttttcacataccagcggttgtttccataaatgccagccatgggaaatctccctgtgtacagaaacctaaaggccggctcagctgcctccacttgtctcttttgtcacttgtggccacgaggccgtggtaaaacttgagaaaagcaaaagaatgagggaaatgcgctgtattggggtctctgcaggggcacggtaagggtaagggtccatttttaactggatggtggattcctgagatactgttttgttcctagttgacatgtatgttacatatattttttggaaaaggaaaagaaagtgggtgttcagtcacagagcggtctggatacaactgagtcacctctgtcctgggaaacactaacttaaaaggcaggcggaggaagagaaactacagagagagctgagaagagatgggaactattggatgggatgggacaggccaggctgtaaccgcccaaggttacagcccgctgactagacagctgatttatcaagacggaaattgcaatagagagagagtaattcacgcagagccgggtgtgttggaaagggagttttattagccaaatcggtctccccaaaaacggatcggaatttttaaggataatttggcgagtagaagctcgggaagtgggaggtgcatgattggtcgggttggagatggactgatagggggccgaagtgagtttttcttgctgtcttctgttcctgaatgggattgcagaactagttgagccagattaccagtctgggtgttggtaggttttacaacagtgatgttattcccaggaacaatttgggggacgttcagactcttgcaaccaaaggctgtatggcctctaaactgtaatttctaatcttatagctaatttgttagtcctccaaaggccaactggtcccaggcaagaagaggttgttttttgttgttgttgttgttgttttcccgggaaagggctatttttgttttgaagttaaactataaactcattccttcccaaggttagttcagcctacgctcaggaatgaacaaggacagcttggaggttagaagcaagatggagttggttaggtcagatctctttcattgtctcggttataattttgcagtggcggtttcaaggccaggccataggggcccacgtaggaggcagggcatgcctggcacctcacagcccaacagtgctctgaacgtggcacatgggccctctacagatcttcagccagctcctccaggaagaatgccactctgctttttcacccagaccggtaatctggctcaacaagttttgcaatcccacctaggaacagaagacagcaagaaaaactcacttcaaccccctatcattccatctccaacccaaccagtcagcactccccacttcccgagctcctactcgccaaattatccttaaaaactccgatccctgttttgggggagacttgcttgttccccgactgtagcattgaccacagtgttgggaaatgcctccagcttccattgtgtcaactccttgagaagaaaaagaaatccctttcatctcagcaagctaagctcagcaccaaaaaagattacattgctaacacaacatcaagaaaaaagagctcaaaactctgcaaggcgtagagtctaaactgcaaaatatttgcaggcatcttttcagattattttaccttgtctaaggtctctcacctggtttcttcatcagtggttgatatttacttgcttagcattcagcttcacaagaaggtatttggaaacaactgcctttgtaaattatccccataggtaaaacaaagaaaaatatacatatgttgcaaaaactgtttcaattttgagc

SEQ ID NO: 315251 - DNA, 4001 bp, Homo sapiens
ccccagtagctagaagtatttccaaatcacttctctcaacttaaaaaaaaaaaaaaattaatgtgaaacaaagggagttcaaagctacatcttctaagggaaaaatgctgtgattatttcacttaaaaataaatagctgagtcatagtaacaaaatttcacaaaaagctgaactttctaaggtgcactttaaaaattactccacttgccatgctgtcctggaaaccaacctgcacgcctgtcctaggaaatctatttgtgtctcttgagtccttcaataatgcagaacataaaagtttcaaaaatgaatcgcaacaacagctatcaaaggaagtgggtttttttaaataatagccctaggctccaataaaattaatacccaaaaatcatcaaagggcaaacgcaaaaagcgttcttaaattttctctaagtagcagttccttagttttacaattcttttctttttcgctgaaaggagaataagaaatccaattaacagtgttaaggatgagaacagttagttcccaggcagaggatgcaatttacaatccaggcttggcccagacattagcgggcacacacacgccagtgctcagaggaagcttcaagaaatgtcactatctaacggaagtgttaaggccttatatttgtaaggactatgaccagccctgtaaataaatacactgtaaaacgcaacctagaaaaactccattgtccaaaacaactcaagactttcctactatcctcaaaacagaaagaacctgtgtcctggacggcctcaggacgaccgcctctcacatagaaagaagggcaacccatgtgaatcggagtgcccccatgtcaactctgtgacagatccactgggagcatccgactgtgatccgggccctcctgggcagaggctgctggaagaggaacacacaggcaatcttcacggccctcctacttccgttctcaaaacagaaatgcacttttctgctagtcctccgccctcagcccggtacctctcgacagctgtgcccccttcaacgagcttaagtggaaagaaaagcaggtagtcaccaactagggtccacggaatgcggttgatcacagcgcttccccccgcgattcccgcacgcatccaccgcgggcgccctccggagagtcgctctggccgggggcaccgcgaagcagaagtcggcgtcccagttcgccccctactctctcctccccggggaaggggggcagaaaagcgcaaagaggaactaaatgaactgcaagaggatgccctgaaagctccctcaaagagggggtggggagggggtggaaaccaagaaggggcggaaggaagggggaaggaagagcagccagaggaggaagggggcgagagcgagcgcccgcgaaggggacgggacttcgggagcgcggctgcaccccatttcccccagcgggagagggtgcgccggccttcggggcgctccgccccggcagagggcaaggaaagaaatgagaggcgacgtccccgtccccgccacttcgtcgcccctcgggagggctcggtggggactgcagtgccctcgcagggtgggaaacggcggcaacagccgctcgccccgtcggaaggagcggacggcggggcctcctccgggtgcgcgggcccggctttcacgcccccagcgccgggaaggcagctccgcggtgacgccgggcggccgtgccggttacctgaagcggggcgagtccttcagacactcctcgaaatccacagtcatcttcatcctgcctccgcctcgcaggcggcgctggcaaagccgagggggccgcgggagcggccgcgctgggacgcagacggctacggcgggcgcacggccgcgactagcgttgcgcggagctgcgaagggcgcctcgcccgctggtcatagcagccgcgaagacggcgacgactagtcaggccccagtcccgcccctcttcctcccgccccaagtagagcgctggccgcagggaaacggccggggagtgacagcagcggccagccagccacgaacctggcggccaaggggcggggcatccggcagcaccgcctgcgggcgcccgggcaacgggtctgagcgacggcaacccgagccaatgagcagcgcgaccgtgggcacctccttgccacaaccgcccccgagggccaaccgggatgcgcgggcgtcgctaggcgggacgcaccggttgctgggaggccggcagctgaggttccttgggaaggaagtcacgtggctgcggccgcgcttccctccgagcccccgcctcttctcctgctccccgagccccgccctgctgagctgccagcccagaggagcagtctcctgcaggtctgaggaaggaaatttgcttttcaaagcagattggcagaaatctgaagaggttagaggcagaaattataaaaggaagagataggctaagccacctattcctttcagtttagagaaactgaggccagaagaggagcgaggataactttagtgataaaatccatctttcatgtatttgttccatagcttcataatctggaaattgctcccatgtacatcttctcatatagccagagaccacttcctgaaggagctgccgtttgggttggacatagaaagatttaggcaggtatgggaggtagggtgcttcgtgtggaggaactcctctcaaaactgccgaaagcattccccctcactgacactttgctcctggtggttttcactgttctgccatggtggggttctgaagaccaggctcatcgtactcaccttgcaacacctgcccctctaatccacactttttctagaagcactttaagatacttatcatctgatcctcacggcaggtatttaccatactccttcattttaagatgccattgattgtaaaaagtacaaagatgtcttatatgtaatgagtaatttttaagccaacctaaaaaacacgggcgtatctataaaaatgaatatacagggtgttctaacagcatagtggctctgagtgagaatctggaggcaaacttcctggatttaggtcccagctttctcactttaaaatgaacataacacacagatctgatgaagttgtccggttaacacagtgccacatatcgatcattcagtaaatgttggctattttaattgtaccatttgcctcttcagtactataatcaaagggcttaagtctaagttctctcactttcactgtctgaagtttttgtttgtctcaaaaacaatcaaacaatttcgttccgttccccaggctggtctcaaactcatggcctcaagtgatccttctgtctcagcctcccaaaatgctgagattacaggtgtgagccacacacccagccttctaaagtcttaatataactttctgaccgtctggctaagtatagcgtgatgacatactgtttttcgtaacccatcaagagatatcttgatctctttagcatctttagaaattaacagtatagacagggcatggtggctcacacctgtaatcccagcactttgggaggccgaggtgagcagattccttgctccaggagttccagaccagcctgggcaacatggtgaaatcctgtctctacaactctacaaaaatatacaaaaaattagccaggcacatgcctatagtcccagttactcatgaggctgaggtggaagggtcacttaagcctaggaagtcaagactgcagtgagccatgattgtgccactgcactccagcctgggtagacagagcaaaacactgtatcaaaagaaaaaaaaaggaaaaaggaaaattaacagtataattctgaggcatttcagagaatatagaagcattatattcatttattctttgcttataaacttgatttcttttttaattgtgtattcctggaaaccacacagcttttcttgatagctaaaaacagactattgactgttaaatgttcagggtcctcaagcacattagtggtcaggccaaccttccctaacattgtaacttcaatgtc

SEQ ID NO: 315252 - DNA, 4001 bp, Homo sapiens
ttatgcccctggttaatcgagaatggagaatggcgatgacttttaccaagcatacagcctgtaaacatattgttaacaaggcacaccctgcacagccctagatcccttaaaccttgattccatacagcacatgtttctgtgagcacagggttggggctaaagttatagattaacagcatctcaaggcaaaacaatttttcttagtacagatcaaaatggagtttcttatgtcttccttttctacatagacacagtaacagtctgatctttcttttccctacagaaaatgtatgtgccttgtttcaaaacaatgaggaaatgagggcctgccactgtggctcacacctgtaatccaggcactttgggaggctgaggtgggcagatcacttcaggtcaggagttcaagaccagcctggccaacatggtgaaaccccatctctactaaatatacaaaagttagccgggtgtggtggcagatgcctgtaatcccggctactcacatgagaatcgcttgagcctgggaagtggaggctgcagtgagccaaggttgcaccactgcattccagcctgggcaacagagcgagactctatctcaaaaaaggaatgaggaaatgaagtcggtgttaggaatcacccttacaattttaaggaaattgaacactcgaacaaaggatttttaatgaagcaattttacttttgcgcagaggggtgtctcttcggccagttgccatgagagcgcacttgaacaaaggggcacgagggcctttatttttgacgcaagtcttgcctttgtattctttttttattggtagtggtcgggtcgtacaatttaaactaattttggttggctaaacattcgattttttttagatagggtgagcatgtaaaagaaaaagtggagggaaaggggaaagggtgtttgtaatgagctagaaagttagtcttttttttaataaggaaaggaatgtaagttggtattgataaaacgtggtattgtggcgtgcctgggcatttaacaaaggcaaagaggaaaaaaggcgaaaaaggagaaaaattgggggggggtactatgaattaaagaataaaagattgatcagattatttgaagagaaatcttatcatatcccacatcagtttatcaatacacccagtctttttaaacaatttcaacaaaaagttaatttgtttgaaatggttagttgactcctaactcatcattccaatcacattaccaacagattgaaagatattctgcaacttaatcgcattaccaacagactgaaagatattctgcaattaattccaataaaatgttattttttaaacaatgaatcactttagaattcaggaaatatctatgtcaatactgttttctaatttcctattatttattctttcctgctgttggggctcagaaaatgataccccaaagtgaaggcctcagaagcagcctcagaagcaaagtttctaaccaacctgtcttaccctcctgtctatctgtcataccctcattctctcctgaagcaagtcatagaaaatagaattcctcttccccaaggctgattacagaaaccagaacctctaagcttccccaactttttttttttttttgagacggagtctagctttgttgcccaggctggagtacagtggcgcgatctcgggtcactgcaacctctgcctcccaggttcacacaattctcctgccttagcctcctgagtagctgagattacaggtgcacgccaccacgcctggctaatttttgtatttttagtagagatggggtatcaccatgttggtcaggctggtctcaaactcctgagctcgtgatccacccgccttggcctcccaaagtgctaggattacaggcgtgagccactgtgcccaaccgcttcccctactttttgtctaagaattggccataaagaaattctctcacctgccgtgttcaatagcagctcataagacctccattccagaaaggatcccgtactgtatcctgaaaggagaaatgctacaatcgaaagaaagttcaagaatctgaacagacaggtcttgctaggttttctattaccattagctcatatcctttgttgtccaatcacatttctacacgactgtccctgtttcatcaaacctaagcatataatgagacagagtcacctgtatctttgggtcttcactctgaaggctcctgcatcatgtaaaactttgatcaataggaggctgaggaaggcagatcatgaggtcaggagatcaagaccatcctggccaacgtggtgaaaccccatctctactaaaatacaacaaattagccaggtgtggtggcacacacctgtagtcccaggtacttgagaggctgaggcaggagaattgcttgaacccggaaggcggaggttgtagtgagacaagatcacgctactccactccagcctggcgacagagcaagactctgtctcaaaaacaaacaaacaaaacaaaccttgatcaaatacagtacatttataatgtttttctcttgtttttgttttgtttttatcttttcttttttgagacagggtctcactctatggcctaggctgagtgcagtggcacaatcttggctcactgcagccttgacctcccaggctcaagtgatctgctcacctcagcctcctgagtagctgggactacagaggcacaccatcacacccagcaaatttttgtattttctgtagagacggggttttgccatgttgtccaggctagtaattttctcttgttaacctgtcttttgttataggagtgttagctgtaacgcttatgatgggaaagaaagggatcatcccctttccacccctacactgcctctgtttatgttttctcccttaaactgacagggctggtacacttttgtcgaaagatgggacttttttctcctaaattcaaccgtcattcaaactgggtcagactaatgacaattctaccaagtagtgtataccagtagcctcaataaagagattttgggggacaaatgtgcatcttccacacagttgtagccatagagtgcatatctaacttccttaaattatctatgtggatctgtcatcctataatttgtctaaatccttattttttaatattatgaatagagtccagcttatatataaaaatgtatttcctttctatgtcttaaaaattacttgctgttgagcgatactatattcctaaaatatagcggaatcaaaattcctagtttacagtcctctacctctattacttactagctatttgacctttataccaatcaatcatcagagatgattgaaccagagcaactccatcttgaataggggctaggtaagataaggctgagacctactgggctacattcccagacagttaggcattctaagtcacaggatgagataggaggttaggcattctaagtcataggatgacatgggagattggcacaaggtacaggtcataaagaccttgctgataaaacaggttgcagtaaagaagccagctaaaacccaccaaaaccaacatggcgacgagagtgacctctggtcatcctcactgctacactcccaccagcaccatgacattttacaaatgccatggcaacatcaggaagttaccctatatggtctaaaaaggggaggcatgaataatccaccctttgtttagcatacaatcaagaaataaccataaaaataggcaaccagcagcccttgggggtattctgcctatagagtagccattcttttattcctttacttttctaataagcttgccttcactgtactctatggattcgtctagaattacttcttgcaggagatccaagaaccctctcttggggtctggattgggagccctaatagtaattggtttaaaaggtgcttatacttacagcttcaagggcaaggtctgactctttttgcacagtacacagcaaggaatttttaaagcaatagctaacatttttcatgccaagcatggggctaacatg

SEQ ID NO: 315253 - DNA, 4001 bp, Homo sapiens
ccgagcccagcctatttttaaattttaatccatttatttatttatttattgaccaggttatgagtctgtataactttttgtatttttgatagagacggggttttgccaggttgccaaggctggtctcaaactcctgggctcaagcaatctacctgccttggcctcgcaaagagttggagtaacaggcatgagccactgcacctggccaagcagtatctttctaactgatagcctgttgttactcctcctcaatacctccttttcaaaaacgtttttcttacttccaccagagtatttgatctctaaattgccaatctacctctcctctgttttgttcctcatctggaagacacatctcttcacctgaaagccacaatccaagctccttagcataacacccaaggctcccttcataatgtggtgccatccatggctcctgccacctctccctactctgtgtccacactagagacagtgataggactaatttctcagcagtgggctggcacccaccatgcagcagcatctgtctacatcattgctcattctgttcctttatctaccatacaatttcctgcccttccctggaagggccaattcctactcaataaacgcggatgcgacctccccagaagactttcctgatgtattagcaatctctacatacccctcagagaactgatccattctgtggaaaggatgcgtttcccatactaccttgttcctctaggttttaagttcctcaaagcatgacctatttgatttgtgtttgtaaataaaatcttgttaatgtgcctggcacaaagtagcttctcagtaaatatttgtcaaattaaagcttttgccaacaggtataaagctgttactctagaatggatagatagtatgccagaaatcttctatgtcaacattgttattgcactatgttggctactagcaccccgtagtattaagataagcttgcacagaattcgtaagttttggaatgtataaaataatgactttcagtgtttttattatagtgctgaattttgttttcctttttcttatcctttctattttccttgggttctttttgtcctctgaagtatctcaaatattcttatagaatcaataatgaaaatattatttttaaaacagtgtgccaacttatagtacattttcaaaagaaatgttcttatgtttgctaactttttttgaatgaatatagcaaagaaaagaaggctctgaagaaagacaccacatagaagaattgctttcattatgtaaaaaccgggtgccaacttttttaaatgactctttttatcattaaagttacttaaaaagttccaatctggaagactactctggtcttcatgttcttatgcattaattattaacacagtatgaaccttgttcttcctttctctttcatcagaaaatcttgaacctgatgataagaaataatatggccaaatattataatatattaaggaagggaatttttaagtaagaattaatcttactaaaaatgtgagtaaaaaagagtagaaatggaattatttgcagaaatgatccttccggcagatatatagacacgcttttaagtgtctttataattaccatgagaataaaaaaaaaatcagtacttgtaaaagaaagtgaaaaaaagtggtataataaaacctattttctccttaacaaagttttaccgacaagtaatggcatttaaaatcgtattttcttcttgctatattaagattttcatttaaggttaaactgtacagctattttcaagtaacccttttttttttttttacaagtaagcatttaaacttttatgcatcaagactccatctatataagtaaatatacaagatctttgggcttaaaaaaatattcaagtcagaataagaaaagaaataaagtaccaacctgttgtagtcggcagagaggagcagtcttgagtacagagtataaaatcaaatgacctaactccagctacttttgttttcactttacaccccgcctttatcttgtatccaagaaggctttcctgaaatttaaccttgtgagcacttgatattttatttcctgtaaaaccatctgtgaagttaaattcaacttcttaagtggtttaggttacaaatttgagaaaatccatcttttttcaaaaactatagacctttcatagtttccacttagtcaaaggggacaagaaagtgcctgcagctgagctactgactgctgaaccagaaggagaatccacctgagggcatctaggcagcacttgtaggtagcatctagagaaatactctctaaagttattttgcctaaggaagaaagcaaatatgattttaaccaaggaaaatatctttttgaagactaaattatcaaagattaaattataagtaatcattaggtatttgcaatagaatttaacatttttatgccacatcatttaatatttatttaaactactagagtcttcctggcttcactgtactttctctatccttgtcccagagtattttcccatggctttaaactctcttgctttcttgttaccttttttcccaaagctagaatatgaaccttcaaaatccttcagtctgggaggctgtttattttttccacatttccacacaagtaagttagagaaagaagagaaatttatgctgatttggccctcatggtctatttgaacttggctttcctcaaatttgcatggcagttatctattttttcatgcaaggccaggctcagtctccacctgcagaaattatttcagacccatgccattttttctatttttctcttttttaaaaaaaaacttttaagttcaggggtacacatgcaagtttgttacacaggtaaacatgtatcatgggggtttgttgtgcagattattttatcacccaggtattgagcctagtacccattagttatttttcctgatcctctttctctaccaccctctaccctttgataggccccagtgtgtttccctccatgtgtccatgtgttctcatcttagctcccacttataagtgagaacatgcagtatttagctttctgtccctttgttagtttgctaaggataatggtctccagctccatccacgtgcctgcaaagaacatgatctcattcttttttatggctacatagtattccatgctgtatatgtaccacattttctttgtccagtctatcattgatgggcaaatatttaggttgattccatgtctttgctattgtgcatagtgctgcaatggacatatgcatgcatgtgtctttataatagaataatttatattcctttgggtatatacccagtaatggaattgttggctcgaatgatatttctgtctttaggtctttgaggaattgccacactgttttctacactcccaccaacagtttgtaagtgctcctttttcttcacaacctcaccagcagctgtaattttttgagtttttaataatagccattttgactggtgtgagatggtatctcattgtgattttgatttgcatttctctaatgatcagtgatgtttagctttttttcatatgattgttggcggtatgtatgtcttcttttgagaactgtctgttcacatcctttgcccactttttaatagggttgtttttaattgtaaatttaaatttcttatagatgctggatattagacctttgtcagatgcatagtttgcaaagattttctcccattctgtaagttgtctctttactctgttgatagtttcttttgctgtgcagaagctcttcagtttaattaggtcccatttgtcaatttttgcttctattgcaattgcttcatcatgaactctcatagtagtctacaagatcccacaaggtctgcctccatccctcattgtctctctgacctcatttcacactactcacccctttgcctacttgttctgccatacccagcttcttgctgtttgagagcataccagtcacaatcctatcagggcttttgtgctggctcttctgt

SEQ ID NO: 315254 - DNA, 4001 bp, Homo sapiens
caggaaaaaagatagttggagttctgctgcatacttattcaagtactaaaattatgcagggaaatcgttcttgtattaaaacttagataattaaaaataattataaatgccttttaacatgaacctctttaataatctgttttagatggcctaacttatagcatagtgggtttttttttaacttgttttattttgaaattattataaattcacaggaagttacaaagatggtacagagtggtcctgggtacccttcacccagttttccccaatggttccatcttacataattatactataatgtcaaaaccaggaaattgaaattggtacaatgtgtgtatatagttctgtgtcattttatcacttgtgtagatttgtataagcaccactgcaaccaagatacaaaattatcaccacaaagctcttcttcgttacagcagagtgttattcacttatgcctgttacaattattttcctatattgttcattttaattttcatgttttgtacatttattatcttgtttcctcttcttggcttttatttctcccccttcccccaacccattctttattataagttgcaaccacggcgtctgagatttgagtttcagaataatgcagatgttttatttgaggggaaagcatcattcatatgtatccaagcaaaaggcagagcagttttacctttaaatgctaaaagtactggttggctctgtaggaccctcagaatcaaaaggaaactcctccacactttgtctctgtcttctccaggacccatatttcttggccactttcataacgtagtttttgaaagatgctcccataaaaacataaaggattgggttgaggcagctgtgaaagagtgcgatgctttctgtgacttggatggcgatgtccatgcgtttgctcatgttgcagctggtgatcagggagtagatgatgtctatggctcggcagaacttgacaatgttataaggcagttgagtgacaatgaaaactataacgactgtgagcagaacttttaggggtcgagatattttaatgtttggcatcttcatgagtgtccttgctgtgataaagtagcacacccccataataagaaagggtactacaaatccaatgcagatctctagcatttgaatcaatgctttcattgatgttcctaggtagcgggggaaaatgggaatgcacctagcattgtcatttactgtataaaaaaccagctggggtatgctcagcaagatggcagccatccagacacagaaacagatgatccagcatggttttcccactcctgattggctggggactttagttactgccacatatctgtctatgctgatacaagccagaaactgcattccagagacaaagtttagtgtgtacaaggctgaagttattttgcacattattttccctaaaacccacccatgaactgcattaacagcccaaaaaggcagagtgaatagaaggagtaaatctgctacagccaaattcaggatgtacacatctgttttggttctctgtttcttgtaataggcataaattgccactaccatggaattgcctgcaagtccaatgacgaaaactattgtgaggaatacagggaggaaaacttttgcaaattctctgacatcttctttgatacagatcagttcatattgactgtagtcataagtgccattcatttcattttcctcataataataatctgttgactggttctgttccaaagccatggctccaatctagatggcaaagagaatacaggatagatatttgtctaaatatgcttaaaaggaaacagtttttatcaagctgttttgttctttccctagagtatagcctgttgctgtaacatatgtgagcctgaatctagcactctttgaaatgctttaatgggagccacattggaatatgaccccaagattagttactcaaactttgcttgtacaattctgtgtgaaagagcttggatttgaacaggacaataaacataatgccctggagaattttcttaatcattaaatcctaaataaaagtgaagacttttatgtaaaaatgatttttaaaatatgaaaatttaattagattttaactaaaaagaataaatagtgttataatctttacatacataattttgtgaatcgtaaaagtatatctacaacaaattgaataaaaacgaaaatagcaaattacttggtttatttaaattaaatttattttttattttgatgttatttataaatttaatttaaataagttaaataaattctctcagcatttgcactaaatttcactagttgccttttataaaacaagatctcctttagccaacttccctccaaaactggtcactacttgcttattgtatactgttttttagtagcaccactatcttctaatcatctaagctgtaagcctgcttcattcttgtcttctctcttaccttcatccctgcttcccaatcagttcccaagttctgattctgccttccaagtaggtcttgaatctgtcttctcctcttaatctgcactcttccacacatttgcacaattcagctattatgtttctcacctagcctactgcaatatctttcttttttaatatttaatatttaattttttttttgagatggagtctcattctgttgcccaggctggaatgcagtggacaatctcggctcactgcaacctccgcctcccgggttcatgcgattctcctgcctcagcctcccaagtagctgggattacaggtacacaccaccatgcctggctaattttttctatttttagtagagatggggtttcactatgttggccagactgttctcgcactcctgacctcgtgatccacctgcctcggcctcccaaagtgctgggattacaggcgtgagccaccgagcccagcctatttttaaattttaatccatttatttatttatttattgaccaggttatgagtctgtataactttttgtatttttgatagagacggggttttgccaggttgccaaggctggtctcaaactcctgggctcaagcaatctacctgccttggcctcgcaaagagttggagtaacaggcatgagccactgcacctggccaagcagtatctttctaactgatagcctgttgttactcctcctcaatacctccttttcaaaaacgtttttcttacttccaccagagtatttgatctctaaattgccaatctacctctcctctgttttgttcctcatctggaagacacatctcttcacctgaaagccacaatccaagctccttagcataacacccaaggctcccttcataatgtggtgccatccatggctcctgccacctctccctactctgtgtccacactagagacagtgataggactaatttctcagcagtgggctggcacccaccatgcagcagcatctgtctacatcattgctcattctgttcctttatctaccatacaatttcctgcccttccctggaagggccaattcctactcaataaacgcggatgcgacctccccagaagactttcctgatgtattagcaatctctacatacccctcagagaactgatccattctgtggaaaggatgcgtttcccatactaccttgttcctctaggttttaagttcctcaaagcatgacctatttgatttgtgtttgtaaataaaatcttgttaatgtgcctggcacaaagtagcttctcagtaaatatttgtcaaattaaagcttttgccaacaggtataaagctgttactctagaatggatagatagtatgccagaaatcttctatgtcaacattgttattgcactatgttggctactagcaccccgtagtattaagataagcttgcacagaattcgtaagttttggaatgtataaaataatgactttcagtgtttttattatagtgctgaattttgttttcctttttcttatcctttctattttccttgggttctttttgtcctctgaagtatctcaaatatt

SEQ ID NO: 315255 - DNA, 4001 bp, Homo sapiens
tgcaagaggaactgcctagggctgggtgtcagccagggctggttggtagaagaaagacatccctaagtacctgaatgccactccacctccccactccccctgtggacactggctgtggaccaggcactgtgtgcatggtaggcatggtatgcagccattgcttggtacatgtttgttcaatacttgttagccaaaattggacagggcctgaccccaaagattgggctctatccactgcagtttgagttacatgaattgcctagggaaatcttcacaaaaaagtcagtgaagcttacacctgaagaaaataatcctggagaggttgagtggcccctagccacacagctggagatggccaggagttggatggggtctgaccacaaagcacatgacttgtccatactacagctccactgtggaggattgctgggggcaccttggtctcattaaactgctcataagttctaggatcactcagctccatttctatgagccctgcaggtatattgtggaactgaagggaggaagccttcttcctgcctgtgaagtgttcccctggagcccctgagtgtctttcatacccaggttggaccctgtctccttcatggcaagtgcttggcctctgagaagcccctattcctccacagtgaggcaaccatgaggtgcagtccatcctatttcacaagtctcttgagtccatctgctccttgctatctctttggctagcatccaggccactgttatctcttacttggcctcagtgttcctcttatttgttctcccagctgccaggtgaactcttgaactgcaaatcacattgttttcctctcctgcttggaatctgctccttggggcccactgtttgtggaatggagtccttgctgtgtctacccaaccctactccactcacctctctcctatgtcaacttactgccctcatccctggcctccactcattctcttcctaccctttgcccctgctgttctctctgaacaaagttcagctccctcgttccctgggtgctctagggttagggacaagttcttatttgcttacatgttcctcccacaaggcctgggaggccagctctgcatttcctagcttgcagcaggtatgttgtaaatctctccggcaggctgccatgcttttgatccccttccttcctgacctcaacctgacagatgcactgctgttattaccattttatggagaggatgtgggccttggaaagggaggagactttataagggtcatgcaaccacatgtagcaaatgattcatatgaggctttcaaaccaatacccccagcagggctgtgggggtgctggcaaggggccccatcctctgccccccggagtcctgcaagtgcccctagtgcggctcctctcgtcctgccttacctcttttccttgctctgctgccactgcctccttgctgttctgaatgctccaggcctccctgccactgccagcatttgctagggcatctccatctgcccagaacaccctttcttcaaatgtcactagggctttttgcattgaacctcatttaaccttaaagaggccaccctctttaaaaccccaagccccctcccccggcattccctgtcctcctcactctgctctcctttttctcttttcacttatccccttctgacatttgagatcatttactcatttcatatgtttttgtttacttccatctccctgctactaacacagaaactgcaagagggccgggatctttgtcactgtcatgccgtgaccctaacacttagtgcagggcctgatttgcaggaggtgcccagtgaagaaagccttgctcagggtctctcggagctgcggacagggtcatcatgggggcagccctctcctctggggtctcccagtccctccctgcccaaaaacctggctcacctggctcccctctgtcctgtgtccgcactgtaggccgggctggcctctccccggctgtaggccgcagcctctggcaggcttgtggtcctgcccttctctcctcccacataggggctggaacacagaagctgagagaaactgcttggccagctctcaagcccttgtctgctctcaagcccttgtctgctctcaagcccttgtctgctctcaagcccttgtctgggcttatggagctcctctccttcctccctctcttcctgcatgggtgtgacctttgtgcctgtcgctggggctgccctgggaggacttctgggaggttggagcccttacatctcaaagccagggattcctttgacactacttgtaccaaaaagctgtgtaccccagcagtgtttccaaagtgatatcctggtcttccctgatctttcactgtgtgcccttcaggcactcaagctgttaatatcacacgagcttaataggctcccctgagatggtcctcatgtgaaaggattgctctgtaaggtgtacgtttttcctctctccccatgtttctgctctaaaatatggcttgtcttatgcttagcatcccctgacattccctggaaaaatatttgtgaagcatccatctgtagtgtgtgggatccagatgagagctgggtcttagtgagaggaatgagaggcttagaggttccctccctgcataaccaccttggaaagtcagatgcggctccccattttgcaggtaaggaaacaggctcagggagggatgtcactttgtttgggtttgcacaataagtagattacgtaacacatttgtgtaagactgggaaagaaatcaaggggccagtaggagatcaaggctcctgttctggcaggacttctgagctatgttgactctgagcaggtgtactcctttctgggccttggcctcccctgtaatgcaaggtatttgctcagtaaggagcctcacagcaccccatcatatccccaaggtagtgtctagcttgtgtctgtaggaagaggcaggacctgtggcccaagctttgcaacttatcacctagtaggtccttctggagctgtggggctcagactcctggcagtcctcattgctgtgggcagtggtttcagggaaggtggtcttggccccactgtttggaggtgaaagttcttacttacacctggactcatctccgccaaggatttatgctatcactgaccatgggcaatgacttagttcctctctgccatagagaaaggcttggattgcaggaagtgcccagtgaagaaagccttgctcaggggcccttggagcaaggctttttaataaactctccatgtttaaattgttttctcatccgctttgaagctgaccctgttctgtatgttttggatgtgatcattttgatttgttgcactgaaatcttgaattctctagcttaaaaaggctttttaaattacaaaatatttcaaacttgtacaaaagtggagagaaaaatataatgaacctgcatgtacctaacacccagcactaacaatgatcacacttgtctccttgttctttgtgtttaactttttattttgaaataactttagaatttcagaaagctgcaaaaagttcttgtatatccttcactcagcttcttctaaggtacaattatgaaaccaagccattaacactgctgcaatattgtcagctaatcttcagaacttatttgagtgtgtcagaggttctccaagatcaacctcaggtccagtgatttgctaggaagactcatagaacttagaaactgttatactgagccaggcgtgatggctcacgcctataattccattgctttgggaggttgaggcttgaggatcacttgaggccaggagtttgagaccagcctggacaacatagcaagaccctgtctctaccaaaaaagatgtaaaaattagcccagtgtggtggtgtgtgcctgtagtgctagctctttgggaggatgcagtggaaggattgcttgggcccagaagttcgaagctgcagtgagctataatggaaccactatactctagcctgggtgacagagtgagactttgcctcta

SEQ ID NO: 315256 - DNA, 4001 bp, Homo sapiens
gttattatcattaatattaccactttagttatgggcatcttttaaaacaattctggttctcctaataattttctaagagttatctcatttgtataaattaaccacttatagtcaaatattctctttagtcaataaaaataagaaactgatgtttattggcttaagtacttagatggacgttgttttataagggccaagaaagatgtattaaatggcccttcatctaccattaatggaaggaaatcatggtaggaaaaaatagttaacactggctttgtgcaatatttgttaatttttttagttctaagagagctagctttgtattttggctttcctcaggaaagaattaacttgcagtccctgaatataggaaacccacaacaatttggtagtcaaaggaagttagcctgggctaacttgggtaaaacatggaggagggaatacatcatgtacagtgagcttggagtaacttggatttctcagaggactgccactcaaccagcttgtcacaggtttacagtattacaagcacggcagatgcagtacaatttctacagtccctaaacttgcctcatgcacatgttagcaagaaaactactgatagaagtacaagcctagctcacatgggtttccctaaagaaggcacacagtattatatattttttttctgcacagaagtctgacagctggtgaatcatttgtaaataaattgatagtttgtttcactgggttttctgtcattgttgactcatgacctagtaaggatttactggactataagaataatgattcaaataagcacatgggtatcatattttctgtagaaagtaaagagctttgaatatcccatgctgaaaaaaaaaaaagcctgaactttaatttttaaggaaacagtgactttccttcaaattataaaaataatttttgagtattcttgacagaaagaaaatttacctacttatcagcccactttcactatctcaaataaaaaaatgtagggaagagaaagaaaacgagagaggaaaggcaagaagcagcttagaggcttagaggcagagaaagagtgaaacagaaggaaaaaaagatacagaaacagaaaatcagactcttaggtaacatgatgaatccccttcactttgcaaaccctctttccatctattttcaaacaatgtcaacagtatattttcttttcttgatattatgcatcagccaccccccaccttttttcataactggtcacatgtgccaatgattttaatcgtcaactaaatctatatatcagaaaatcatcctaaaattccaaatttagattcacttttatgcttcaaggttgtttacaaatagttgttctaatttcctgataaacaaaggtgaaaggactacttaattcagaaaatgactgttttttggcttgcaaacaaataatgattaaattgaatgaagccagctcttggtacataaacagcgccagctgtggtttcttctggactggtgtggctgtcaaaaggaatctgaattcaaggcagttgtaaagtaagtaaataaataacatcagcaaaagcaaataaaaagcaacccctaaaaaaacagcgaccaaaaaatatttttgttaggacacgttaggtcttcattaagaggaacttgcaaaacttgattattcactttctgagtttgaacagagcctggtctctgggaaacaatccaaggataagatgaaacctgacgcttgccttatcagactttgctgggaacacagttttaaggaaaaagcaatgagaaaagtctacttaccaaagtcacaaacttcaactccttggctagtacacttcggtctagccagaaaaaaagcagaaacaagaagccaaggctaaggcttgctgccctggccaggaggaggggtgcagctctcatgttgaggagagctgtttctggcaggagttaggaggaactgctaccacttcaaaagcctgtagaggggaagctatttaattaagggattgaaagggaaggaggagccacactcataagtagtaaagtttccaggaagcgtagggcaggtttggtatgtaaataatgtcatgtaaattttgagctgagagagatcacagtttccccatttaagttaggacaccaaggccaagagcggggaaagctgttgatcaaggtcacagagcatgttagcagacatttctatccttgttttcagtttacttttatctttgttttttgtttttttttttttgagacagagtcttgctctgtcatccaggctggagcacagtggcacaatctcagctcactgcaaactccgcctcccaggttcaagcaattctcctgcttcagtcttcctgagtagctgggattacaggcgtgcaccaccacacccggcgaatttttgtatttttagtagagacggggtttcaccatgttggttaggctggtctccaactcctaaccgcatgatccgcctgccttggcctcccaaagtgctgagattacaggcatgagccactgtgccaagccagtttacttttatcttttctttagatagggtatgatacagcgttggatttgtggctgtcacttgggaaagggatctaccctgactttagaaaccttagaccagtgattcttaatctgttgggagtccaaagttataggactgaaatctggaaggaaatacaggtgttgacatatttggggcctatttccatgccaaacatggctactttttcaaaaactctcatgtagcctatagaggtatttttaaattaaagaagaaaagtaacagcaagtttattttgaaaaattttaggctgggcgtggtggctcatgtctgtaatcccagcactttgggaggccgaggtgggcagatcacttgaggtcaggagttaagaccagcctggccagcatggtgaaaccccatctctactaaaaatacaaaaaaaaaaaattagcctggcgtggtggcacatgcctatagtcccagctacctgggaggcgaggcaggagagtcacttgaacccaggaggtggaggttgcagtgagccgagattgtgccactgcactccagcctgagtgacagagcaagactccatctcaaaacacagcaaaacaaacaaacaacaacaaaaaacaaacaaaagaaaaattttagtcacaccttaagacaattggacattacctgtggtatctcaaaattagattggaggtccctttccaaacctgacagagttttttaagaaagcaaaaagcccaaacctacaattctatattattagtcatcaactttggccataagccttaaattttgagtgagttacatccttgcctctccagctatgatctcactggggacactacaaaaggcgatccagactgatggaactttgctttccattttccccaacctgtcagttccatcataggctaaaacaatacaaacttgaggtgcacattgagattttgcaagatttgggggcagagctgcctgtcatgatatttctatcataatggcagagggagaacaatggtttacccgcaacctgtttcctggtacattgcgcttacctgtggcaggaggattgtgttcttatgtgatcataggatgccctggaatgtggtatatgggagaactgttccttcttccggcagtaggaaacatgcgcaaataggctgggcatggtggctcacgcctgtaatcccaccactttgggaggctgaggtgggcagatcacttgagatcaggagttcgagaccagcctggtcaatgtggtgaaaccccatatctactaaaaatacaaaaattagccaggtgtggtggtgggagcctgtaatcccagctacctgggaggctggggcaggagaatcacttgaatccgggaggctgaggttgcagtgagctgagatcacaccactgcactctagcctgggcaatagagtgagactctgtcccccctccaaaaaaaaaaaaaaatgtgcaaataataaatgcatgtgtg

SEQ ID NO: 315257 - DNA, 4001 bp, Homo sapiens
caagacccatctctattaaaaaaaaaaaaaaaaaagacatattccaacttcagctgtttaaatgtgggaaaaaatgtacaacgaagaatcagtgaaatacggtgtctatttacctaacagactcatctacaagactgagcttcttgatgacaagagcctatacctgccacatagcaagtactcaaaaaacatttttgtgaaatagaaaaaatccaacatatcagctcattttcctgtcctaattagtttagtaaactggatatggtggaattttaatttaagactctaaattctcagaattttacatctgttccttttccaggatgggagatacatctaattcctgtaccctgcttcattaaaaatcaagccccatgaacccaaagtaggagagtggccatgggaggcaggaggcttaatagaaccacagagttctggatgtttaaaacctaggatgcaatttctagtctataaaaatcctcaagaattgaacctctactctactaaaaaggcttttgtcttttttgaggattttaatgtttttctccttccaagtttaggggtgatgtgattttcttggggaacatgaaggaaaaatcttatttttgttgtttcctacctgtaaaatgacatcctttatagaaacagcatcactactagacacagtaacaacagcaatagtctggatttgttttctgggtctctaactcatcaaacacaacccaacacatgaattatatgtatcagtgtttcgattaacctgcagatcttgcaaaaatggaggctctaaatcagtagattctgaatgacgcgtgagatcctgcatttctaacaggcttgcaggtgatgctgacactgctggtccatgggccagactttaagtggcaaatgcagcattatttcatttaaccttcatgcccacccccatcggctaggaattattccataaatgaggcctgaagttggaaagttacataaactgcccaagaccaaagcgcttaataaagagtgaggtggatatttcaacccaggtctgtaacccccggcacctggtaatcttcctaccacaccacagtctaatcaaagaaagtgaaaaaataacacgcctaggacccccagcaaactttctgggcatccttaaattacacgtgctcctgaattgatctcaaacagacccgcccacgagtcactctggagactccgcagccaaaaaacaggcaagagttactgaaaggtgaggcagctcgcgcatggggcgcagacggggaggaggcagtaccctaagtggccgccgcttccctagtcagttctacggcttgaggctcgctttgccacctatgggacactctgggaaccctccgtccacgcttgcaaaccgccgggaccttccaagtttaggcgggcgcacacgcgtcccgacacagctgagtccaggaggcactcggggagatgcgaccctggggcggtcacccaagccggggcccggcggccggctagactgagcctcccgcccagccccgaggctccctagagaaccgagcgcgcaccccaaaaccctgctcctccggggacagaggcaggaagaggccacagagagccgccacttcagggagcccgaggagcacggcgagccgggtgggctccgggggcgggcagagcgtggggcggggacggggcggggaggccggggtcccgagagggggagaccggaagggaacgccggggaggggagggctgggagcggcggttacaaaccccacacgccgaaaaggcgcgctctctcgtccggccgcactcactcacctcccccgtacacgccgccgctcatggctgctgccggcgcgactcctaccctaagggctaactggcgaagtgactgcagtggccgcgactgcgagtctcgaggagcgatagcccctgactcccttaacttccaccgccacccacctcaggcaacaaagcggcgtccacacaccccggagctcagccacacttgctggctcctcctatcagccaatcactagggtccaggcctaagtctagccaatcagaatgcggctgcgccgcatccccgccgcggcccagcaggtttagccaatcgaaggcagccatgggggcgggaaagaggaaagcgacagcaggacagaaggagttgggttgcggagctggagggggcggagcttcccgggtgggcgagggaatgggcggaggcagtgggagaagaaggaggaaggctggaagaagcatgggggcgggactaggaggtgcgtctgggcgctgaggagcggcgggaacccgggtaggggaaggtagacccctggaaattgaacgggtgtctccacgccgagattcctgtccagtgactgtggggaatgcggatttctttctttttttcttcagaaaaagtattttaaactaacttttatgttgaaaaagtaaaaattttgcgctccactttgggataggggaatcagtaaatcagacaaattgataggatcttgcagtttttaaaatggttattaataagtaaaagaagaatgaaattatgcggtatcccagctaaacctaggtagcgctttaaaaactattaaaaaacttactcatttctttaaaaaaaaaaaaaaatttcaggccgggcgtggtggctcatgcgtgtaatccgagcactttggtaggccgaggcgggcagatcacaaggtcaggagttcgagaccagcctaggcaacacagtgaaaccctgtgtctactaaaaatgagaaaagtagccgggcctgtagtcccagctacgcaggaggctgaggcaggagagtcgcttgaacccgggaggcagaggttgcagtgagccgagattgcgccactgcactccagcctgggcgacagagcaagactctgtctcaaaaaaaaaaaaaatcaatttcttttatcctgtgagaggtatttaaaacagctaatcaatcttcattcaagcaagcacccaatcctaaataggcatcccaaaaacagccttagtcccctatttctaccagcctagtccagatcaccttcctttatccccagattactgcaacaacttgttgctgtgtccctttgccactcttgatcaagggagcttcatctgtgaaaacgcccaaacccgatcaggacactccagcgctcaaacccttaagattgctgcctatccttgtaattgatccttgtctagagtctagacatgcagtgcctacttttaaccttagaaacgattgactaaaaccccatcagtctcagtggcagagggtggcagaaagtgatgaggcagtagggtgggaaaaaaggctagcgggaaaactctttcccattcacttgacaatataatcacagtgtatctgaccatttagaaaagccctattaacccagtgagataatgcagatgtgtgtcagcacactatggcactagggccaaatccagtcttttgtgtgtggggtggggaggggaggtggggaaaaggggaagcaggtgggaagactgcctttttttttttttttttttggccttgagctaagaatgattatttctgtttttaaattattatttaaaatattttaaagaataatatgtgacaggttgggcatggtggctcacagctgtaatcctagcactttgggaggtccaagcaggaggatcgcttgaggccaggagttcaagaccagcctgggcaacacagggagacccccgtctctacaaaaaattttaaaattatctgggtatggtggtgcatgccccctagctactctggaggctagggtgagaggattgcttgagcctgggagttcaaagcttcagtgagtcgtgatctccccactgcactccagcctgggtgacaaagcaagtccctgaaaaaaaaaaaaaaaaagaaaaaaagaaaacaaaagaaagaaggagagagatgtgaaaactatgtgaaattcacacttcagtgaccttaaactaagttttattaggacacagcccacacttactc

SEQ ID NO: 315258 - DNA, 4001 bp, Homo sapiens
gactcaaaggtatcaaaataattcaataaagttctttgagaagtatccaattaccgctctctacctaaacacaaactcattgtttattatgttcccttgacctgagttatagtacatagctcaacaaatatttgtttaaataaatgaaacaaaaattgtccactacaaattaacatacagttattgagcatttatgtgactgaagaaatgttgctatagaatccgggcccaggctctgaattcacggatctgtctgcaaattcagactgccacttccttgctctgaatgaagctcctaactcacagttactgtgagaattaaatgagttatacatgtaactcagagctgggccacaggaagcattcgaggaatgttggctcttactatagtaaagcctttcaacgtgatccactgccttcacaagaggtcagactctgtggcttacacgaccctcatgatatggcccctgctaagatcttcagtccccttccttaactccagacatcctaatctactggctgggcctccaacacttcacatcctctgttggcacaagtgtcttccacactgttcttcttccctgagattccctcctccctctggttagctcctaatcaccttcaggactctaaacagatgtcacctcacctcctttgaagaaaccctccctgactgtcggggatggaggaggtacttgcttgagtgcccaatactgccctctgcacaagcccattccatgccatgctctgatacctgttgtcctatctccaagtgtgacctctctcctcctaatcaccccccacagagtgggagaatcctagagggaaggatctggcaaggcccttacagaccatccagtcagccttctcaactagacagatggagaaaccaggcctgtgcaacagtaatggccactctgggcttacggtgtgccaggcactgtcatactagtgataactaactagtagctgccctactagttaggtattatccttaacccatctaccggtaaggaagctggatcagagatgtcctacatgaatttctgagcagtttatgcctcatttcttctgtgaattgtacactgcctgtgcccgttttcctacgtgaatgctgttttagttactgatcagtaaggttttgtgtatgtgtatacatctaaggtcctctgccaggcacgctactgcaaataattttttctggttagtttagtttggtctaatagtgttgtttttgatacacaagctcttaatatatatttagacaaatgtccaccatttccttgcttttaagcttgaaatgacttccattatctgagatttccttaacaaaggaaaaagcctggaccccaaactatcccttaacaagcacaggctgacgctcccagtgagccagcctggtcctaaactctatctgccaccatttaaccctcacggcaacttgcgaggcggctggttatcaccgtggtcgttttatggtcggggaagctgaggccagagcccgggcaggagcgcacacaaccagacggtggggcgtgcgggagatcggagcggtgtccctgcgggggctccgcctggctcctggcgctccgcacctcccagccctcggcgtcccggcgcgccaccacccggaaaagaacgaccgcttccgcactccccccaccaggggctggggcctgcaagggggactcgaagcctcccgccgcctcccgccccttgcctggcagcggaggacccaagcaagggcaaagagttccaacccagccagagccgcacctcttgcagcgactccggcaccagcgcgggcacgatgggccgcttcacgccgcgctgctccttctccttctcgccgcccttctcctttccgttctccgtatcacccttctcagcctgggtcattatggccggagacacccaccaacctctcgcctcagcgctgcagccacgactgccgggatggaagggccaccgcgcaggcgcacggccggctgcccacagtcaagatggccgccgcggagtcgccccagagggctccgaaaaggcgggggtggggctgcccggcgcaggggctgggggcggggtgtgcatgcggattgattgggtgggtgttgctgtgattagtcctgactgtgtagatgccagcaacatagtacacatagcttttcgagcgcctagtgggggtcggctgataacccgcatcttatttcgtcctcacaggcatctcttctcctggcttcccagataccatatgtactcttagtttttctcatatgtcttcatgttcagtccagcctctgatgttggggttaggtcttttccaggcacactccttgggtgactatccagtttcctggctttagcaatgaatacgattcccaaatatatatatccaggatgaaccgctcagagagatccgtactgataaccagtgcctacttggtctctccatctggattgtctacaaggcactgcaaacttaaatatgtccaaaatttaactcttgattccctcccctctcactttcaccatctcagtaaatgtcattttgattcttcacttgttgacagcttctacatccaatccatcagtaaatcctgcagtctctaaaatagatcttgaattcatccacttctccattcccatgccactacctagcccaagccactatcatctcacctggatgactacaacagcctcttaactcgaactccttgtcctgtccccctatgatctgttcttatatagttgcccacgttgttttaaaatattacgtagttaatactactatgtacccagcactccactaagacttacctcaaaaattagatgtcactcatgctttaaactctaatggtttccctttgctcaaagaacagaatctaaactaaccaccacctaaagaccatatctagttattgctacatttctaagttcacctcacaacactctccccattccttggcatttccagctacacctgttttatctttctcagacatgccaagcccttcccgtcatcgggctgttgcacttgctgttcattttgccttggatgctcttccctcagctgtctcattctcacgtctgaactcaaatgtcacctcaggccttccgcagttattctctcatcatcctattccctttgaagcatgaagcattagtctgtaattatcatgcctgctcactgtctcccacactagaatgtaagctccgtgagactttgccagttatcttcagcacatggtaggtgcccaataagcatgtgatgactaaatactaaataaagaactcttggaggtaaaaatttaatccccgttttacaggtgagtgaagtgggataaaatggcataattcactcaagatcataagctattgagtagcaaagacaagagttaagcataaagtactcaagaacctgtgttttacattctatctgaagtgcaaagaagaatacctgaatgtcaaatgcagccagaactctgggataagacccgaggaacaagtcctgcagcagcagtgctaggaggcagaagaggaccatggttcacatgctcaggaagagccatcagtaacaacaatcaaccacctactgagactctgccatggtctccccgctatagggtaaggtggaggtttaataatgcctctgccattcactggcaatacaatctaggaagctgccaaactttactgaacccttgcatgtatctgtataatgcaaatgtcattatacatttacctcactttgtatatatgtatacattatacatatccctcactttgtcagaatttaaaatgtgtaaaaatttacaggctgggcattgtggctcacacgtgtaatcccagcgtttagggaggccatagtgggagatcactttagcccaaaaggtcaaggctgcagtgagcagccactgtactccagcctggataagagtgagaccctgtctcaaaaataaaaataaaaaataaaaataaaataaaaattaaaaaataaataaaat

SEQ ID NO: 315259 - DNA, 4001 bp, Homo sapiens
ccacataacaaaagctctccttgatgtcttcaacaatctttctgtctgaagcactgagcaacatgataccatggttcttcattagcaccatgaggtagttggtgaggtcaaggcctgccagatccagttgctgcacaccatgaggcagacagtaaccctcaaagatgggcacactctgggtaaccccagcacctgaattcagcacaaggccagtagtgaagccagcagcaaagagagccagcacagcctggatggacatatagaaggcaggaacacccagatgctcaaaaaacatttccgtgatctgttgccggttggccagtgggttcagcgctggctcagtaatcaagactgggccatcacacggcttcagctttaggttatagtcatagatatgcttccacatgatctccatgtcctcccatgaagtaatgagaccacgctccactgggtaactgtaaggaaagcaataagatcaatgacagctttttatttttctagtttctattgtcttcgaccctcagttaattccccgcgtttattaccaatatccctttatgggcaataactgccacagcctctcacagcaggtaagtgtcagccaaaaatagcacagctacttacctctgcaatttttttttttttttttggagacagagtctcgctctgtcacccaggctggagtgcagtggcgcgatctcagctcactgcaagctccgcctcccgggttcacgccattctcctgcctcagtctcctgagtagctgggactacaggcgcgcgccaccacgcccggctaatttttttgtatttttagtagagacggggtttcaccgtgttagccacgatggtctcgaactcctgacctcgtgatccgccctgctcggcctcccaaagtgctaggattacaggcgtgagccaccgcgcccggcctacctctgcgatttttgttgctttccattttctctgtcctttggaaccttgtgacttttaaaaaattgggaaatgtccacattatagtatagtttaaatgtcaattgaagagaataacccaagtgacaaaagggaccatgagttaatattcttaaatgaattcgttcgataactttatacgttttaatacatttgtatagccacagagagcaaaatgttcagtttttagatgtgtggtacccttggagatttgtggcccgtgcgtttgtagtaattccagctggatggggctttccagctcccggctttcttattctttctgtccccattgcgcacctcctttggggtcctttcctgccccccgacaacacccccagtccccccacccccagccaccccagccccaccccccaacctccccagccccaccctaccccacccccaccccacccaccctccccagccccagcagcctgctgggagaaggaggtacctgatgaacagcgagctcctccagtcctgagcttggtcgcccacgcagagttctagcccgccctgggccgcgcggctctggcccttggcgcggccgataatgttcgggtagataaactggggctcccggcacccagccacgcccgccttgatcattcccgagccgttgtcgatcaccaccggtagctggcagtggttcatgccgccgctgctgccgccgcctcctgtctctgagccgctctagctacgggctcggccggggccgagtgcctggaacgccgcgtcacagaggccccggcacggccgggtgaggccagagtcctgggggcgcaggcagggggtcggcagggccccaggcggaaggactcgctggacgcaccgtgctcctcatgttaccgcccgctattgcttctcgcaggaattgggccaccccaacacctggaatcccggaatcccagtatcaggaaaacccgactttcgcatcaaaagattcaactctaacccttcacaagtgcatttctcaaatacccagaagagctataacagcagttttattttccaaagccacggaattctggttaactggtggcggttccggggagttctagaattcgcccttgaaactggggaaaaatgagacttaagaggagaaagttgttgcaggaagggaggcagtgtctgcttctgaaatgttaaacttctaaaataaggagaaaaatgctggaatttaaatgagttttaagtacgtttattattgtttctgtaccttgggcaatgctttgttgtgtttcttcctgtgatttccaagcaaaatgtacgcaattaaaacaaaatagtagttcctagcttaaatatgtaaataaatataaatttatatatatttatataaatatatataaatttaaatataaaatattaaaaaatatataaatttatataatttatataaatatatgttatattatataaatatatttatatatttataaaatatatatttatatatttaagcaaggatataaatcgaaatatatatatttatatttattatatgtataaatataaatatataaaaatttatatttatatttattatatgtataaatataaatatataaaaatttatatttatatatcataaatataaatatataaaaatttatatttatatatcataaatataaatatataaaaatttatatttatatatcataaatataaatatataaaaatttatatttatatatcataaatatataaaaatttatatttatatatcataaatatataaaaatttatatttatatatcatatataaaaatttatatttatatatcatatataaaaatttatatttagatatcatatataaaaatttatatttagatatcatatataaaaatttatatttagatatcatatataaaaatttatatttagatatcatatataaaaatttatatttagatatcatatataaaaatttatatttagatatcataaataaaaatttatatttagatatcataaataaaaatttatatttagatatcataaataaaaatttatatttagatatcataaataaaaatttatatttagatatcataaataaaaatttatatttatatatcataaatatataaaaatttatatttatatatcataaatatataaaaatttatatttatatatcataaatatataaaaatttatatttatatatcataaatatataaaaatttatatttatatatcataaatatataaaaatttatatttatatatcataaatatataaaaatttatatttatatatcataaatatataaaaaattatatttatatatcataaatatataaaaaattatatttatatatcataaatatataaaaaattatatttatatatcataaatatataaaaaattatatttatatatcataaatatataaaaaattatgtttatatataataaatatataaaaaattatgtttatatataataaatataaaaatttgtttatatataataaatataaaaatttatgtttatatataataaatatataaaaatttatgtttatatataataaatatataaaaatttgtttatatataataaatatataaaaatttatgtttatatataataaatatataaaaatttatgtttatatataataaatatataaaaatttatatttatatataataaatataaatatatatatttcgatttctatccttctggtgtaatctgcaagcctcattcgctactcttgatttttaggctgaaggacgtgcctgtctttttgcaggaaaagtgaagtttatcaggtcatatgaaattcaagtttggaaaaatttgaaagtacattgcatgtcaataaacgcatcttggtgtctgattctgcatacatctgtagagaatttgaaaacaagcagtcaatttagaacttctgcttggtcttcggaagcaaaaagaggaaattcaaaagtaattttacacgtccttccaccagaagctgaaaggatggctttttcgcggctgaataacgaaagccccctgcttc

SEQ ID NO: 315260 - DNA, 4001 bp, Homo sapiens
caggtctgctccaaactgggcctggggcagctcttttcacagttctccacaggtcagggactggttgatgtgactacaagaaatacccagtgacccccaccttcctcccagggcaggaatacaggtccttatagtgtgactctgactgccccctggcagggtacactgctcagcactgcccaagctaggtgactgaagcagaggaaaaagaaaggacatacagtccttccaggggtctgatgccgccctgccctgcctaaggagggaggtgtgagactggtgtgatccccagatcccaggtctcaagctgtcctgtcttgggaggaagctctcctaaaggcctgggcttggaagagccccagcacttccagggatcaggcacccagcgggtctggaggcagtcaggtgggctgcggtctgcctatcaagtcagcttgctgccgccctccctctagcagaccaatgcctcccctttcactttcgagcactccttcttggggaaaaggcatcccaagggagcggggcaaaaaagagcagaaagtccaacacgaccaccacttcgcctccaagaagcggctccaggagagctgcaacgccctcttccatacggtactcaggtgccagctggtctttgcccttcggtttccggactcaggctgcgcgcgcgcgcgctactaccctacagaactcactcgctttcggtgtaaactaagcctcacgacgacgcacaggagaaggtagaaccagggtgggaatgggacgcagatcccaaatccccacccccgcagcagcgtggggactccggccccgcccctgcacgcccggccccgcccctcgagggtttcccagactccaggcggctgccaccgagggcggcgggggacccgcgctgcatgtgtaatgggggctgggaacaaagacgcgcaggacccggcggccgggtaccagccgccccgaccttctcgccagagcttcaatgcccagctccccacgtttcccaggactggccaggggacgtcccggcgcgcccgccggggttaggcgcaccccggcaccactgagagagggaaatcggtgcttggaccgtaggagaaacaagctttccaggcggaactccgcttgtttacgcccgcgcccacatacccccaaacacacatgcgctggccgaacacctccagccacacgcccgcagccgcgggcgagctgagcgctggtcacccaccccgccacgtgcctcctggaggcccgaaggaagagggacctgttgggttttccatcttacccaccccctcccctcccaagtgcccaaacaaagcggtcccgcgaagcgaccacactccgcatcccggggccaacggcagggaaagagggagcaggtgggagccagcaccaacagcccgccgggccggtaacgcgacgcagactggtggcaagagatgcaggggactttgggctgcgtgaagccgcccccttcgcttcgctacacttagtgactctgagggacatgcaaccctccccgcatgctgctgctgctgctgcacctacaatcctgccacccccaatgagatctgcccacccctcttggccgccttccccacgctcaggttttcctcactctttccctgggttccacgcgcccgcgtagcccgaactccgaccctgaggctccgcgtcccggcccccatcgcaggggcgcctctaggaaccagaatcccgcagatgactgcacagacaagatcgtgcccccaagttcggcgagccgggcgcccaccgcgcccccagcccacgcccccggaggtgagggctgaatacaggtggtgcggcgacgaggccccgggcccgccctttgttggtaaacaccgcgcggcgccagaggccagccccgcgcgccctctcggcgtccccgcgccgcgcccagttcttaccggcgcacagcgatccccagaggagggcgagggccacccagggcgccgtcatgttccgcggcgccgccccgcgcacacccggagcccgcgggcagggccgcacggcgctcccggggcgcgcagggccaggcggcggctgcgctctccttcccgctccttccttcggtctcgttccctgcgcgcttcctgcgccttcgtccccgagcagcgttcgggctccaagggccggtcggcggggccgggctcagggccgctgcgggcggcgcaggctgcggcccgggctccggggcgacgcgggggccggggggcggcggcggggcacgggccggggcgcgcccgactcaggcatagcgcggcggggctgggcccgggccccgggcgcaggggccgagtccggaggggccatgaacggggggaggggtgggggggaggggagctgaaccgagtccaaaatggctcctgagcggcggccacggagccgagccagcggggaaacccggatgttggatacaaagaggcgggcgggctgggcggggagggggaggggaggcgggccctccggccgcgtggtccgcgcccccctgaggggcggggccccagagaaacaacaacacggaggccccgcccccatcccgcgccctgtgggaggacgcgcgtgcaccaacttgctggaggacagggcggggcgcgcggacggaggtggcgggaatgggctcctgaccactttgcccgggagcctgtggccactgcactcgcaattagtgccccgcacgctcgagcccaagctcctgacacatgctgccctacaaccccggaatgagtggatagtcccgggactctggcccagacgcctctgtgccttggattccccacctgtgcaatgggggtgacagtgaaccgtgggaaagtcggatctctactgatgggcgaattaagtggcagaaagaggctgacttccctgaattgacaagcagtctcccgtctgcaatcccttgccacacactcaaaggcacagctagggcggggagtggtcatttaaacccaaccaagtgagggagcgggcagagtcccgcccctctaagcccagcaggtggaaaagggcctctggcaacctgctggccctccctaatcctatcttgtcttctgcagttcctgcgccacccacagcggccctgagcttcaatctgcactttcaaaacttcccagttgcctccagagccctgcagttgaagatcttgtctagcacatggttttgctgttttcctcaccccgaactccctccttggagggccatcgttctctgtctcagattccaccctccttatcacacaactagagcttcggaggaacgtgatggggctcccaactaaggagggaaagaccatcatagctcagggatgaggctccgagatcctcagataacattaattgtcctctgtcttctcttgacttggcacatccttgcttggagcagggcaggagcagctgaaagggaggtggcacctggaggtctcagtcatttcacttctctgagcctcagttttcccatatgcaaagtgaagaggtacactccctcagggttttgcatcttcttaatggcagaaacctagtcaaacaaaatattatgtaaatgttcactataggcagggcgaggtggctcaaacctgtaattccagcacttttagaggcccaggaggctcttgaggtcaggagttcgagaccagcctgaccaacatggcaaaaacctgtctctactaaataatacaaaaattagctgggcatggtgacacacacctgtaattccaactactcggtaggaggctgaggcaggagaatcgcttgaacacaggagggaggcggaggttgcagtgagctgagattgcaccactgcactccatcctaggtgacagagtgagactctctctcaaaaaaaaaacaagtttataaaggaatgtatattgttctgattgacattgaaatagggtcaactacccccggtcaccagagcagcaggaacacctcaggggccacactttggaggcactgcccagaaagatttctgggtctttaaaagtc

SEQ ID NO: 315261 - DNA, 4001 bp, Homo sapiens
gccccaggctcacctctactttctgacagcccaggcccagctggcgggctgtctcctcaaagaaagccacagcagctcctggaggcacagagtgtcttggggctgcttctgcctacccacagcttcccaccagcccaggcagcccggagagtggagcatacccagaaatgggctgctgcctccccgacacactccatatccctcagagatgcttgcatttccatccccaagaaagaagatatttttggctactcagtgaccctttctggaagtccagggggatgtctggacacagggttggaggaaggtgttatcttccttaaatatgggaaactatggcacagagacatgaagagattcacccaccatctctcagctgattaatcacagaggaggaatttggacccatgtacacaattcccagccactaagttttttttttttcttttcctttttttttttttttttttgagacagggtctcactctgtcaccaaggcaggagtgaagtggtgcgatctcggctcactgcagcctcaacctcccaggctcaagcgatcctcccacctcaacctctggagtagctgggactacaggtgtgccaccattcctgactaatttttgtattttttctgtagagacagagtcttgccatgttgctcaagctagtcttgaactcctgggcccaagcaatctgccagcctcaacctcctgaagtgctgggataacaggcaggagccacctcccaggccctagccaccaagcttgactccctaagggctgtggcctttgtccagccccagtgggcttctggagggcctctcctttccctgtggctgcctcaggcttcccccaccactcctgccctggagagtgaggtgaagtttttctttaaccagctgccaggagtaaccttggtcagcagcagagtctctggggaaagggttcctccctaacctggaggggctgcctcagtctatttacttggggaatggctggaggggttggggagccatttgggacagcagagtggggctcagctgggtgacaggggttggaggctggtttagagcacagtccccgtcccttaggccccgtcacaggctctggaaccaccgtcttctcaccatagtcaggcttgggctggacagtgcggatacgcaggtactggcggaagagcgtcaccgatgggtgctcctcctcgggacccttgctggtcatggcgctgcgcgtggtgagctgggggcaaagtgaatggctaactacccctccaagaccctggaaatggtgagctcctgcacacagcctgtccccacggcggctcccggacttcccacaggggtaggataccgtgtttcggagcccccattaaggagcacccattctgtttcaggcgctgggctgtctgcttccagcacatttccttatttaatccccaaaagagccccatgaagtttgtgctcagaatgcccactttacagaggagaaagctgagaggctcagagaggttcaaggacagctcatagagtagctgagcaaggtttgaacccagacttgtactccccccgccctcctaaaaaaaaaaaaaggcaaaaacaaaaacaaaaaacaaacaagaaaaaccccaacgcctcccagttgcccggctttcaagccacggagccccagtccctctatccctccccagggcccccacctcactctcctgtcgctgggctcacgctcgcctctcagcgcccttccctgactgtggcctggacttagggtccagcgaggtcgcctgcgaggtcgcaggctcaggaccgccccggtccgcccaccacgtggccgaggccggatgtcggggcggagaccgaagaccgtcagtgagggccgtcccggcgccagcggccgcgtcggcgcggatgtccccgcccgcctctggttcgggcctcagcgagattactggaggattagatccggatcccgtccccgggcagcggccgccgcggccagcgccgccccgcgagttgcgagctccgggctggccctgctctgacaggctcgccccgccccacacgacacgcctgccactcctgcccccaggtatgcgccgggagctcaggacggtcccgtcccctaagggcgcctcctccttcagcccccggatagggcgggaggaaagggggccgccccgaggctctcaagatgcagagctgcaaagccctgggcctgcgccctcgccctcctcggcaagtctccaacggctccccactgcaggcctcagcccctcggggaggtcctccctgacgcctcagctccacttgtactgaagttattggccaatgtctgtctgcccacactgaactccaggaggctgtgagctccacttcctgcaaggttctgcccggggccgtgccgagcccggacagtgcctagaatgggaatgaatgcatggacaagagcacgtgtgacggtttaagcgtgccactgcgtgtgcagtctatcagtggatatgattgtgtatgtgacagtgtgagatggtgggtgggtgtgatgaagtcactgtgaatggatgtaattgtgaccctggatggacagtgtgaggaaactggctcttctgcagccaccagagggggaggctaaacaggcacaggtgtaccactggccccctgcaggccacagctgcagttgcccacttgtgccccagctgccctttgtactcccagccaggtctgccctctgctccaggggctgagtcagcttggggaagggtgagggacaaagacttcaatctctaggccaaggaggcacgctgtgggaagggttctgtcccacctttcctgaggtttaagtcttggctgctcacacataacatgggggcaaatggactttaactcataacaatgctggataattctttatttagttatttttttgatacagagtctcactctgtcatgcgggcaaatagattttaactcacaacaatgctggctaattatttacctatttattcatgcgggcaaatagactttaactcataacaatgctggctaattatttagctatttatttttttgagatggagtctcactctgctgcccaggctggagtgcagtggctccttctcggctcgctgaaaactccgcctcctgggttcaagtgattctcctgcctcagcctccagagtagctgggattacaggtgcgtgccaccacgctgggctaatttttgtatttttagtagagacagggtttgtcatgttggccagggtggtcttgaactcctgacctcaggtgatccacccgccttggcctcccaaggtgctgggattacagatgtgagccacagtgcccagctaatgctggtttttttttttttttttttttttttttttttttttttttttgagacggagtctcactcgctttgtcacccagggtggagtgcagtggtgtgatctcggtcttggctcactgcaagctccgcctcccgggttcacaccattctcctgcctcagcctactgagtagctgggactaaagtcacccgccaccacgctcggctaattttttgtatttttagtagagacgggttttcaccgtgttagtcaggatggtctcgatctcctgacctcgtgatccgcctgcctcggcctcccaaagtgctgggattacaggtgtgagccactgcgcccggccaatgctggctaattgttaaatcgcgttccccataccctctaggttcctgacttccttggcttggctgtccagaccctggatttcccaccaatccctgtggtcatgcagcagcagtaatacaccccgcctcccaccagcaattccccagccttatgtggccaagtactcagttatccagactcattcagtcctataaccaccctccaacctaggtgttgccatcatacccgttttacagataaggaaactcaggcacagagtggtgaggccaggcacttaggaagtggcgcattcttagccttctcagactgctggacatc

SEQ ID NO: 315262 - DNA, 4001 bp, Homo sapiens
agcgcaagaaggcggcctccccgccctgcctcagtccctagggaaacgtgcgccgcaggctccctctctccactccctggaacccgtgagtagtagaaaccccagaggaaccgaaatcacgtccggacagcctctccaggctgtctcccactatcccgtttctcccggccaccccgccagtagggtgcagagttggactgcgctgcacccccactctcggttccaccccaattcaaagcgtccggggtaggctccgccttctcccccgcccccagagccctcggcccacccttccgttcctgggacgggacctgctccctgtcaatccagttcagcctcagggttcctggcgcgtgaataaaggccctgagagaaagcggggactctagattacgcaccgccctccacaacacacactgaaggaactcccagtgccttgggcaggggatcctcagccccacatccccgatgcaaggcgcaccaataaggagtctggtccgccctgcgctcagcggctccgctcccgggtggccaagtttgctgcagggaaccgcaactccagtaactttctccgagtttggaaactgacttccaggccgcctcgcagcgttgggcaacgcgccgctgaaccgagtccaaactccagaaagctctgaaacatccagaagcccctgggggcgggtgtgtgcgctccacgccagtgtactcgcacgcacagagctagctacccaaaccatacgagtttctagctgatatttaacgccggagaggagcggagcctcgccacagtgagggtctctaggcttagaggacaattaagtcttctagaagcgggcgaggaggcggaaggggagaggaggtggcgcgcgcccacttaccattcctgagcagaggctgatgacggccgtgtgctcggagttggtattgacatagcctttgtagaaacagtgcttgagttccgcttcctcttcggaataaaacttggtctgattcaccccgggcgtcccgaggagggtgacagtgaacagtggagcgataaatccggcattggcggtgagattaaatagaaactgctggccgaaggcagagaggcggtaatgcgcctgggaggaggtagaggaggaagaggaggaggcgaaggcaggccaggggtcagtggcagagttaatgctccgtcgcgttcttttgaagtggacgttcgtgggaaagggttctccgagagcgttcactcggatgggagacacgatttcgtattcgctcagggtctctaataatttcactgcggagagaagcagaggtatatgaaccaataattcatttttccttaagctttaatttaaaacgaaggtggggactttgttctgaccttattttccagcccattcgagtcaatcccttcacccttaatcagtggacaaatatttgctgagcacctactatgtgccagtaacaggacctgtgctaggtgctgaggatacactattccgagccagacaattaacaagtcaaaatatatatgatttcagatattgataaataacctgaataaaataaaacatgacgctatctggtgcccccaattactaagttactttagtttgcggcgtgggagtggggatggggatatatctggcaacagcaaggtaggggggggttgcctaaattcgtttccatagtgtccctccctagcaattggttggggatgacccaaagaagggagaggctgcaaagcgggagataattctttctaggaaaaggagagaagcctccgctgcggggtgcccctgcccaggagcgaggaccgggaggcggcgtcggggccggcggggtcccgggggccggagcctggttaccttgcctcgggtgcagcctgtccttgcgcacggccgccgcggcgtctgggctccccatctcggccaggtcccgcaccaggagcgttagcagtgtggcccaggatacaaactgcatggtgcttcccacccctccctccgctgcccccacccccctccctcctgccctccttggctgcggcggcgacgcgaggcagcggccgtggagagcgcgcggagcccggcgcccgccgccaacttttgactttaggagtcgctgaggtctcgctgcgagggtcccgtctgcgctcggctgagcaacgccgccgcctgccgagagctgagccgctcgggccgcaggaggagccggaggagcaggaggaggaggaggactggggctcggctgcttggccgcataatgcccagcgagcgggcaggagaaggcgaggaacttgcgctccgaggcgcgccgggcgccctgtgctggccgggatagctgagcggcttcttgaatggggggctgggggggcggaggcgggggggccgcgggtccacagcctctcaaatgcccccggtgcacgcctctaagaggaggagaggggaggagaaagcgagacgaacggggaccgcctccttccagaccatgtcccctcctcggccggcccgtgcgggactcgcagccggaggccctgccggctgcaagaggcggaggccagaggcgtcaccagcgccggggcagctgttcctggtccccgccacctcgctgaagtggggttttctgagattccctgccccggggagggaaagcagggaaagttctctccctttcctggcgcgcgtgcagccacttcccctctcgtctttttcctctcctctcctctctctcctcccttccgagtctctttttcctcctcccccttgtctctctgctgctgtgcctctcggactctgtcccttctccccattttcccctgtgatgtctgtcttctccccgccccaccgtgtccctgtctgtttctcacatttctccttttcctttcctttctcttccgtccccatctcttgccaccagtccccatcttttggtttcttacaagtgaaagtggcccagcgccggagcgccttcccttcctacactttttcattcgggaagagatttggcacctgagctccgctctcgatttaatcaccccaagtcaagagttttagaaatggggttcttaatcctgcaggtcggagtgtgtttctaatacgtggtctcttgaaaatttcgcaaaatatttaagctgtgctttccaccaacctctgtcaccattcatggagggtccatagcattctgtaggtcccctgccccaaaaaaggttaagaacaaattttggcagcaagaaggggcggggactctggcgcccctcactaccagggggtttagagatgggaggggaaggggggatggagtgtaaagttgtagatccctgtgggaggcaccagtccctggagggatttctcaatcacttccgcttgctttcagcctgagagatgcttggaaagactgggaaagactgaaagcaggcgcttcaagctacaccttcgtgtgtgtgtgtgtgtgtgtgtgtgtgtgtgtgtgtgtgaattgttcaatcttgggtggttcagtggcgccttttctttaaccagccctcaggaagatagaatttcaagataatttcaagaggaaagacatgacaatatcgttaaaaatatataaatatatgactaataaatatatatttgcccaagtatcctagaacgggggttgaggttctgttgcgtggtaggttagcactcaggactagaaataccaaagattgccaacaccaggaaccaaatcgcaatatgctagcaatgtcaactattcttgagatactaatacatatatttcttctggtgaagggtaaaaatgacttggcaagacgaatttgctaaataattgttaacccaaattgataatgttaccatcgtcttattactggaatttcataatggatatgtaaaatgtaaggatggaaaaataacatctgtattgtgcacaattagagatttttagagaatggcatttaaaccttgaacctccaaattaattcactaaaatacgtttcttctaatacacaatctttctttttattataacaacat

SEQ ID NO: 315263 - DNA, 4001 bp, Homo sapiens
tctaaactgtaaaatggggatgataatagtttccacttcgctgacactccaacaagctaacacatggcaaatgctcctcggaaaccatacagatgttccttcagccggtgatttcctgtgtccaggactaaacaccaggggatgaggagctcccactcaggggagagaaagcagcatttctgaggaccacttctaagctagggcttgaccttatggcttaccttttttttttgagacaaagtctggctgtgtcgcccaggctggagtgcagtggcatgatcttggttcactgtaacctctgcctgctgggttcaagcaattctcctgcctcagcctcccaagtagctgggattacaggcatgcaccaccatgcccggctaatttttgtatttttagtagagatggggtttcaccacattgcccatgctggtctcaaactcttgacctcaagtgatctgcccacctcagcctcccaaagtgcttgggattacaggcacaagccaccctgcccggccctgatggctcatctttaaagcaaccctctggaggatcgacagatgaggaaactggggccctgaggggctaagtaacctgcccaaggttgcacaggtagtcatagccagaagcaggatttgaacatatggctcactccaaagcttccaccactgcggccccttgggtccctagagagaagatccttggggtgagctacagcagggcccacagccaccccacatcaccagggagaggatccatggattctcccacagcccccactggccctcgggtctgataggaactgtttattctagactcatattttctgtaaacacggcttaggttgccaagggagggagagaaatgcatttgttagagaggaatgggatggaatcataaaacttcctttggctcagctggggaccaggggacagggtggaaccctctgccatgcccggacagagggttatccagcctctcccccagctccacggtacactagtaccacctccacgccagagccagagtgggcccgccaggtgtcagtgtgcctgtggcctcggccgatcagatcacttctcaccagagccctggggagggcttcatggcacaaaagaaaatgacccagattctttctgagcttgtcctcccaggggtgatggcggcccctgggagaactaacgagcctctcttcagcgtctgcgggaccgtttagaaaatgattacttttcctgcaaccagaaagcggaggtggcatgtcccacagcgcctctgtggccttggggaggagctccaaccagagagaaggcagtttaattacaaagcccaggcctctgggtctaatctggtgcgccttcttactacattgtttttctttttaagttctccttcatttaacccaaacaccatgcccttggaggtcgttcacagtgaggaaactgagcatctttagtggacccaggatcacagagaggcaaagatcaaattcaggtacagattgttttcagaaatacatgctaggtgtataggggtaaatggacatgatggctggaatttgctttaatatacttcagcaagaagaaaaaaagaaaaaagagtaagtgaaatcaatgcggcaaaatcatgacaactgctggttgaatggtaggtatacggtagttcattattttttctactttgaatgttccataccaaaaaatccaagataaagttcccacctagggtcaggggttacagtacaggccccaggtgaggtgtccaagaaggtggaagggcaaaggagaaggagaatcagcagaaagggacaggtagtgtgggaggcctgaggtggccatgacactcaccctccgtggggcccattctcctccaggacctgtctgaatggacaggtcacctctgctgcaacagccctctttctgagacttcattcctcaggacttacttccagacgcttccccaaaaaggggctaaaggcaataacctccttccctaggacatttatagccagaacattttgtccccttgtcttggggaagacaccaggctgcttaacagtggaacagcctggacaacctcccaaagggcctccctgtctctgatttgactagaaaggagggaggaggctctaaggcactgaaggacgcagaacaagtctctcatagaaactggtagagacctcaagattttgagcaaactcctacccgatagggctttcatgctggggacaaggcagcctgatagaggaaaataccaacccgtggctcttactattcacaaactcgctctgccacgaactgaattatggcccccaaaattcctctgttgaagccctgtccagggcttgtgaggggaggagggctcactggccagcaagcagttatctccctcactgccccattacggaccccaggaagaggaatgaggagagagggtgggagtgtatttgtgtgtgtgtatgcatgagtgtgagtgtatttggcgatgaagacttgagggaggtaattaggcttaaatgacgtcataagattgggaccctcatctcacaggaaaaagagtaggctccagagatatctctcgctttgtgagaacacagagaaaagacccagcgaaaggcagccatctgcaacccaaagggagaatcctcatccgaccccaatcctctggcaccttgatcctgacttccagcctccagaactgtgagaaaatacatttctgttgtttatgcccccaatctctggtaaatgttacagcagcctgagcagacgaatagctccttcccccgagagagctgagagccaaaggtgcattgcagttccatctgtccccacagcagatctgtctagctcaagagcccctgatttcttggcatccccaaggtaccaggttcccccctaccccaccaccaccatgtgatccagggcaggaggcatgaaaaggccacaggtggctctgcatcttcaggaagtcagtgagaggctcccaccttctctcctcattcctcttcctgggctccctaatggggcagtgagggagataacggcccgctggccagtgagccctcttcccctcacaagccctggacagacaggtccccagagagaacattaccttaagcccttgcccccagaactctgtaactgaacagatatttgcacaggccagtcattgtccttctctcattcagggacaagtccttactaaatgtccactttgctgaatgctagagatggatgtgtcactcctggcattgaagtggccagaaatctacaaatagaggaagtaacatggaaaagacatgagccatgggacagtatctcaagtcagaagatggcaggtctaaatccgatccattcagatgggtctaaatcagccatggaatagccatgtgaccctgggtggtcacctcacctctctgggcctccattttttcctctgaaaatgaaagggctggagatgatggttatacttctttccagccctgacattctagaattttatgaaatagaactccgaaaatgatataaatgaaggctcgtaaggtaagatggcctgggatgcctgcaatgtgctggaggaaaatgcagagtgggtggccttccaacagagcgagactctggaccagccatgactaccaacaattctgcagtcaaggaaactgccattcacagtaatcagagtgggctcatttccctggtgaacccagccactgtgccccatcagcaggtctaagttacagagcactcagatcccaggaggtgagacccacactgatcactggttcctggaaaggccagtggcacatgttcactaacagatcccaccttaccacctggtccatgttcccaccatccctggcatgagggctaattttacatgtgaacttgactaggctaagggatgcccacatagctgtaaaacattatatctgggtgtatctgcaagggtacatccagaagagattagcattggaatcagccaactgagtaaagaaaatcgctgcctta

SEQ ID NO: 315264 - DNA, 4001 bp, Homo sapiens
accctgaggtcaggatagccaacatgcccctctcacagaagcctttaagagagtcaccagctaaccaggcaaaagttgtatttcttcctgaacctgcagttctagactcacccaacaaatcccagcagggataaaatgtccctaccacaagcaatgaccaggggcacccacttgaaggggtcatgatgttcaacaacagctttctgctcaggccggaaggggaattgccaccacacacatctcggaggctccttcccactttagcgaagggcaggtttttggcttggggcgctctgctaactgaaacaaacttgtcagtccttctgcaagttcagggatatctccagctaccaaatccccagccttagacaggtggcaggctcatgctacctcctccttaccactgagcaaggggtgcagggtgtcccctcaccaaccctctatccagggctggattaacaaagcagcagtggcactcacgagggggtggctgctagagggtccagccactttcgttaggggccttttgtatataggaacagaagctcaggaagagatgggaaacactccttataattttctcctccaaccttcctcactgcattcccacagtgatggctacagttcagtacacgttatctaaggggcaaggaacactgcaaacgacacaagggcactctttttgtaaatgaagccgctggggctcagagtggggtaagaagctcccaaatagcctacatggccgagccctgtctctctggctcttttcaccattcgaaagggtgagggtgggatccctttctttggagtccagctgaggcctgcccgccccgcaatccagtcccggtggccaggtcggcccctacctgcttcagcaggaactggtcctgggcgttggtgcgcagggcgatggccaggtggagggcggacaggagcaccccgctgagcactgcggcccgcatgcgcacgggcagcagcgtgtagatggtgtagatgaagaacacggtccaccagatgccctcagaggcgctgcgtggctgcggcagcagcaggcccaccacctggacggccagcaccacggcgatgagcgcatagcaggccaggcccatgtggtcctggtggaaggcggcgcggttgcaaagcacagccatgatgaggatcacgccgacggcggccgccagcacggccaggtagggcagctggagcgggggccgcgccgcgtggaaggccaacatgaccaggcacacgagcaccagcacggccatgagcatggtgaggctgctctggttcaggcggaagaagtagcgctggtacagccgctccagtttgtccgacgggaacttcttggagcggaatatctgcagcaacgccaggcagcaggcgcccagggacagcaccgcgccgggccccgcgcccgagcccgagtccgccgagctgccgccatccccggacccctcgccgccctcgacggcgccggcctccagctcgtcggccgcgcgccccttgccccgccgctcctccagacccacctccaccgagcgagggcgcacctccgtcccgcccgccgaggcagccgccgccgccgagccgccgccgccgcccgcagggggcgcccgggtgctgcccccgctggccgcgccccgccgctgccggcggctgccgcgaccgcagtcgtcgccgccgcgctcctgccaggcggacttggagcggaagctgaagccgaagcccccggccagggggtcgtcaccgctcagcggaggatcgtcgtcgtcgtcgctgcgccagcggctggccaggcgctgctgctgctgcggggtcaccgcccccccgggtttcttggtggagccgcgggcagagcccccgggggcatgggggtagccattcgcgcgggaatcggcctcgccccacgcagagcggtgttcggggcctccccggggcgccggcgccgcagtcttctgcgccgcgtagcccggggggctcacgcttttggagccggacatccccccctcggcctcgtcgtctccttcctcctcccccggaagccgggccgggggtctccaaggggagggcggacggccgagcagggggaccaggctagggtcacacgtcgggggcggcccggggccctgcgctgcagcggggcatcttggcacccccgtcctgagcggaggaggagggcacagccccgaggtgagaagtagctgaggatccgcgtcagaagtcccaggtccgaaatggagttgcctccgaggtggggtcgcagggactggtctggctgctgctgcgccgcacgcggagagacgtccgggatcctggctcgcgtcgagctcgacgagggccggagttgcggacgagacgggacggagtggtgtccttgcgggcggtgcctcctcgggccggcagtgcccgggcgcggcgctcgctgattccgcctaagcggagcccagctgctctcggggctcggcggcggcgagggcggctcggcgggggtcccggcgaagagacactgcgggtgcgctttcctcgcagcggactgggagcgactgggaggtgcgggcgccagccagcattattttcttacgaggggtggggaggtgggatgggaggtggagaggacgggggagggggcgacgggcggagcaacagctccggagccccgggggggagggtcctggagcccgggggggccgttgcccgcatcccccacctctcgcggcgagagtggatgcgtggccccggcgaaagccgagccgagccttcggcgcgtccgcgcagggggcggggtccgggtcagggaccggctcctgcggtgcggcccttcccctctcgcctctccctttcccgcaaacggagcggggccggccgggacctgccggcccggagagctgtcgcgcccgcttcgcaagccccaagctcctcgtcgccggctgcgggcccaccgcggccggcgcggaacgactaggcggaggacggaatccggcgcagcgctgccgcggttctgccccgacgcaggcaggcttctcccggggagtaaggcatccagagatccagcgccggggctcagaagcagccggcccagaggggcccgcctgagagccgcggcgcccgagaggcgctccgggggggcccgcgggagcccggctcagggcgcgccatgcacgcttcgggccctgcgccgctccggccgctcgcgccgctcctcccttctcgcccgctcgccgccgccggagagccctccgcatcccctcctcccgctgcctccccgccccccgcgccgcccgggcctcggctcacagccgcgcgaggccgcctccgcccccggcctggccatggccccagcctcggcgccccgcgggcatcctcaggcctggccgcgggcaccccagttccccttcctcacctaaaattctcgctgcgcccctccctccctgggactaggagccgcatccagcctgcggtcccgtcaccagacctgggtggagcgcggtcttcccccgcccccggccagggctccagcgcccccagtcctagctcccctcttttgtatccccctttaatccccctccccccatttaacccaacttcagccccggcgctgcgccccccttccctggcccggctcgattggccgcttccggagctgtcagactacagtccggcgctcttattgggcgattctctggcccggcggctgtgccaaaggagggcgcaccgggtggggggcgcctgggcagcgagtgcctcaaggagaaggagaacagagtccctggaggggtctcaggggccggagagccagacccggaaatggacaggggagatgcagaaacaggacttctgagacgcaggaagacagtgatggaaaagatggtgatgcagtgggtgaggccgatgcagccggggcggggcggacagggaggctttggtgggtagttaccaggagaaagccccacagtgaacactggaaacacctggcttttataaagcgctctttgcctgttcgt

SEQ ID NO: 315265 - DNA, 4001 bp, Homo sapiens
ctactcaggaggctaagatgggagggtcacttgagcctgggaaatcgaggctgcagtgagctgtgattgcaccactgcactccagcctgggtgatagagtgagaccctgtccccaaaaaagacaaggagccagtcttgtgtctatttttttttttttttttttgagatggagttttgctttttttgcccaggctggagtgcaatgctgtgatctcagcttaagactcctcggccaggcgcagtggctcacacctgtaataccagcactttgggaggccgaggcaggtggaatatgaggtcaagagatcgagaccatcctggccaatatggtgaaccccatctctactaaaaatataaaaattagctgggcgtggtggcgcatgcctgtagtctcagctacttgggagactgaggcaggagaatcgcttgaacctgggaggcggaggttgcagtgagctgagattgtgccaaaaaaagactcctcaagacttaaggaagagtggcagcagggactgctgaggaagctgccgggctccctgtgtaccactggccttcatgaacaaagctgacaccatcatgctccttcggacatattctgctagcataaagggacccccatctccccaaccgaattaggcagagctggccttccttctagcggagttcctaggagtgagttggtgccaccccttgtgaggcttgatccaaaaaccagaacctctccagaccagggatccatgtcctctaacacaagaggggcagacctaacctctaaaatccctcccactctaaccttcagcatccacagctcaaaacaaccaggatgcctcagaaacagcactcactggggcgagcaggattaggcttcagaaaaaccaggtagatccagtttcttctgtcagaaaatgtttttttttaattacaatttttcataagttgccactatatgccaggcttttctcattttatctcattagagcctctttttcttttctttcttttttttttttttttgacacaaagtctcgctctgtcacccaggctggaatgcagtggcaacaatctcggctcactgcaacctctgcctcccaggttcagacaattctcctgcctcagcctcccgagaagctgggattacaggcacctgccatcacgcccaactaatttttgtatttttggtagaggcggggtttcaccatgttggtcaggctagtctggaactcctgacctcaggtgatccacccgcctcggtctcccaaattgctgggattacaggtgtgagccaccatggctggcctcattagaacctcttgattaccttgtaagatatccctatacctacatatatccccaaatccatagacaacaaccatgtcacactcattgtatcttgtgaacccaatccactgtctagcccatagaatttgctcagtaaatatttgctgagtagaataaagtggcagagctggattcctaattccagtctgaagtcagtgctcagcttgacttttctgaagctgccttcatatatgcttcttcctttgccctacctggtcaagctaagaggcaatgtattcccttatcccccttaatcgaattggacttcatctgtggacagacccttccaccttactgaccctaactttttctcaataggtatcctgctacagagcgaactgggcaaaattcagaatggttccatgcatcttagaaggaatgtctgaaataaccctttctctcttggggctgtgggagaacggaggaagaagcccagtgcatatctgcctccaccagtgctgctctgaccagagtatccacctgtatccactcccacactactacggacgggagagcctgggtgatcccagccagaggctatgcatgcatcccccacccagcctggaacttcacagaattgctcttaccctctggtatggaatcagaaccacagactgcagtcagaatggaagtgaggaggagatggcccagcctcaacagcctggtactcacgggggcaggcagtccccacctcacaattgtcatttcccattggccaactcagtgagggccagaggccggtgggcaggcacatgtccctggcagttgcccacagcctgcaccctagggaacctggtacaacccagcttgggcttcggaagccaagtggagcttcagtcaaagcacttgtgtttccaggccttgacccttattttgcctcctacaacagcaacagaagatggggcaaaagtcaaaaccacagcaggaaaacaagatttttttcctgcatctgacggagaaacttcctaatgtaaatgaattaattgctcagtggtccaggaggtctccccctcccatagatttgccctaataagtcagggacgccaattatcacaccacagtcttgctcactgtgcatgattaagtctgagactgtgtacgttcagacagtgagtgcttcagaagggagcactgtcagaggggtctgcaatcaggtaagaaatagagcacatcctccactctctgacctggaccctggatttaggaaagaccttgcacatgaattctgagaactggggtgtggggaagttcctggagtggtgtggggcttggcaagttaaaaaggccctgaattcttaaagcttgtggcctcgaatcgtaatttgaatctaatataatagaaaacttacataaaatgtgatattggaataccatctttcaagattttttggttccaaaatttcggataacattttgacagctaccttggtatgtgtgtgtgtgtgtttgtgagagagagagagcctgtttttccagttccttaagcatatatatgcctattctgtctcttgtggaacccagctctggcctagaagcagcctggagaactggaagctgccacccacttaggtgttcctagaaagtttaggcttgaagtggcaacattcaacaccttggactttcttggcacgctcatgttttgtttttgaagggcaggatctgagccggttcttgcaagccacacattctgatgaattaaattacgaccccagcaagggcttaggatgccagcaccaacttcaacaagacatccaaaacagaattttctcagacagaggcagggcaagtgtctgcctgccccccagatatcatctccacagtccacacagagcctaaaaatctaccagtaaagtcaagtccaccattaaagtaaagatctgatgtaaagcctcagcttcctgctaatgtccaaatatttcaagagaagtcacattaggccgttgagatgagagacatgagagactttccaaggtcccccggcttaaataagtggcccatgaaaatgaggttccatatagtttagcaggctgattgaaccaagaagacaacaaaaagaaatagaagcaactctcaattatatcactgtttgatttttgttatggtgttttcctatttatttttggtttatgttactgtctgttgctatttaatagaacataaacttcaggtcaggtgcagtggctcaggcctgtaatcccagtactttggaaggccaagacaggcatatcacctgagatcaggagtttgagaccagtctggccaacatggtgaaaccccatctctactaaaaatgcagaaatagccgggcgtggtggcacatacctgtagtcccagctacttgggaggctgagacaagagaatcacttgaacccaggaggtggaggttgcagtgagccaagagcaccattgcgctctagcctgggtgacaagagtgaaactctgtctcaaaaaaaaaaaaaaaagtaaacttcaggagagcagagattttgcctattcaaagttgtatcccttagttcctagaatagaacctggcacaaagtaggcaataataaatgttgaattaatgaataaatgaatgatcatattcaactttcctttggagataactattattgtctttcattttacaaataatgaatctagagttcaatgagggtaaataa

SEQ ID NO: 315266 - DNA, 4001 bp, Homo sapiens
gattttaaaaagtaacaacctcctggatttgttgttaggaataaataaattaaatttcataaagttggctggacgcggtggctcacgcctgtaatctcagcactttgggaggccgaggtgggtggctcatctgaggtcaggagatcgagaccagcctggccaacagggtgaaaccccatctctactaaaaatacaaaaattagccgggtatggtggtgcatgcctgtagtcccagctactcaggaggctgaggcaggagaatcgcttgaacccaggaggcagaggttgcagtgagccgagattgtgccactgcactccagcctgggcgacagaccaagactctgtctcaaaaaaaaaaaaaaaaaaaaagttcttagagtgcttggcacatagtaagcttgatttttgacatatttgtattattcatatacaaccagggaaaatgggtgttctgttttagaactagaacattttctccccacaacctttccttcgacagtaatgtttaaatattgtttctcttagaaatgatcagcttctagagaattcgaatctctattaataatatacccaccatgaatgaaatccctggtaaagcgctggcttccctgttggtgcatttcctaagaacccccctctttcagccaattcctcagggttcccttctccctgtggctttcaggtcaaagccctccatcccatccaggccaatacttttataagggtctggcagactagctcattctcccctcaggtgaaacttttccctcccctccacttatctaaaccctatttacccaaggtctagttcaagtcaggaggcttccagaagtgcttctgcagctgcactgctgttggccatggaatgcaggctggagagcccctggagaaggagtaaacgacgaagatggatgcgttccactacccagttactggtaatgctgagtttctgagctcacaaaggatatttgtaaatgttatttacatagtttattatttacagtgaagcctaggcactgagattctgggctactagacctgacagacacccgggacagcggtttgcccatctgtaaactggagggggaagtggggaggtataggctctcggaagttccgtcctgcgctgcgattttcagacactaggccaagacactctgcttcttggcctcggaggactaactttaaccccccataccctccctctcaatgtcctcattgtcctttccgtaattccttctggctccaccctaatgtgtgcttctgtgaattgcaagctgggatgggggaagaagaccggcatcttttttcggttgtaaattccctttaacgttcgctttcagaacgctgtaattacttaactcctctgaactttcacgggtcacattctcgtacccgaactatacattcagaactaagatctgatcagctgcttccgggccatgcccggctttggaaagaaacggggcggttgacacgctcccacgatttgcaagactgggaatcctcatggtcggccacactcggagagcgccaggggcgggggaggggagcgcggggccgagggccgggatcgcgatacctgctgtagcctggactggaacgcgcgagcgacgggcgtggcgcgggctcccggggccggggaagaggccttggctgctgcgggtggacgagggcgcgggttggggcggagccgggtcaccgggttccgggactgtccccagataagcagggtggcggcgagggcccccgcacctgcgcttggccgcgctgagtgagctaatcttggagcctccaaggcggcttcctggcaccgccgcgcccttctgcacccaagcgagagtggacgggacctccgtcgcccgccccaaatgctctgaagagcccggagcctggtgcccggaatgtggcggcaccggaaagccggctctcgcctggctgtggtcagtgactcccgtgtggccccggctgacgccttcgcccgtgctcacgtccgactttgtaggactgtagtggaccgggtgtgcccagatgcttgaagagcgtactgagtgtgccgcccttgccagggttctgggccctcacgcataaagtgggataataatatctgcctcttagaatggttgttaaggattcagttagttaattttaactagtcatttatttggcagcagcgtagaattcttgtatcctgatcgtaaataaaagcaaagaaaaacgaagagtatttttgtctaaatacattaatcatgtcacttttaaagcaaatcagaatcaccatatgcaaatattctatatatttctccaaagttttaaatttgctatgcctattttcttgctgtaatgactagccttggtctgagagctttttaaaaaattgatatataatttatatataatgaaatgtccttacaccataatcgagatatgaaatatttccatcactttaaaacattctcttgtggccttcccagtgaataaccatctccatctccaactctagcctaagtgacttttgagtgtttacaaaaatcaagttcaccaataagggaggcagagatcacctccaaccccctacaccctctagctcttagtgagctaatcagctgcatctagaagccaaattgacactaggcagattaacaagagaaaagtatacaaattttattaattttacatgtacatggggatgttaagagactgaatcctgaagaaagtgtccaaagcaagatgcttttatactttttagaaaaagagtgataaatttaagaagaagtgacaggacaaagaaaatccggctagggtggtaaaaaatttctaggggagcccctaggagatatatggggggtggggtgtaaaacaggtggaagataatggttactttgcaagaatgtttactccagtccaaatgccacctccagttccaaatctctggtgatgagagctattttctcgctctggcgtggagaacatacctctcctagaggaatctttattgctggctgcatgcaggaagagacagctcagctcctgtcagggaaccaggctcatttgtctttcacacagtatgccaatcactgaggcgcacaagttttgcagtagagaaagggtgtattcacaaggcagccaagacaggagactggagaacaggcctcaaatgtgcctttccaaagatggaattttaggagtgcttatgggataggggaggaaggtggtccaaggttcagagaaagatgaggtaaggaaaagtgaggcaatcggtaatctgagcaagcatagtcaatcttcatggctgttcatagaacacatgttcacaaaatcgtgacgttagcatgatctgagagtggagttttgggccttctgatgtcaaaaggtcacccattggacactcacgcaggccaagatgaagggctggtggcttgaactggacaagaactgactctaagttcctgaaaaataacttaagcaatattttccatggtgtcctatcagagaagttatctataaggaggcaagtggaatttagttatgtatcgtctagctacatgacttttagctatgcaggttttaaaatcgactagaagcaagtgaccaaaagcaagcaaggcaaattaagtgtcaggcctaatcaggtcagccctcagttttaccctttctgaaactataatttctctaatgttttcaactcaaagtaatcaatatattatatggcatatttggggatggcacatccttcattctttcaactgtcaaagattttcagcctctgaggatgcagtcaaagcaagttctgtagtaagagacattttgaataataagcatcccgataaaactcaacacagtttcagcttaagatgtctgctgaggatattgttcatattatgtagtgatctttctgtgagaatccatgggaaagggtgattttttgttttcgtttttgacttaaatgtaaagaataactggggctgggcacagtggttcatacctgtaatcccagtact

SEQ ID NO: 315267 - DNA, 4001 bp, Homo sapiens
gcagaaccagaaatcaaggcctcaggatgggaacaaagaacaatgaagtcagggggaaaaaaggtggcggggagagagagtgggtaacagacttgaaactaagaatcacaaaacttaagcaaatgttgagacctagcaattatgatgggcagtttctataacctagccttaagcttagacttttattttaaagcaataaccaaaacaaaagaaattaaggaattatatcactggagggaaccttatgggcagagacttgaggttcagagttgtgaaataatgctcttactatcacacagcaagttaagtgggagtctccatttcccttctccccatgctttcctgcccctgcactgtcaggaagggtggtggagaggaaggagaaggtaccagggcacccgggaatacatcacagcctgaggacaggttatgcaggtggggcctttatagctagggaaacaccggagaagacaagggaagtatggcagtttcttccttagagaagacttataagggggttaaagcatatgctatgtgaaataaacacctggagatccaaaaccctcaggtggtaactaataataagagaatcatgttgggatgcagcatcttcagcgggaagcacaagttgctcaacaaagtaataaaatagatcaatagggtgccaaatttcttgcctctattactttctcttctcagaatgacacaggaaataaatgtagccaagtcccaaatctgatcccagtacccaaactttcattaaaagagggctcctgaagggggggagtaggtttttaatacttaacgaggctatcagcaaacaaagagaagaggcccaggtgggctcaatagccaggtcacaaatggttgcccaaagaaaaaaacggtgcagaaggagacgctttggggaagaattgctgaggtcttcgggagactatagcaggctggcactatggagatgtttacctggacatttaagaaaattggaggatggagttgggtgtcgggcagtggcctgccagaggctctgtttagtcctggaagcaggagaccttttgctaaaattctgtctcagttacacacatgcattggctaaggctgtagggattggggtgtggagacatcttgcttctccttcctcagtttgattattcaaaggacatctgggaaccctgagggtgggagagtttggccaaggttggagcgatgtcccgtgtctaggacccaccgctatggtttgcagggagagagctaaagggacgtgagcagtgcagggacattgactgggaagcagagggcgtggatggagacactcttaacttcacctcaaaagtagcacaacttttaaacgaacgccttgcagagtcataccggcttcccgctcagatgatggctaaaatacaagagttaactaaaagcctcaggaagaaagtttattgaattgcatcttatttctgtagatttcttccttgcactcggaagagtttggttaaaatggattgagaatttcgaggcacgtggcaaacaaacctaccttgttccctcccattccagaagcccctcacctgatttgggaaagtgtggccagctccaggggcaggcgctgaccagaactacggtcgctctttccttggtccccgagagcttcccagtatagagccagcagttaggacaccgtgacatgaaacttagcaccccgcccttgaagtcccccaagcatgcctggcggtccgcgcggactcacccgcgccccgggcgctgcgtcacgtcccgccgagggccggctgcgctggtgcgggtctcccgcccgccgcctcggcgtcccggctgtgcgccctcactcgctgggtccgctccagccgctccccatcgatcaccgccgcggcccggcagagctgctagcggcgcgccggtccagacgtcctgtcactcgctgctgcctggggtcctggctgtcaggcgctggaatcattggcgaggaggcagctccgaatttatagtgaggggcgttgctgcttcttgggttccggggacgaggctctgttttgcattccctcctcctccgccccgccccgggagaccctcccggcccaacctcctccctctcgggatattgacggcagcaaggatgatgccacagtcgtcccgtgtcaactatcagatcagcgttcacctggtcccgaaccccgcctagcgaggggtcgtgagggagagcgagctgggggtacaggagtatcatttcctgcggagattcgtgttcttcaacattttttttttctgaacttggaaaacttttaaggacgaattagagaacttctttctctttcctatgagtaactcgaactttggtaatacagttgtggatcatagattacatggattaattccagggttatgaaattcaagggtggacactcatttgttcctattggacatgctacccaagttgcattttaaaaatgtattttaaaaacccaataaatatttaaagaagaaataatatcaattcttcacaaactcttccaaaaaatagaagagtaaggatgatctcccaactcatgctatgaggccagtatcaccctgataacaaaaccagataaagacatcacgagactacagatcaatatttcttaagagtatagataaaaattctcaacaaaatgtaggcaaattgaatccaataacatatgaaagggactatacaccatggtcaagtgaggttgatgccagaaagcaagattagattagtttaccaaaaatcaattaatgttagataggtgagtagggtgactgtagtttacagtaatctattgtatatttcagagtagctaggagaaaataacttgaatgtttctagcatgaagaaaagacaaatatttaaggtgatggatatgccaattgcactgatttgatctttatatgaatgcattaaattattgcatgtacctaaaaagtcctgtcactcgctgctgcctggggtcctggctgtcaggcgctggaatcatcggcgaggaggcagctccgaatttatagtgaggggcattaaattattgcatgtacctaaaaagtgtacatctattgtgtatcaataaaaataaatttaaagaagtaaaaaatggacaaagcctacatgattgtctaaaaaaatttttaaaaactattggacaaaattcaacactttttcatgctaacactcaacaaactaggaataggaacttcctcaaactgtgaagtttatttatgaaaaacttaactaatatcacacataataacggaagacaacgtttttatgtctaagatcaggaacaagacaaaatgtctagtcttcccatttctatttaactttgtactaaaggttctagtgagggcaattggacaagaaaaaaagataaatggcatccagattagaaagaaagtaaaacaatttctatttgtagatgacatgatcttgtattaaaaagccctaaggaatcaattaattaactattagaactaagaaacaagttgagcaagtttttagaatacaagatcaatatacaaaaatcagttgtatttctatacactagcaataaacaatcaacaaatggaattaagaaaacaattccactgttggcttctcaccacttgctgtgtgggtctgtgtcctctccctgcctcacatgctgccatgcctcaaaaagttaaggagatcaaggactttctgcttacagccaggtgaaaagatgccagatctgtcaaggtcaagagaaataaggataatgtgaagtttaaagtttgatgcagcagataccttcatacattagtcatcatagacaaagagaaggcagagaaactgaagcagttctggcaccctggtttgttagagaaggagatgaaatcagacacactgatttgaactgtgttaaaaatttaaaaattcaaagataaaaacaattttacttactatagatcaaaagagtaaaaatactaagaaatgacctggtgtagtggctcactcctgt

SEQ ID NO: 315268 - DNA, 4001 bp, Homo sapiens
gccatgaagttagagagtcaagattacatggtcctgtgaagaggggggcgcaatgtgatactgttaaaataacatagaaaatcaaccctattctcagattctttgtaagaaaatacaactttttaaagtttagcaattagttaatgtggtctaattgcccagataaaaacacagaggtgagggcagagtattataagagaacttcaagagaaggtttcaacattctgaagttaaagggcctctgttctaagaaaactaaagctataagggtcatatttatttgattttatcacatagtttccttttcttccatcacagttttgtatgcattatagttctttactttttatttattgattgattaacataaaaatgctgtaaaaattgaggaagagcagaacagcctggaagagaaagcactggactgctgtcctggcaaagagtctgctctgccagtaaccggcaacacaatcttacatggcaatttaatctttcactttggtttcctttaaatattacaagatatttagaatgagaataccaacacctgttctcacctctatttcatggactgctaaaaataaaaagttctttggaagacataaaagcatttttaaaaatataattgttctataatacaagggtaagtaaaatgaattaaataaagctcagactttcaaaatattactaaatttttttattcggaagttcagcagaaatatttttcattattataataatgtttttagtttgaagaattataacaaggcacttgattaaccctgaaagaaaagtaaaatagtagatattggattgcttctacatttactacttgtggcagcaaatgtttgggtacaaactgacccctcagggcaaatctgaacaacgtatatattttctttggtcctcagagtatttacagcttttgggacttgaattttctgtagttcactaatacacccctctattttctggttctttagttcagtgctgtccaaaagaaatagaaagtgagacacatatataattgtaatttttctattaaaaacatttgacatgtaaaaaggaacaggtaaaattaattttgataaaatatttaatccaatatatccaaactattgtcatttcaacatgtaatccatataaaattattaagatattttacattttttgtaccatgtcttcaaaacccagggtataatgtatgcttccaggacacctcagttacactagcgacatttcaagtgctcatcacactggggctggctgctgtactggaagcacagtgtaggtgcttttactcacagacgtcccctagttggcccctctagcaatggttctgaaagtgtggtccctgaaacaacagcatcagcatcacccagaaatttgttagagatgtaaatctctggccccaccacagacctactgaatcagaaactctgtgggtggggttcggcaagctgtttttaatgagccctccaggtaattctgatacacactaatatttgaaaagcactgccctgtaggcaacttaatttgcaactctggcttaaatgctgataatcctgatgaacaggcaaaaccaatccaacaaacaacaaaagtaccctcagctaaaatgttttcatttaacatttatgaagcatcaaaaactgaatatgagaaacttactcattaaactgcagatttctattacacattcaggactggcgtaaagtgtgcccagcaggatgtcatctagtaaaatcccctttgcagctgctcacagatatctgaaattcctataattcaggtagggtggaatacccaccttcataccttctcaggaagaactaagatctacctgagaagaaacacaatggctcaggtgacaaccagagttaagacagtgggaagagcatagtgatgggagccaaaagttctgaattaagcacatgatttacctcctctgagctgtggagcctttggactgtcagttgacttgtgattcattttcttcatctggaaaatgatgataataataataatgttcacgatgaggatgatgaagtagcaagcatgtgtccagtttggtgcaaaacattgttggaaacaccgaatgagatcatggatctggaggtgctatgagaccctagagctttggaacttttgttggtgttattaagttcacactgtggtgtaaatggctaatttaatttatttttttccctgcgagcaaatttgggtaagagaaattgggaaactacacgtggtgctagaagtggaagaaactaaagtaccagcaaggggtggaaagactcagagaggggaggctgaaaggcactgctgagaggctgcttggaccagactgtttcgccagctctgagaattccttttgagtattacataatttttaaacataaattacagtgatattacatcactgtaataaaaatatttagaccattctatctactattatctaccactccatttcttttctatgttaggctacttgcgttttctaattaaatatcctgtgataagagacaccgatgccaggccaataaaaggtaaacaacactttgccaactgaaaaataagatgagctactggtgactgctgcttcctgtgaaaacttcattagcaataaatgagttaccagatgtcacacatcagatttgaaattaaaatatattcccagtagttgtgtgctgtctgagcagaagttaaaaacgaactctttccaagagaattgcaaaaaataatgcaccagtttttgccttctggttgtttgttcctcctctaaatgtaaaataaaatgcacgttctgggttgtgaagtggaaatatagcatttctgcatagaaggctatgtagggaagtggcacattactcaaatagcagtaactccttaaggacaggagaatttttttaacatcctgtgccacaccaagaccatcatctcctcttgtttttaactttgccatcgcaagttctcctctgctcaccttcacgttcagcacgtgacttctgcttttattaccagcaacaaaactgttcaagtcagaaactgtcaactttgactccacttgtcctgaactataataaccgtgttagtgcttttctttcttcaggagatattaaaactctcctctggttcttccagctagctaagctgaggctcttgttctcaaagttacaagtctccaatccaaaagcaattgtggttagggaaggaaccccgcagtaggaaatagaagaatacaatttcatttgagccagcagaaatttcaaataagccaatgtgatagaaatatctaacactctctagtttttataaacaaataattttggctgaacttcttcagcccagttgctttgcagtttcaactggttccagctgaagatcatggtcacttgaaatcatttattttttttctcctcagttaactttggttcttatctcctgccagataggtgaagcttataaatcaaattcagagggtaaaagtgaattatcattctccatccacctctcggagaaatatttacatggaacttctctatacacagaaattccctgaagcacctaacagtttatttctggatcattaactacttatcagatgctgggtatgtggaaactgctggcctttggctttcacaaggaagatggagcatttttgagatgatttctatcaatggggaaaatgtcaattcaatcttttcagcttcataactttagcacaaaatgacatacaagtgtttaagttcatttaatgtaccattattttatacttctttttgtttctgctgattaacagaaaggacttataatagtggcttaatattagcaatagtaacactgatcacttattattcattggatgcttactatgtgccaagtgttgcattaattgctttcatttctacaagagacctatgagggaaggcatcattattcccattgctcaggttaagaaacaggaatagagagcaggtccttacgtttttgacatt

SEQ ID NO: 315269 - DNA, 4001 bp, Homo sapiens
tgctgctctctacttccccctgctggcgataatggggaagggcatgtctccctctgacaggaaactggatgtcactagtgtagacacgagggagcttgcaacaatccttggagatattcttgtgagttcacctgtttctgtatcttgtcttcgaagcctgaaaaatccagaaggtacaagtatgccttttctcctctcagcccagctctgtttgcctctcattggttctgcctgattcactagtacctgaagcctcagcatcccctcccctgggagaagctccgcattttatgatgtccaggtgtgcccagagtgactgcctgaaagcgttcacagctctggcgaacaggaaccgggtacacctgggtttctcaagggaaccaactctgaagctctgcctttagtaaaagtcacaatgcccattcatgattaccttttccctcagatgtgcgtgttgcgtgttcatttcccctgacttgatcagcgtttcctcctaaccaccactgtgctttaatatggctgcagcactcttaaaatccatccggagcaatcctgatttcaaatattttgtctctttgtgagacggatggcagtcgtcagtcggtccaggcttcctgttgttgaccttattttccaacctagattgtaagctcttgtgggcacatattgtgcctttttcaccactgtattaggttgaaccattaaaacggccaatatttggttgcttttgatatagaaaaatggcagttttatatggttcaacctaatatctctggttcttgtccaaggaaggcttgtaatacatatttgctgaaagaattgtccttaatcagaaataaatctaatttcaaaacaggcagtaggcagacagcttctttccacctctccaaatctcttgactgatccccgaggcatatttccagcttgatttttcttgtcactggcttcaagctgcgttggtttcctgtctagtgtgtgaggaggtgaattgtgtttatgccaagacttctctctgggatgtgggtaactctctttgggaggcagtttgtgtagaagaaggaacacagatatggaatcaaatcccagcctgaagacttagtaattatatgattttggaccaaaaaaaaaaagacaaaaacaaaaaacaaaaaaactgcacacacacacacaacagagccttggtctcctcttgggtaagacaagaacaatatatgtaccacacagcaccaggaggcaggaccgggaaagagtaaatgagataatctatgtgaatgggcctggcatatagtaggcatctgccagatgctagttttattcattctcagtctttgttagagagaaaccaaaccaaagacagatacgtgattttcagccagtggtaacttggcaactaggagctggtctcttgggtcctagtttttccagcaagttacactttctgtctgtgatctgcacactaccatttgaagcactttttctcctgcacaccacctcacaccccacccagctccctcctgacacccatgactgccatacagaatgtctcctctcctgccctctgcctgccccttccctcactcctgggaagaaatcagagaatttactcctctgtggtttcatttgcactgggtgatggtgattttttgaggcacctgattgagctccatgtacacattatttcagctcatagacagcaggtccacttacctgaggccacacctttacttcatcaatctggttcaaggtgtgtttgtatccccaaggaaggttttgattgatgtagtctatagccaccagagctgcttcctcagtttctggatcatcgcagttcggttgtctataaatcagccctgggccatgtggggctgagtggcagccccagagctgagcaagacaaaggagcaggacgagggacttcatggctgccccagagaggccctggcaggcgtgcaggtggttggaggcttcgggaccaacccaggtgctctgctgggaaaggtagacccatggagggtggtgggctttatttatctgttggagcctgccggaagaattgcataaggatacaggatgatttctgctttggttcaaaagaaaaaaaaaaacaccctgcaaacatcagccctggaaaagcaaacaggttaggacatcgctggtccccaagaaatctgccaaagtccatgctgctgtgggggagatgctccaaagtctgcttggaacatggtaatagcagcaaagagaagacagctgagggaatgaggtggacacagtcagcctcagagtgccatgggtttggcagcagaggaaatgtcttctactgtgatctgagcatgccatggggtctgtgagagggaagggaggatactcagcaatttgataaaattctccaatgtcagggggagttagctttccaagaggagtcctacagggagaacaaggcccacagatatagcaaaggtacagatgtgtataggagatgccaagattttgggggaagattcttggagaaaagaaaaaggatgagagatgtttctgcctaaagtggggaatggaggtggaagaagggggttcccgtggcaggaccacggtgggaaatgaccagcaaaacgtgtggggttccctgccccttctcttccttctccagacctcactgccagggccctgcatgtgacagcacagatgggcactgaccagagtctcctagcactagtaacctagtgcccctgccagtgcacaagggcagcagaggggagtcctgactcatttgacacagctctgggttcgagtctgacaccgcaggctgagatgctgcacgagcagctacggacacaaataccccttgaacattctttgcagactcagcagaattacagtgtgtctttctggccagaacagagggccagtgttgactccaggcactgcctattaagtgacccttgacaattccaagtgtgacatccaaggagggttggcaggataaagagaggcttgggaaatatcacacaaggacctggtttggtttagtctgaagcaaagaagccctctcatggagaccaacatggtcttcaaatatttagaggccatcattgtgtgtgggtgaatttgttctaatgtttgatattgcttcagagaaaaaaaaactggttaaaaaaaaaagaaagaagaggggcccctccaaagggaagcttaatattgattttctggggtgagaatcggggtgagggaggtgaagtgagtggtgatggggcagagaaggtagttggcaggactgttctcacatttactcccagctgctcacacaccacaccgaatcttaatgtcagaagctcagaaggtgtggccaggactccaggttctctccaagagggggaccatgattcttccagatgaaaaacaaactctggtcatccagcaagatgatcctcaaagccaggggcaatcttccatcaccttatactccatttcactcagggccctgactcctgaactgtgtgtggaagctatgcttttctttatataatctttaaaaatattgaagggctgggcacggtggttcacacctgtaattccagcactttgggaggctgaggtgggcagatcacgaggcctagagattgagcccaacctgaccaacacagtgaaaccctgtctcttctaaaaatacaaaaattagctgggcgtggtggcgcgcgcctgtagtcccacctactcgggaggccgagacaggagaatcacttgaacccaggaggtggaggttgcagtgagccaagattgcgccactgcactccagcctggcaacggagtgggactccgactcaaaaaaaagaaaaattgaataaagtgtggtaaggtggcacacacctgtaatcccaactatgaaggcaggatgatagcataagacctggagtaggctatggttgcagtgagctatgatagtgccactgcactccagcccagccaacagaatgagactctgtctcaaaaaagaaatcattcacaat

SEQ ID NO: 315270 - DNA, 4001 bp, Homo sapiens
agcactctgggaggctgaggcaggtggatcatttgaggtcaggagtttgagaccagccggaccaacaaggtgaaaccctactaaaagtacaaaaattatctgggcgtggtggtgcatgcctgtaattccagatacttggaaggctgaggcaggagaatcacttgaacctgggaggtggaggttgcagtaagccgagactgcatcactgcactccaacctgggcgacagagcaagactcagtctcaaaaaagaaaaattaaataaataaaaagccgaaggccaaatgtttaatgagggaaattagaaggctaaatgtttaatgagggaaattagaacattccaatttaatatttatgtgaacgaggcactgaggaaacactaaaacccctatagacactaacgtgcaatccaaaaacctgtaatgtgcaacactggccactgtttcacctttaaagatggaaaagctaaaagtgcctacccttggggggacaatcatatgagataatctgtgctcagagcccagcctgcacatagcagccctctgtgagtgagtgtgaccctcaccaccactgtggggactgcttctagtctaccaatgagcacaaacacccatacctgctccttcattgtcaatgacacttactctcactggccggaggggtttctttgatctgttggtagtgtactgctgcagtggacaatgcccgaggggctggcttggccccaacttccatcatcttggggcagttttgggcatagaacaacagagatttgcctgctttctgcagaaaggcctgggggactcgggataagaatgggcagcggcgaacaacactctccatgttcaggaagtatgctggctcctgtggaaagactgatgaagagtgacatcaacagttgttaataatcaggcaaatatcactgcaagctcactggattcaggtgtcaaccgcagtttatataaagggtaccctggaatactaacacttctccctcaaaaatgcctaaggacagcactgatgtgagctaaggaatggtgaccacactttacccgggtcaccaacttcttcattctccagcgctacacaaaggcacctgcaaagcaacttcaccaaatgaatactgacagtacataatcaagggggcggaaggatgagggaaaggtcaagaacaggtttgggaggccagaggtttcttagggagatgcacagtgcagataagacatcttggcttacatctaggtggagaagaagccactcatccatccaggcagggaagactcttagggatcctgactttctcctggtccccacatcccctaaacccgaggaaggggtccagcagggtcccgagtccctgaagcaaggattcctccgtggtcgtgtccccacagcgggaagaactgggcataactgagaaaggaggggcacaaatgagggtaggggtatgagggccagcgccttgggcctcactggggacgcgcaggggcttataaagtcgagggagttgagtctggagaaagaaggcagtcctccggcagtgggggtcagaggtgacccgcggtcgaggtctcgagaatgacgggaggggtatgagaagggaattctaaagcggcgggttcaaccgggaatagccggaaggggccgaaagggggaaactgaggcggccgtctaggcaaaagatctggaggataaacgctgacctcaaggcggcgggtgactgggacagtgggggatggggtcccagcacccggggcagcggtgccacggctggcaggacaccccggggcttcctcggccggcgccgcacctaccgcgcgggccctcacctgcgctgaggactgcagaggcggcggcgaaggaggcgggcactcaagtcgagaagtccaaacgaaacgctcgttgcccttgtccgggagcagcctcaggccgcgatcgccggcgccttaatatacagcgggagtgaccgctgcgcatgcgccttgggcgctgccttcttctgcgcaggcgcgccgcgtagccctcggcgagccgggggggcggggcagagaggcccacttcttgggctctgcggatatcggtgctgccggggattccccggctcgcctgcagggaggaggaagcgctaggcggtgggcggacgaggtctcttttcccgacctcatcctgcaccctcgtgctgcctccccaccaactaccctgggcttcagaaccctacgccccaattgagtataaaatggcaaggtcgaggcgaggtgccgctagggccaagttgggggctacagggttgttaagctgggtgtcttggacatggaggaagaaggagatccaaggggttctgggccggggtgttaagcaggatccatcccgcctgcggcttgctttggaaactgtgaacaagggcttcccggaggaggtggagctggctatatcgcccacaaatggagtggtcctggcaggatgcggaagaagcgggacactcagctgtggcactttctggtctaagatgatccagaggggacagaggaacagggctagggtggaacccatccactccacagctctgagcacttggggaggaggggaaggcacagggcctgacaatagttagcgtgtaacaaatattagccactatttttattttccatccagggttgtctgaagccccttgctggccaccctgggcaccagcagggtggcttaggcctccatgccaaaggtcagcgttgggccatacctccattgagtttcccgggtacaacacataaagtgtagggcttggcaaacccgtctcaggaatgtcagtctggcttccttgccccacacccttcccagcttggcttgggctgtgttgggctgggcctgtgccaggctcagaggtactctcctccattcttgaggaaagggcctttgagggtattcctttcccagctgagcattaacaagagggacaaagtccagaatgatggtgaccagggtgtgtccaggtactttgcatttctgtctctgagcacccagctggctgcaaggcaggtgaggtgagtctccaccttcagaggaggcacctgggttcagagtggcagtgggaccagtccaggatgagggctttggtctgagagctcgagacccagttctgtgccattcagccaagagatcctgggcagtgcccatcacccagagaagatgagagagaaaaggtcagcacttggacttggacccaagtgcagctggaagtgggaacagaataaggatgatattgagtgctttgctcatctttgggccttgctttccttatctgggcaataggatcataatccctgaaatgcctgcctcacaggttgtttttgttgttgttgttattttgtttgtttgtttgagacagagtctccctctgttgcccaggccggagtgcagtggcacaatctcggctcactgcaacctctgcctcccaggttcaagcgattcttctgcctcagcctcctgagcagctgggattacaccaccacgcccagctaatttttgtatttttagtagagatggggtttcaccatgatggccaggctggtcttgaactcctgacctcaagtgatcaccctcagcttcccaaagttctgggattataggcttgagccactgcgcctggccctcatagggtttttttgggggtgatcagagccaaagccaaagcagaaagaactggatagtggagttgggcatgggtttcaaacccagctctgaatcttacttggccatagacttgggcaggccacaacctcttcaaggcttggtttcctgatttgtaaagctctcccgccctgccacttgtggctggcaggagggtcaggtgaagtcctgtatttcagaggcttattgtttaaaccagccagtccctagccctctgggagtttcctgtttaatatagagaaagattgggaaacaaggccgactcacatggaaagtgaaatagagtgttgtaagcaactccagatggaggaagaggag

SEQ ID NO: 315271 - DNA, 4001 bp, Homo sapiens
tcctcaggctctggcccccaaacccctctccccgccagttcctgggagagattcagaggctttcaaacctcttctgtgacctgagcttgccgacagctgaagggatgtgcacggataaaaggaagtgagatttttctttgataaaagctaaagaaaaagctaagaacaaacaggccaaaataccaggaagtaggagtttaactggcaactgtctacgcagggatagaaaaaaaaaacttcaaagaaaaaaaaatcccctaaattttcagtttaggggagcaaaggaacctgctgctctgtcaggcaactgtgagcgcacggaataccctgttagaacaacttgtgtcagccgccaggcgggcctgaggataccagggccaggggacgtccccgagggtgtggaaagggatttcccgagagatattttagttgttgggaattttgccttttctctctctctctctctctctctctctctctctctctctcttccaagactcagtacagaactgagaactgaggctctatgagcaggtcctggaaattcacaaacctctcactgaggtgtctcccaggcctacctactaattcctgttctggctgtgttatctgcctgcggtcaccctttcactcaccacccgcccagacaatggacggggaccgcagggggtaacgttgaaaccacgattttaagctttagcaggtttcgcaaggggggcggggggaggtgattaaagtcctctccttctctacccctcccatcccttcctcggctcaccaaggggaagttactaggggatttatcacgaaaaagtgccggcagttatttcatccgagaactaagcgaaagaaaaactgctcggggcgcagtgacgtggacttggatacccagagacaggaggaactgtcagagggcaagagtccgccgcctagctgggagccgcagggacaaggggagagcgtcaggcgaatcctgcccaccccggagcaccaagttcctggagattcacccagtttccccagcttgatgcccaaacttgagctaaccagccaagcccaaacgtgcggcacaggtgaccgagcccggggacagctctgtgccaggacagcggtccccttacctccaccacgcgcctgggcgcactgcctcgggggtgcgaggctgggacggggacctaggaaactgctccaggcccacgtctgtctggggctgctcccaggcccttgctcacctggcctgaagacggtggcggagatcaagaggcagaagagcagacggcaggaactggcccccttggattccatattcctcctccttcttggtgggccactgacggagtccacgccgcaggagggggcgtcgtcccgggccccgcggtgcccgcgcgctggcgggtcccgacgcaggggcagcgtcttctcccagacacaccgtcccctgggctgtggcgctgcaccttcggttctctgccgcacgcaactttccaccacgcaatgcccccaactcctcctccctcccggtcaacaccagcccacgggcccttcggctgctcctccggggacaacgaccctctgtttccaggagacacttgagtaattcggaaaggtgtaagcggttcttttcgctggtatcttcttttattttccttgtattggaatgataataataatggcagtggcaatgtgcatgaaacgccaggtgctaagaaggactcgcaggaggcggcgacgggggggcggcgggtctcctcaggtggcagcggtggtagcagcggcagcggcggcagcggtctccgggctgctctgagtagagggactggaaggcgtgtgtaagctgcctctttcctcctctccccgcctcctccctccctcccgtctcctccccacttccccggacgcagcgcaaagcaggtggttgaagcgcggatccgcagcctagaggcgctgcaggactgagtccgagccctgagcccagctccgggatcagggagaaccgcgtgccccggtcctggagcccggatgagcggtgcttcaccgcggctccgcccccagggccaggtccgccaataagaagcaagcacaggagccgcgcgcgccagggagagccctgggactaacactttctgtgatgttgcagcgccccagtgataaggcctctggcttccaactgcccacccaccctcgctgaggtttaaaaatcgactgccctctccctccacccatacgcccatcccactgactcattcctcagagatttttctccgccgtgctgctgcagccttctgtcctgtaaagagaatagtggggcagggcggtggcggtggggagcgaaccttgggtccaagagcgggagtgaagggaaaaggaaaggaaagggcaggaggaagtggcaaaggtggaaacttgcttcttgggagttaacaggaatagctacttgttggcaggggcaacccctgtactggactgattcctcctgtacttttcgaatctctctcctccccctgctcacccccaccactcccctcacacccggctggcatagacttggttttaaaggaagactacgtgagtcgactgcccggtaccaacagaagatatttgcttttcccgggggaaattaaatccggaatttctaaaccgtacttcgtcatacggattttcccaatgtctacaaaagccctctagagagcgtgtcacttttttactttgagttaagcggtgattttaagttatagacagaaaatcctcaaattatttcagattaaaagccaagtccgtcttggtccgttcccgaaagccaggcactccagcagatggacaggcttcttaggcaatttctaaagattgaaccacctcccaggaggaacatcgggaagctgtgttgctttcaaatcaggcagagagcatgaaggaagattttcctctagaacaccggggtggagctgtcggagccctaagtggctctaaatcagggatgcaggatcacaactctcatcaccaaagaataataaaatcttggtccctgaagcacttcgctggggcattaaatagcctttcgtgcatcacagggtcacccttttgtgagactggtctccagcagaggatgccaactagtaatcgttacatactgcactttcatcagaaaactgcgagttaccagcgagattggagactcgcaacacacagacacacacacacacacacacactcacacactgatttttaaaattgtttatcttttagtgctctaaactattaagccctatcttcagctgtgatttttctcaaaagcctgcttgtcctgttcttccagttctccttacattaacaatattctagagtagagcttttataccatatttttttcctctcaaaataagtagtttctcccacttggtttaaacattaacatttcatttgcatcttatgaatcaacaggaaggctatcgctaggaggcaaatgccttttaactctatattccttgagctaagcttggctgaaatgctagcatttccatggactcctgtagaattgctttagggaattgttttctttttcactgtggttgtaagtggggtgtattagaataaatcgacctgacaatatatttaacctaggtccgcgaacgctctatctgatctcctctattttacgatgggagttaatacagcataattgcttaaaggtagatttgcaaaaggaagactgatttgggctctgacactaactgtatgatcttggtcaactcacttaacctctttaagcttcagtctcctttcttgtaaaaagtgataatagtgctagcctcatgggattgctgtgaagatcaaatgagatcaaacacacaaacacacacgtggaattctgggagcaactgactatacaaatatgtacatattatacttatacacaaacacatgcatatatatatgggcatatgtataatatatatttgaatgtgtagtccactgcttccagaattgtttttagaaaggaatgt

SEQ ID NO: 315272 - DNA, 4001 bp, Homo sapiens
ctcagtgtcctttcacttggtggtgtggggacactgggaggcttcctgggcctcccaaccctcctacccaattcccagcccaggcttggctctccaggacccagcttctagtccctgtgaggctgggccaccctgcaggactgcagctctgggccctctgttctggtgctagggccctggggcccatgaatgcagttctagcactcgggaggctgaggcgggagaatcacttgaacccgggaggcggaggttgcagtgagccgagatcgtgccactgcactccagcctgggcgacagagcgagactctgtctcaaacaaacaaacaaacaaacagcagccaacattctccgagggtttcctagggccaggcgcggggcagtctcatgtaattctcaagcaatcttgggaggcaggcactactgttcattgcccctcccgattttagagacaagaaactaagattcagaacacaagaaacttgcccaaggtcaaggagaagtggaggcgtggggaggaaacaaagtcacctgacaccagagcccatgcctccaaactccaagtctgggactcctgattaaattccgtctctgtctgcactttgggaagattctttcctctcctaggcaagtgcccgcggggcctgagctctcgatagcggggccccaggagccacgttgtggggtctgctatccggcctccctctgcacgcgcgaccgtccacttgagcgcagtggctggagctgggactccagcgcagcccctgagcgctcacgtcgacccctccaatcacaagaggccctcgtgccaggcccccagatttggccaatcagggaagacctttccctgtcacagaatggggtcgaggggcccaggaaacaggtagtccccagtcacaaatcatcgcgtcgccttcgctggtccctttctcttatcgagcctcagttttctcttccataagccgggccagcagtgcccaccccacaggttggcgccagctccgtaagggccctaccaccgcggccggccagatcctcggcgggccagtcctggcgctgcggtcatttagcctgatgacccctggccaggttcagcctcaattgctccaaagaactccggacccgtaccccgagcccggcgtcccagcggcgaagttgatgggccccgcaggagcccttgcggtgagaaccgagtcctggagcccctggagcccccggagcccccggagctgcagccggggcagcctcctttccgccgggagtccagcgctctcgagagcccagaaactcaccgcgcgcaggagttggtgcgggcgtcccgggcaggttagacttctgtgagccgcagccccgaaactgaggttggtgcagacccgtcctgggagccaggaggtgggacctgtccccgccagtccgcgagctctggttaaggccagagcccgtgaggggaggggcgcggggcgggcggagagtcagccgagtgggggcggcgctcaccggtggtgggactatggcgggagcgcagcgcaccctctccgggcgggtctataaatgccatgtaaaagccaaccccgcaggggcctgcgctctttcccgcttaggtcaagaagacttactgtggacccttggagaattcccagggctttgaaaagtcccaagcacccagcagggctggcagttctgagcgctggcaaggctaagtgggtcagaggagaccctcgccaagccggtgactcactcactcgctcaccctctctcactcttgatgggccaagtacctgccatgtgctacggacacagcagagcgaaaggagacgctgccctccgggaatttgcagccgcttgcagaggcggccccttagcagctgcgcatccgggtggatagcggcgcttctgcccgcccagtgcctacccgcctctccgagagaaaaacagcccctggttttctctctgcaattccccttctccactctctcccttctactcagtcctggtgccgcagacccctcctcctggttcccagagatcctggccagcccggtctcaggcaaggccatgtagaatgccgggagtgataattgcgtattgtttcatgactgcaagcctgtgtccaggtggctccttctcctggaacacccttcccaccacacctgcggccgcactgctccgtgccctgctaagcctcacttcttttgaggcgaccctctcgctaagtcccgaccacctggccctctctctgctcagtgcctgaacacatcaggcttgctgcagcccctgcctttacctctctacttgtagtgttctttcagagcctgctcccatatggtatcacatatcagatatctgatgcagagccttagagaggctgttccaggtcacacaaactaaggaagtccctcagccactccctgccacatcaccctgttctatttccttcacagcacttaactgtatatctgatatttccttgtttctttgtttgttcattgtctgtctctcccactagactgtaagctctttgaggacaggaaatttgtgagatgtattcactgttgtatccccaatacacagtgatggcttgtagcagttgctaaataaatgtttgttgaatggcttaatgcatgtattttgctcacataagccagtatgggcacccaggattgaggtggcctgtgcctgctgatccacttagcctactttcaggcactgtccccttgttctttaggctccagcctgcaggtctccctgctgtccctcatatctgtggaacttctcgactcataaagtttccatgtgccgttcatctttgtccagagaacccccatcattcttcaggaagttcctactaaaatgccatgacttcagggaagctttccctagcctcagccttactaggacagattcctccattatgtgatcacagagaggcctgtaatttttcttcatgaacctctctcaactttatttatttatttttttttgaggtagagtctcactctgtcacccaggctagagtccaatggtgcaatctcagctcaatggaccctccacctcctaggttcaagcgattctcctgccttagcctcctgagtagctgggattacaggcatgcgccaccacacccagctaatttttgtatttttagtagacgtttcaccggggtttcaccatgttggccaggctggtctcaaactcctgacgtcagatgatccacctacctcagcctcccaaagtgctgagattacaggcatgagccactgcaccctgccttcaactgcaattttatcactgcttctgggattgcttgattaacatgtctctggacaatgatggcgaagactagcttattctcctgggaagtccccagggctgaatgcatgccctgtgtgtggaaggtgtgccatataatctgtaggaaaactggctgagtgttaggggcctgcaatgggaaagtggtgtgttctgaacttgggagttaaaattgagaaggcagatgggcgacaggaaccactgaacaatggcttggaggttagacaccccaaaaagatgtattaggaaatcagagaggaatccatactcttagaggtatggagcaggagaggagggaattttaagcagaaagtgttccgaaatcatgtggaaagtagaaaatgtaccagatgaactgggggatctcattaaggagattgttgaaggtgcctcctcctggcttcttcttgctgcttatactaaaatgtgagagaagggacataagccaaaggaaggattgttaaataaaaaggaaccataacttgggctgtgaaaatgtccagcttctccagatgtcatatgatgctaaaactaacaaatggcttccaggcaaagagcaaatgcaggccagtgcaaggaagatggcctaaagatgaagccaagagtgtggtcatgagatcttttgtaaaatcttcaaagagaacaaagggacacctcagaatattttgttaaatagtaggatttctaagaagctt

SEQ ID NO: 315273 - DNA, 4001 bp, Homo sapiens
aagcctagaagaatttacactgaaatgttgaaagttactgggtaaagggttttgggtttcagaggtttttgacgactgtaattattttgttttcttaactgaatgttctttttttatattgtacatgattacttctgaaaaaaaaaaataaaagagtatgtcgttccccccctgcagggaggcagagtccaggtggccaccaaggggctgttgtcacagtccagggaaagccagaatggcaggcacgggagccttgggaggggcctcaatcaggcttgccctttggccccagaaagagcaggggcctgcagtgaagcccatagagccccttgtgggccgtatgggccgcctccaggcctccacctcctcccccagtcatggccgctcagtgtcctttcacttggtggtgtggggacactgggaggcttcctgggcctcccaaccctcctacccaattcccagcccaggcttggctctccaggacccagcttctagtccctgtgaggctgggccaccctgcaggactgcagctctgggccctctgttctggtgctagggccctggggcccatgaatgcagttctagcactcgggaggctgaggcgggagaatcacttgaacccgggaggcggaggttgcagtgagccgagatcgtgccactgcactccagcctgggcgacagagcgagactctgtctcaaacaaacaaacaaacaaacagcagccaacattctccgagggtttcctagggccaggcgcggggcagtctcatgtaattctcaagcaatcttgggaggcaggcactactgttcattgcccctcccgattttagagacaagaaactaagattcagaacacaagaaacttgcccaaggtcaaggagaagtggaggcgtggggaggaaacaaagtcacctgacaccagagcccatgcctccaaactccaagtctgggactcctgattaaattccgtctctgtctgcactttgggaagattctttcctctcctaggcaagtgcccgcggggcctgagctctcgatagcggggccccaggagccacgttgtggggtctgctatccggcctccctctgcacgcgcgaccgtccacttgagcgcagtggctggagctgggactccagcgcagcccctgagcgctcacgtcgacccctccaatcacaagaggccctcgtgccaggcccccagatttggccaatcagggaagacctttccctgtcacagaatggggtcgaggggcccaggaaacaggtagtccccagtcacaaatcatcgcgtcgccttcgctggtccctttctcttatcgagcctcagttttctcttccataagccgggccagcagtgcccaccccacaggttggcgccagctccgtaagggccctaccaccgcggccggccagatcctcggcgggccagtcctggcgctgcggtcatttagcctgatgacccctggccaggttcagcctcaattgctccaaagaactccggacccgtaccccgagcccggcgtcccagcggcgaagttgatgggccccgcaggagcccttgcggtgagaaccgagtcctggagcccctggagcccccggagcccccggagctgcagccggggcagcctcctttccgccgggagtccagcgctctcgagagcccagaaactcaccgcgcgcaggagttggtgcgggcgtcccgggcaggttagacttctgtgagccgcagccccgaaactgaggttggtgcagacccgtcctgggagccaggaggtgggacctgtccccgccagtccgcgagctctggttaaggccagagcccgtgaggggaggggcgcggggcgggcggagagtcagccgagtgggggcggcgctcaccggtggtgggactatggcgggagcgcagcgcaccctctccgggcgggtctataaatgccatgtaaaagccaaccccgcaggggcctgcgctctttcccgcttaggtcaagaagacttactgtggacccttggagaattcccagggctttgaaaagtcccaagcacccagcagggctggcagttctgagcgctggcaaggctaagtgggtcagaggagaccctcgccaagccggtgactcactcactcgctcaccctctctcactcttgatgggccaagtacctgccatgtgctacggacacagcagagcgaaaggagacgctgccctccgggaatttgcagccgcttgcagaggcggccccttagcagctgcgcatccgggtggatagcggcgcttctgcccgcccagtgcctacccgcctctccgagagaaaaacagcccctggttttctctctgcaattccccttctccactctctcccttctactcagtcctggtgccgcagacccctcctcctggttcccagagatcctggccagcccggtctcaggcaaggccatgtagaatgccgggagtgataattgcgtattgtttcatgactgcaagcctgtgtccaggtggctccttctcctggaacacccttcccaccacacctgcggccgcactgctccgtgccctgctaagcctcacttcttttgaggcgaccctctcgctaagtcccgaccacctggccctctctctgctcagtgcctgaacacatcaggcttgctgcagcccctgcctttacctctctacttgtagtgttctttcagagcctgctcccatatggtatcacatatcagatatctgatgcagagccttagagaggctgttccaggtcacacaaactaaggaagtccctcagccactccctgccacatcaccctgttctatttccttcacagcacttaactgtatatctgatatttccttgtttctttgtttgttcattgtctgtctctcccactagactgtaagctctttgaggacaggaaatttgtgagatgtattcactgttgtatccccaatacacagtgatggcttgtagcagttgctaaataaatgtttgttgaatggcttaatgcatgtattttgctcacataagccagtatgggcacccaggattgaggtggcctgtgcctgctgatccacttagcctactttcaggcactgtccccttgttctttaggctccagcctgcaggtctccctgctgtccctcatatctgtggaacttctcgactcataaagtttccatgtgccgttcatctttgtccagagaacccccatcattcttcaggaagttcctactaaaatgccatgacttcagggaagctttccctagcctcagccttactaggacagattcctccattatgtgatcacagagaggcctgtaatttttcttcatgaacctctctcaactttatttatttatttttttttgaggtagagtctcactctgtcacccaggctagagtccaatggtgcaatctcagctcaatggaccctccacctcctaggttcaagcgattctcctgccttagcctcctgagtagctgggattacaggcatgcgccaccacacccagctaatttttgtatttttagtagacgtttcaccggggtttcaccatgttggccaggctggtctcaaactcctgacgtcagatgatccacctacctcagcctcccaaagtgctgagattacaggcatgagccactgcaccctgccttcaactgcaattttatcactgcttctgggattgcttgattaacatgtctctggacaatgatggcgaagactagcttattctcctgggaagtccccagggctgaatgcatgccctgtgtgtggaaggtgtgccatataatctgtaggaaaactggctgagtgttaggggcctgcaatgggaaagtggtgtgttctgaacttgggagttaaaattgagaaggcagatgggcgacaggaaccactgaacaatggcttggaggttagacaccccaaaaagatgtattaggaaatcagagaggaatccatactcttagaggtatggagcaggagaggagggaattttaagcagaa

SEQ ID NO: 315274 - DNA, 4001 bp, Homo sapiens
acaacaggacagataagacacacatggctctgcactgcctgggtctgttattgtgtggaggaatgtcttagtctgttgctcctgtggatgtggcgaaagcacgaaccaggagttttcatccttcatttcattttcttaatctagttgtatcatcctctgggtgagcctagcccactttaaaatggatattcagatgtcagaatgaatagagcagtgtgcctgacttaagtaatatcaaaattttagacatgtggaaaagacggagttgatgaagctactgttatccagagaccatgaccattccgggtggttggtttcgtttctaatgcacatctgctccaccccaccaattgctttgcgcaatgtgcggttctcattacaaagtcaacaattctttatcatctgcgtggtcagtcacccttttgttgtccctcccttgtaattgtttaatctggcctcccctgccacatttcttggctgcctactctccccgctcctgtcagtcaggttgtactcagggaatgtaaatgcacagaaaaagtccagagtcaattagaactaattaggtgttttatctgctgctttggattatccgtgccctctatggatacacggcataggctggttgaacaaccatccctggattggggagcattctaagactcacacacagcttcctattgtctgtgctaacggaggtaaaggctggtgtgaatgtacaacagagacatttaaaaaccaaggcatagtttatgcccattttcattgtacattttagtgagtgtttacagctttatataactgtctgaccatcaccacaatcaaggcatagcatactttcaacatcacaaaaagttttcttgtgccatctcagccaatctggccctaccttggccccaagcaaccaccagtctgctttctgtcactatagattagatttgtcttttctagggttttagtttctccaatctccttcccagtgatgtctggtttaggctgatattaaaatgtgttcatgttccctacatccacactgatttaacacggtgggcagagctgggacatggaagaaacgtgagaggcaagacgtggaggctgatgagcataattattggcaatgagaagaatgttggctctccccagtatttgtagaatatgacaaagcggtgtgcccatgttgtgccctgaacctattttcaaggtcattcaatacagagtctcctaaatttaactacctaggaattgtgttttgccttgaatggacatttggaaactccagactctagccagcccctctcagccacggagtcattgctccccctggtgtaaacacagagactagtcaccctgtgtcaggcattcccacccactgcagccctccctggaccacaaggagccaagggcaggcaagaaagcttcaggctccctctggctgttaggttcctaggtcaaaggctgagtttgtgaacacagagaaacactaagagatcaaccgctcaggaacagagagaaggaaaaccgcagaaacagaactagctagacatgcaagacagagaggtgagggggcacaggcacagcccaaaaaacaaagcaaggagaggagccaagatggccgaataggaacagctccggtctacagctcccagcgtgagcgacgcagaagatgggtgatttctgcatttccatctgaggtaccgggttcatctcactagggagtgccagacagtgggcgcaggtcagtgggtgcgtgcactgtgcgcaacccgaagcagggagaggcattgcctcacttgggaagcgcaaggggtcagggagttccctttccgagtcaaagaaaggggtgacggactcacctgggaaatcgggtcactcccacccgaatattgcgcttttcggaccggcttaaaaaacggcgcaccacaagattatatcccgcacctggctcagagggtcctacgcccacggagtctcactgattgctagcacagcagtctgagatcaaattgcaaggcggcagtgaggctgggggaggggcacccgacattgcccaggcttgcttaggtaaacaaagcagctgggaagctcaaactgggtggagcccaccacagctcaaggaggcctgcctgcctctgtaggctccacctctgggggcagggcacagacaaacaaaaagacagcagtaacctctgcagacttaaatgtccctgtctgacagctttgaagagagcagtggttctcccagcacgcagctggagatctgagaatgggcagactgcctcctcaagtgggtccctgacccctgacccctgagcagcctaactgggaggcaccccccagcaggggcacactgacacctcacacggcagggtattccaacagacgtgcagctgaggatcctgtctgttagaaggaaaactaacaaacagaaaggacatccacaccaaaaacccatctgtacatcaccatcatcaaagaccaaaagtagataaaaccacaaagatggggaaaaaacagaacagaaaaatgggaaactctaaaatgcagagcacctctcctcctccaaaggaacgcagttcctcaccagcaatggaacaaagctggatggagaatgactttgacaagctgagagaagaaggcttcagacgatcaaattactctgagctacaggaggacattcaaaccaaaggcaaagaagttgaaaactttgaaaaaaatttagaagaatgtataactagaataaccaatacagagaagtgcttaaaggagctgatggagctgaaaaccaaggctcgagaactacgtgaagaatgcagaagcctcaggagccgatgcagtcaactggaagaaatggtatcagcaatggaagatgaaatgaatgaaatgaagtgagaagggaagtttagagaaaaaagaataaaaagaaatgagcaaagcctccaagaaatatgggactatgtgaaaagaccaaatctacatctgattggtgtacctgaaagtgatggggagaatggaaccaagttggaaaacactctgcaggatattatccaggagaacttccccaatctagcaaggcaggccaaggttcagattcaggaaatacagagaatgccacaaagatactcctcgagaagagcaactccaagacacataattgtcagattcactaaagttgaaatgaaggaaaaaatgttaagggcagccagagagaaaggtcgggttaccctcaaagggaagcccatcagactaacagcagatctcttggcagaaatcctacaagccagaagagagtgggggccaatattcaacattcttaaagaaaagaattttcaacccagaatttcatatccagccaaactaagcttcataagtgaaggagaaataaaatactttagagacaagcaaatgctgagagattttgtcaccaccaggcctgccctaaaagagctcctgaaggaaacactaaacatggaaaggaacaaccagtaccagccgctgcaaaatcatgccaaaatgtaaagaccatcgagactaggaagaaactgcatcaattaacgagcaaaataaccagctaacatcataatgacaggaccaaattcacacataacaatattaactttaaatgtaaatggactaaacgctccaattaaaagacacagactggcaaattggataaagagtcaagacccatcagtgtgctgtattcaggaaacccatctcacgtgcagagacacacataggctcaaaataaaaggatggaggaagatctaccaagcaaatggaaaacaaaaaaaaggcaggggttgcaatcctagtctctgataaaacagactttaaaccaacaaagatcaaaagagacaaagaaggccattacataatggtaaagggatcaattcaacaagaagagctaactatcctaaatatatatgcacccaatacaggagcaccaagattcataaagcaagtcctgagtgacctacagagagacttagactcccacacat

SEQ ID NO: 315275 - DNA, 4001 bp, Homo sapiens
tttgcaaggcccagtgcaagatgaaaacatgggcccccttattcaaaaatcagaggaaaaagcactgctgaagtattaacatataaagcattttctttcttctgtggtgtctgtgtctcaatttatcatgatgctttcatttgttatttaatgtccttccaagtaaaaaaaaagttaacattttaaattactagcatggattatactgttcctctttacattgtgcaatgccagatttaaataggaacactggactcaaatgtggaatcacagaaatgacgtaatttgtactttgtatgtggcatttttttgcctcacagaaacagtgagacgttgcaggaaactaattcatctgtttttgtttgtttgtttgtttttgtttttttcccgagacagagtcttgctctcttgcccaggctggagtgcagggtgagatctcagctcactgcaacctctgcctcccgggttcagaccattctcctgccttagcctcctgagtagctgggattacaggagcctgccaccacaccggcctaatttttgtatttttaatagagacggggtttcgccatgttggccaggctggtctcgaactcctgaccttgtgatccacccacctcggccccccaaaatgctgggattacagacatgaagcaccacacctggccattcagctgtttttatttcactttttcacacctatacaatctaccaccactctctacctttggcttactgatgcataaggaagaattgaaaggaaaaacaactatgactctgctatctttgcctctcctatgtcatcagttccagtggaagtggttggttactacagggaatcagatgagtagaaaaggctgggagagggttccttgtttgttcctgtttcttagaatgccattgacttggttttcaattctgattctataataagagaaagtgcaacctcttggtgctgtcagcatctcttgcagactccgttgtggacatagtaggcttcccttatgctcacttggagccttgctgggctcccatgcactgcggaccccccaagattctatgctcagggcacagcagacacgccatggggagtgcggtggcaagggacgggggtaactcatattgttggtgtctcgtctgcccacgcacgtgttctattgccccattggatttcactgataaaacatagattcagactggctgcaggggctcatgcctgtaatctcagcactttgggaggctgaggtgggcagatcacttgagatcaggagttcaagaccagcctggccaatatggtgaaacccactctctactaaaaatacaaaaattagccaggcgtggtggcaggtggctgtagtcccagctacttgggaggctgaggcaggagaatcacttgagtctgggaggtggaggtcgcagtaagccgagatggtgccagtgcactccagcctgggcgacagagactctttctcaaaacaaaacaaaacatagattcacacataaaatgaggaggaattttaagacagtgacagcagagcattaagccaagctcggggtccctctcagctcgggaccctgtgtgactacacaggccaaacacccatgaattcatctcaatttccatccctctcacactcttccccactgctgtggtctcagttggcaccttcctcatttctactccggaggactgcctgtaccctgatttcttcaagggtctctccagtctatcagacgcaggccaacccagggtttctctgcattgcaatccaaccagcaccacccccctgcttaccagcctgcagtagctcccatgtcccttcaggttaaaattcagacttcttagcaaggaactgcttatttctccagcctctgtgacagcctcacaccctacaatcgagctctgctgatcctggagaagctccctctgagcctttgcacacctgtctctgctacttgagggtgatttccacctggttacctcctggtgtcacctcccacctggaagccttcctcatctctggggtgggtcagatgtagccgtttttgccctctccctacacaccctgtgtttcctctctcccagcattcatctcgtgacgtacaataagcaattgactaacttatccttaaggccagggccataccagctcttcttgttgacaaatgagagagcagcgagcacttttgccctctaatggcatctgcggatcactagctggaggccttgggactctaagagccaagctattcaagtgctacaaataacaccacatggcccccggtctttcctgtttcctccctgcatctatcaagaaggagcagctgttttttgaagccctgctttccttcccacagctttgctcacccccaccctgcttggcctccaaactcagagctttgactttcctataaatacagtttctctccaagtcaacttgattcattcatgcagggtcctagttctctctctcggccattccaattctcctctttccattacatttaagagaacccagactgggcattgtggctcacacctgtagtcccagcactttgagaggccagggcaggtggatcatctgaggtcaggagtttgagaccagcctggccaatatggcgaaaccccatctctactaaaaaacaaaaattagctgtgtgtggtggcacatgcctgtagtcccagctactcgggaggctggggcaggagaatcactgtaatctgagaggcagaggttgcaatcacaccactgcactccagcttgggtgacagagtgagactgtctcaaacaaaaaccccaaaaagaccaagaaaagggcattcatttatggtataagagcggaaaccaaaaggcagaggttcctcgatggatctctgctgggaccgtgcttatcagccattcaacctcttcaccacccggcgcacatccagaaaagccccgctgggattgatttaggggctaaaagtaaacattatcaagtaggtgaatttgcagctacagaatctgcaggtaatgcggattgattgtagaggcaccaatgaactggaggtcagattttcaacttaaccttccaggagatggccagcacccaagagctagaaaaaaggattcctggagggtggtgaagaaaatagaagtctcagaggctcagagacagatgaatgtaatccctcagctgtcacctgagctctggctataaaatgagacaacagatgaagaatagtaagcataagattgaggccaggctcggtagctcatgcctctaatcccagcactttgggaggccaggcaggtggatcatctgaggtcgggagttagagaccagcctggccaacatggtgaaactccgtctctactaaaaatacaaaaaaaattagccaggcgtggtggcacatgcctgtaatcccagctactcgggaggccatggcaggagaatcgcttgaactggggaggcggaggtttcagtgagctgagatctcaccacagcactccagcctgggcaacagagcgagactacatctcaaaaaaaaaaaaaaaaaaaaaaaaagattggggcagtcagaagcgaccaccgtcagcaaaggaaggatgaaggggagtgaataaagggtctacaggagaattaagaaagtgtgggcccttgggtccattcggtgaagtggagccaggtcactggcgagtgtgccagggaatcagttaaggatgaatatgaagcttgaggccaggccagcataattgccctgtgggcgtctgtatttctttacatttgctgactgtcaatccagcctcctgtgtttctgtgaaatataaaggaagaaatgctgtgacttcccctcactctaaggtgaaaccaaagaaggggaaactgagagacctgtccgaaatcctccactgagtcactggggaggatggaatagatacagccggtcaaccgatctgttctctaggcacagctttttggatctgccacttgcatctgcttcaagttttagaaacttc

SEQ ID NO: 315276 - DNA, 4001 bp, Homo sapiens
gacctcaggagatccacccgcctaggcctaccaaagtgctgggattacaggcgtgtgccgctgcgcccagcctagctggagatttttaatagaggatcctctgtccacagcactccttcccctcacctttttcttctttccttaaatagctaattcctaccttccaagggtggctctatgaagcctttgctgactcctccaacctggtttaagtgacttcctatgccctttatggtatcctgtgttactactaccatgattatgatgcattataattgcctgctaacttactgtccaggcccgagttagaaatgcatcctttttctttttttttttttgagacggagtcttgctctgtcgcccaggctggagtgcagtggcgtgatctcggctcactgaaagctctgcctcccgggttcacgccattctcctgcctcagcctcccgagtagctgggactacaggcgcccgccaccatgcccggctaaattcttttttttttttttttttcagtagagacggggtttcaccgtgttagccaggatggcctcgatctcctgacctcgtgatccgcccgcctcggcctcccaaagtgctgggattacaggcgtgagccaccgcgcccggcagaaatgcatctcttattcaccactgtacctctctctggtaaccagcataatgctaggcatataataagcactaaataaatatttgttgaattaagagtctttagcaagaaagccaagtgccttaagcctagagtatagtttcagcctggaaaggagtagccaataatgcctaatggactcaagtggtcacaagatgccatcattgagaagggacgttcaaagatcacagaactgaacacatggaaaaagctgagatccaggaggagacctgaggtgtccaaagccacagagaaaagcagcagcagcagcagtacaacaattttggctcaaatctgacttctaagctggtttgcaggctgtaagttcagtgcagaaggccaatctctagggtatccacctctgccatgcgggcagattaagatccggttttctgtagagcaggcttggcgctcaggtaagggatatggatgggttcgcaattgacgagtgagtggatacagagtctggtttggagttccaggtctgagatccagtttgggtcgcgggttcaggtctccctccctcccctcccctccccctcggcgcactcacatgccaccctgtgaatgacccagaaggtgatgcccacctccgccaggcagaggcaggcggccaccagcagcgtgtagcgcggctcccgcagcagcaggcgccgctcttgccaggcgcgctgcagccattgcttgcagagtccctctgcctgggccgcggaaccggaccggccgcgtttccgcagcccagccgccatcttaacggtgcgccgcttgtgtgggcccaccacccccggaaacccgaaccttcgacacttaggttccgcttcccgtgcctggcgtcccaccaggctaagcgccgatccgagtagccagtcttcatttactccactaaaatgtaatttttctgcatttgtctcctctgatgcactccacgctccataggagcagggacaatgtcttactcctcagtttatacccagccctgggtacacaggcgctaatttagaacgaatgtccagaaaagcaacattcctgcctacctcccccacaaccgctgaagccagcattctccttcgcctgcgctgggaacatctgtgttcatgctgtctctccaggagggcaaagcccctgttcgcgcccctcctgcctgcccttcgagccttccggatgctgagaaaaatgaacctttcactaattttcagatttcctgataaaagtcattcatattgaaaatatgagaggacgcagtgatgagcccacgtgagtctgacaccttgagtgcggccctaggaaatgacttggcagtacagccggaggattcagggtctggacgatagttttcccagccggaggattcttcgaagagcgcttagtaaaggacggaagttccacgtgtttgtgttgagcaactgcaggtggtgggcggagacaccagcgccccgccttctgcatcctgccttccgtattggctgaagggccggcggctctggctgcccggcggttgagagcatggcctctccaggggcaggtagggcgcctccggagttaccggagcggaactgcgggtaccgcgaagtcgagtactgggatcagcgctaccaaggcgcagccgattctgccccctacgattggttcggggacttctcctccttccgtgccctcctagagccggagctgcggcccgaggaccgtatccttgtgctaggtgggtaatcccggcgcggccccgccaggtagagctggcaggaccggcgccgcatgggcttggcctggtccgctttcctcccgcctgtctatccctcttggaggacgcctgcgttgggacgcgagatccagctccttcagagtcccggctgtatttagtcaaggctaacaggagtaagagattgttggtcccggggccctctggagaaagacagtccctcagagtttgagcgttgggggtacccaagaccctgtccggaccctcgggaggcaggcagccttggggaccggattgctcagaggaccgagatcaagtcctagcgctaattgacttgtaaaacttaggacaagtcatgaacccgttctgagctttagattcagttctagaaatggtactgcgagttcacatcggaggcggcacgcgcaggcacctcgagaataatgcccagcgcttttctttttgcccctgggcactgggagccagagtcacctagagagagtcctgtctgaaacttggtcctatgccttagagagtgagaacagcaccctctaggggtggaggggagattgccgcccagggtgatacgattccccaaagggagacgtgctggaggaaaggtagggctctggggtgttcggctgacctcttgaggttctctcctagtgtcagccttggaggcgctagtaaagtttgaatgagcaacagattttcttccaattgtcgtttttactttgctctttgtaaaagcctttgtatgtttaagtgaagtctttaataaataaaaaaggtatatgtaatatatatgtaaggtataaataacaaatctaatgtgtgtgtctattccactcagtttgagaaatagaacattactagggatagaaaaaaaagtataatttagtggttaataacttggctgggcgcggtggctcacgccattaatcccagcactttgggaggccaaggcgggcggatcacctgaggtcgggagttcgagatcagcctgaccaacatggagaaaccccatctctactaaaaatacaaaaaattagtcgggtgtggtggcgcatgcctataatcccaactacttgggaggctgaggcaggaaaatcgcttgaaccagggaggcggaggttgtggtgagccaagatcatgccattgcactccagcctgtgcaagaagagcaaaactctgtctcaaaaaaaaaaaaaaaaaaagaaaagaacttggactctgggctggcctcatgattcatgctcataatcccagcactttgggaggccaaggtggaaggatcacttgatcgcaggagctcaagaccagcctgggcaacatagtgagatcccatctctacaaaaaatttaggccagagcagtggcttatgcttgtaatcacaacactttgggagaccaaggcgggtggatcatttgaggtcaggagttcaagacaagcctggccaacatggtgaaaccccgtctctactaaaaatacaaaaatcagccaggtgtggtggcacgtgcctgtaatcccaggtacttgggaggctgaggcaggagaatcacttgagcccaggaggtggaggttgcagtgagctgagattgcaccactccactccagcctgggtgacagagtaagaccc

SEQ ID NO: 315277 - DNA, 4001 bp, Homo sapiens
tcagctcactgcaaccaccatctccccggttcgagccattttcccatctcagcctcccaagtagctgggattacaggcacttgccatcatgcccagctaatttttctattttagtagagacagggtgtcaacatattggccaggctggtgttgaactcctgacctcaggtgatctgcccgcctcgggctcccaaagtgctagaattacaggcataagccaccgtgcccagccaggctggtctttaactcctgcccccaagtgatccgcccacctcagcctcccaaagtgctgggattacaggcatgagccaccgtgcccagtctaactgaattttttttttttttgacacggagcttgctctgtcacccaggctggagtacagtggcgcaatctcggctcactgcaacctccacctcccgggttcaagcaattctcctgtctcaacctcccgagtagctgggattacaggcatatgccaccacgcccagctaatttttgtatttttagtagagacaggatttcatcatgttggccaggctggtctcaaattcctgacctcaggagatccacccgcctaggcctaccaaagtgctgggattacaggcgtgtgccgctgcgcccagcctagctggagatttttaatagaggatcctctgtccacagcactccttcccctcacctttttcttctttccttaaatagctaattcctaccttccaagggtggctctatgaagcctttgctgactcctccaacctggtttaagtgacttcctatgccctttatggtatcctgtgttactactaccatgattatgatgcattataattgcctgctaacttactgtccaggcccgagttagaaatgcatcctttttctttttttttttttgagacggagtcttgctctgtcgcccaggctggagtgcagtggcgtgatctcggctcactgaaagctctgcctcccgggttcacgccattctcctgcctcagcctcccgagtagctgggactacaggcgcccgccaccatgcccggctaaattcttttttttttttttttttcagtagagacggggtttcaccgtgttagccaggatggcctcgatctcctgacctcgtgatccgcccgcctcggcctcccaaagtgctgggattacaggcgtgagccaccgcgcccggcagaaatgcatctcttattcaccactgtacctctctctggtaaccagcataatgctaggcatataataagcactaaataaatatttgttgaattaagagtctttagcaagaaagccaagtgccttaagcctagagtatagtttcagcctggaaaggagtagccaataatgcctaatggactcaagtggtcacaagatgccatcattgagaagggacgttcaaagatcacagaactgaacacatggaaaaagctgagatccaggaggagacctgaggtgtccaaagccacagagaaaagcagcagcagcagcagtacaacaattttggctcaaatctgacttctaagctggtttgcaggctgtaagttcagtgcagaaggccaatctctagggtatccacctctgccatgcgggcagattaagatccggttttctgtagagcaggcttggcgctcaggtaagggatatggatgggttcgcaattgacgagtgagtggatacagagtctggtttggagttccaggtctgagatccagtttgggtcgcgggttcaggtctccctccctcccctcccctccccctcggcgcactcacatgccaccctgtgaatgacccagaaggtgatgcccacctccgccaggcagaggcaggcggccaccagcagcgtgtagcgcggctcccgcagcagcaggcgccgctcttgccaggcgcgctgcagccattgcttgcagagtccctctgcctgggccgcggaaccggaccggccgcgtttccgcagcccagccgccatcttaacggtgcgccgcttgtgtgggcccaccacccccggaaacccgaaccttcgacacttaggttccgcttcccgtgcctggcgtcccaccaggctaagcgccgatccgagtagccagtcttcatttactccactaaaatgtaatttttctgcatttgtctcctctgatgcactccacgctccataggagcagggacaatgtcttactcctcagtttatacccagccctgggtacacaggcgctaatttagaacgaatgtccagaaaagcaacattcctgcctacctcccccacaaccgctgaagccagcattctccttcgcctgcgctgggaacatctgtgttcatgctgtctctccaggagggcaaagcccctgttcgcgcccctcctgcctgcccttcgagccttccggatgctgagaaaaatgaacctttcactaattttcagatttcctgataaaagtcattcatattgaaaatatgagaggacgcagtgatgagcccacgtgagtctgacaccttgagtgcggccctaggaaatgacttggcagtacagccggaggattcagggtctggacgatagttttcccagccggaggattcttcgaagagcgcttagtaaaggacggaagttccacgtgtttgtgttgagcaactgcaggtggtgggcggagacaccagcgccccgccttctgcatcctgccttccgtattggctgaagggccggcggctctggctgcccggcggttgagagcatggcctctccaggggcaggtagggcgcctccggagttaccggagcggaactgcgggtaccgcgaagtcgagtactgggatcagcgctaccaaggcgcagccgattctgccccctacgattggttcggggacttctcctccttccgtgccctcctagagccggagctgcggcccgaggaccgtatccttgtgctaggtgggtaatcccggcgcggccccgccaggtagagctggcaggaccggcgccgcatgggcttggcctggtccgctttcctcccgcctgtctatccctcttggaggacgcctgcgttgggacgcgagatccagctccttcagagtcccggctgtatttagtcaaggctaacaggagtaagagattgttggtcccggggccctctggagaaagacagtccctcagagtttgagcgttgggggtacccaagaccctgtccggaccctcgggaggcaggcagccttggggaccggattgctcagaggaccgagatcaagtcctagcgctaattgacttgtaaaacttaggacaagtcatgaacccgttctgagctttagattcagttctagaaatggtactgcgagttcacatcggaggcggcacgcgcaggcacctcgagaataatgcccagcgcttttctttttgcccctgggcactgggagccagagtcacctagagagagtcctgtctgaaacttggtcctatgccttagagagtgagaacagcaccctctaggggtggaggggagattgccgcccagggtgatacgattccccaaagggagacgtgctggaggaaaggtagggctctggggtgttcggctgacctcttgaggttctctcctagtgtcagccttggaggcgctagtaaagtttgaatgagcaacagattttcttccaattgtcgtttttactttgctctttgtaaaagcctttgtatgtttaagtgaagtctttaataaataaaaaaggtatatgtaatatatatgtaaggtataaataacaaatctaatgtgtgtgtctattccactcagtttgagaaatagaacattactagggatagaaaaaaaagtataatttagtggttaataacttggctgggcgcggtggctcacgccattaatcccagcactttgggaggccaaggcgggcggatcacctgaggtcgggagttcgagatcagcctgaccaacatggagaaaccccatctctactaaaaatacaaaaaattagtcgggtgtggtggcgcatgcctataatcccaac

SEQ ID NO: 315278 - DNA, 4001 bp, Homo sapiens
cgaaatgggggttcaaccagatcacagcatttttttctttttatttgtttgtatttctttctattcttttttttttttttttttagagatgggatctcactatgttgacgaggctggtctcaaactcctagcctcaagtgatcaacccatcttggcctcccaaagtgctgggattacaggcgtgagccactgcgcccagccaaagaggatcacagcttttcaaactacttaagtctcccctcaaaaggacaaacaggtggaagggggcttctctgggtgtggggatctggtccttagactccccaccccacaaagcagcctatgactccgggggtgagtcctccagactcaagttggcaactgttaatctgggagtcttccacatctgtggccccaaagggatctataaccctgggaaactgagtcacaccacccagaggaacgggcagaagttaagcatggctggtgaggcagtgggttgggggaaggccgcagtggaagctgggattctggttaggtgaccctgagggacccagctcccaggctagggagtctggggcttcatcctggaagtgatgaggagagtgtaagtgcaggggtgaggcagcgtgaatgtgcatgagtgtgcacgtttgcagggcaggaggaggaggtgctgaaccttaatatgaggaggatcctgcaggagtacccccctccccaacccctgtcccatccctaaccttcccccttccagtcaagggcatagcttcctcaccctctccctccctccagttcaaaggttccttagtgacaggctgtgcctaatgtacagatggggaaactgaggcccaggaacaatgggagggtccagagacccttgtgtagaacttgtgcagggctcagacccagacttctggctccagcccaccaggttcacctagctagatggctcagagagggtgggcaactcacctgaggcacagagcaagatcctgacgggccctgcctcacagctgtcctcaggcagccctgatgctcaccacggggtgcggtggggtggggcagggtgaggacagaactggccagtcacggcgtgcccaggtgagtcagcggctgcccctgtggcgctctaaccagtagccagacctggtctctcctctgcattcctggcctctgtccacgctaggtccctcccgggcagggtcactggggccttccctgtcctctcccaggcctggctccttaggcccctgacacaccttgtcgtgacactcactcactctggtatttcctggtctgaacaggcagggaagttctgcctgctgtggaggctttttcatgggctgccgtggcagccccttcgttgtctggtgcccagtgggggagagtagagacacgcactgccccagggagggggcgctgaactgtcacacctgatccctcagtctcatgctcgcctctccccgctgcacccttcctcggccccaccatggctacaagcctcttgtcctagacaagcacccctccctgctgtcgcatatgtcccagcttcccttcctctccctgcccaggcacacactcagtcgctggagtttcccagacccgagctcctgttccggccgccaggcatttgccatgccgctcccatgcgaaaaggccacctcctggaatcccgggtcgggcccttccgccctaaccagccggcgtcacctcctcctggcagtctctcctgctggctggggccccgtggccctgccaccacggctcaggtcaggcccggggcgctgccccgaacccaagcaggctagcagccaggcagggaggacgacgctgtgagcggggtatcttacgagggactcggacggccgggggatgactgccgccgggaccaaggagctgggcggggaccgcagcagccgaggaggcgggagcccccacctggacgagctaagcgtggagcgcagacacccgtccgcagacgcgcgcccttcgtcgcgcccttacctgagcgctgtggttgccccgcgccgggactgcctgtgcggctcctcgctcgcacccccaccctgccccctgccagtcccgccccctgccagccccgcccccttcgcccagccccgccccgccccgcctccgggtgttgctctggagttgcgggggccacgggcgggccaccgaggagctggcgcgcggtattgatccgtcccgccgccccaagcctctcctgaggcctccctctggcgtcccccgggatccggaggcccctgggacccggcgcggggaggaaaagtgggagtcttgacccctccgccccctacgcacccacgcgcacactcaggctcgcctctcgcgccccgcttcccctgcaaggctccgaggccgccgtgccaccacctcgccccgccagtcagtcgctctgcgagcctgtggtgcagccccgtgacctcccgggtctgccctgagtcacagaagccagcacacgcggagcgctgtgtgggttcgtggaacttggagcctgtagaggggtatactgaggcgccctgcggccccctgggctgggtgtccacggccggccgcccctcctgtgcgaccttggggaagtcccctttcctccccactcctgagtctcaacaggcctagtagagcatgaagccggccgcgtgtgctttgtgcgaaggcctgagaccttggaaagggtggctgaagacttatctgggacagaccccccgggagcgggagggaacttagttcaaacctgtaacaaagaagccccccgtcagcagcctgattccccctctggccaccaggttagtcacccattgctctcagtggcactcaggttccagtgagggggaggctcagggtccaaggcggccgtggaagagcagaaagggtggcccaccagccccctactcagccccctactgaggaggtgggaggcatcccccaacctgccaggctgaagagacccccagtggaggtaagtaggggcctggggcctgccaagctcatcccctggctcccttgggttgttgcgaggtgggagtttactgtctgccaagctgcacatcaccccttggagggtttccagcctgggacccttgtctgagtgactgcaggtcccagtgacctcacccttttgccccacattgctctcctcctgggtcccaatcctgcagagccgccccttcctgcttctccatccctccccacattgccaaagcccgccctagctctggcctccccttttccagccttgttttcttgcccccttctgcaccccctgctgcctgaggggctccactcccaaaggccttgctcctctggtccctgcctgctagaggtgttgctgtgttggtgggtgggggctacctcaaggaggcttctggtgaggtgtccctctggccctctgggaaagcctcccctccccatgccctccacccccaggctccggaccttggcccccactccccttcacagccctgttggcctgcgggactgtctgctggggcacttggctccctgagtctacagcacagcctggcagagccaccgccccagcaggtggaatgaactgaggcttcaggttctaaacaggcctccaaggtcttccctgtggggatcctttgtgcctgtggggcagtgggaggtagcggtacattctggaagagctggtatggggccttgtgctgctttcctcttgctgtgtgatcacaggcagtgtgtggcctctctgtaacgtagtgcccctgctggtgaaatatcttacctgcgcctccttctcggggttatgtgggactctgagaggaggggtatggtgggttcaaggggctccttcagggatgagcacggtttagaggatctatgggtcccctagagcatgggtgtgggccaccaggcatccctggggcttaggagggaggcaagggctggagagtggccatggcctcaggaggagcatatggcctcaccacttgtgacgaacagggacaggtggggcaaggccccgagcaggacag

SEQ ID NO: 315279 - DNA, 4001 bp, Homo sapiens
ttgtatttctttctattcttttttttttttttttttagagatgggatctcactatgttgacgaggctggtctcaaactcctagcctcaagtgatcaacccatcttggcctcccaaagtgctgggattacaggcgtgagccactgcgcccagccaaagaggatcacagcttttcaaactacttaagtctcccctcaaaaggacaaacaggtggaagggggcttctctgggtgtggggatctggtccttagactccccaccccacaaagcagcctatgactccgggggtgagtcctccagactcaagttggcaactgttaatctgggagtcttccacatctgtggccccaaagggatctataaccctgggaaactgagtcacaccacccagaggaacgggcagaagttaagcatggctggtgaggcagtgggttgggggaaggccgcagtggaagctgggattctggttaggtgaccctgagggacccagctcccaggctagggagtctggggcttcatcctggaagtgatgaggagagtgtaagtgcaggggtgaggcagcgtgaatgtgcatgagtgtgcacgtttgcagggcaggaggaggaggtgctgaaccttaatatgaggaggatcctgcaggagtacccccctccccaacccctgtcccatccctaaccttcccccttccagtcaagggcatagcttcctcaccctctccctccctccagttcaaaggttccttagtgacaggctgtgcctaatgtacagatggggaaactgaggcccaggaacaatgggagggtccagagacccttgtgtagaacttgtgcagggctcagacccagacttctggctccagcccaccaggttcacctagctagatggctcagagagggtgggcaactcacctgaggcacagagcaagatcctgacgggccctgcctcacagctgtcctcaggcagccctgatgctcaccacggggtgcggtggggtggggcagggtgaggacagaactggccagtcacggcgtgcccaggtgagtcagcggctgcccctgtggcgctctaaccagtagccagacctggtctctcctctgcattcctggcctctgtccacgctaggtccctcccgggcagggtcactggggccttccctgtcctctcccaggcctggctccttaggcccctgacacaccttgtcgtgacactcactcactctggtatttcctggtctgaacaggcagggaagttctgcctgctgtggaggctttttcatgggctgccgtggcagccccttcgttgtctggtgcccagtgggggagagtagagacacgcactgccccagggagggggcgctgaactgtcacacctgatccctcagtctcatgctcgcctctccccgctgcacccttcctcggccccaccatggctacaagcctcttgtcctagacaagcacccctccctgctgtcgcatatgtcccagcttcccttcctctccctgcccaggcacacactcagtcgctggagtttcccagacccgagctcctgttccggccgccaggcatttgccatgccgctcccatgcgaaaaggccacctcctggaatcccgggtcgggcccttccgccctaaccagccggcgtcacctcctcctggcagtctctcctgctggctggggccccgtggccctgccaccacggctcaggtcaggcccggggcgctgccccgaacccaagcaggctagcagccaggcagggaggacgacgctgtgagcggggtatcttacgagggactcggacggccgggggatgactgccgccgggaccaaggagctgggcggggaccgcagcagccgaggaggcgggagcccccacctggacgagctaagcgtggagcgcagacacccgtccgcagacgcgcgcccttcgtcgcgcccttacctgagcgctgtggttgccccgcgccgggactgcctgtgcggctcctcgctcgcacccccaccctgccccctgccagtcccgccccctgccagccccgcccccttcgcccagccccgccccgccccgcctccgggtgttgctctggagttgcgggggccacgggcgggccaccgaggagctggcgcgcggtattgatccgtcccgccgccccaagcctctcctgaggcctccctctggcgtcccccgggatccggaggcccctgggacccggcgcggggaggaaaagtgggagtcttgacccctccgccccctacgcacccacgcgcacactcaggctcgcctctcgcgccccgcttcccctgcaaggctccgaggccgccgtgccaccacctcgccccgccagtcagtcgctctgcgagcctgtggtgcagccccgtgacctcccgggtctgccctgagtcacagaagccagcacacgcggagcgctgtgtgggttcgtggaacttggagcctgtagaggggtatactgaggcgccctgcggccccctgggctgggtgtccacggccggccgcccctcctgtgcgaccttggggaagtcccctttcctccccactcctgagtctcaacaggcctagtagagcatgaagccggccgcgtgtgctttgtgcgaaggcctgagaccttggaaagggtggctgaagacttatctgggacagaccccccgggagcgggagggaacttagttcaaacctgtaacaaagaagccccccgtcagcagcctgattccccctctggccaccaggttagtcacccattgctctcagtggcactcaggttccagtgagggggaggctcagggtccaaggcggccgtggaagagcagaaagggtggcccaccagccccctactcagccccctactgaggaggtgggaggcatcccccaacctgccaggctgaagagacccccagtggaggtaagtaggggcctggggcctgccaagctcatcccctggctcccttgggttgttgcgaggtgggagtttactgtctgccaagctgcacatcaccccttggagggtttccagcctgggacccttgtctgagtgactgcaggtcccagtgacctcacccttttgccccacattgctctcctcctgggtcccaatcctgcagagccgccccttcctgcttctccatccctccccacattgccaaagcccgccctagctctggcctccccttttccagccttgttttcttgcccccttctgcaccccctgctgcctgaggggctccactcccaaaggccttgctcctctggtccctgcctgctagaggtgttgctgtgttggtgggtgggggctacctcaaggaggcttctggtgaggtgtccctctggccctctgggaaagcctcccctccccatgccctccacccccaggctccggaccttggcccccactccccttcacagccctgttggcctgcgggactgtctgctggggcacttggctccctgagtctacagcacagcctggcagagccaccgccccagcaggtggaatgaactgaggcttcaggttctaaacaggcctccaaggtcttccctgtggggatcctttgtgcctgtggggcagtgggaggtagcggtacattctggaagagctggtatggggccttgtgctgctttcctcttgctgtgtgatcacaggcagtgtgtggcctctctgtaacgtagtgcccctgctggtgaaatatcttacctgcgcctccttctcggggttatgtgggactctgagaggaggggtatggtgggttcaaggggctccttcagggatgagcacggtttagaggatctatgggtcccctagagcatgggtgtgggccaccaggcatccctggggcttaggagggaggcaagggctggagagtggccatggcctcaggaggagcatatggcctcaccacttgtgacgaacagggacaggtggggcaaggccccgagcaggacagatctgatcttatgctaggtgtctctgggcctcactttcatcatctgca

SEQ ID NO: 315280 - DNA, 4001 bp, Homo sapiens
attgtagcagtgccccctccctggttcctcacagaacagaggtcatgggtcattctaatccacaaacgatcaatgcacaatgtttggtcaatagagtgaatgcccagcacttccccagaagcacctctttccccaagggaggtcctaggagcagacgcatgaggcctccctggacacggcaggccccaaggagacctgcgccagtcaccttgtctctgtgtcttcatcctcctccagggcctggcccttgcgctctaaggcaactcgcagcagacccctgtgagtcaatgagagagaaatggtgtggctgccccttgccacagaactggagttctaccaccagtcaacaaaggcaaaagcaggtggcctctcagaactgtggacatggcctgcagggttcatcctctcaaaccacagaagttagaaggttggagctccaggatgttagcctgagaatccagcagcagaaggaactatagcatctaaggcttctatttgcagtgtttcatggggtcacagcccagcctgggactgcaggtgtgttccgagtccagggccaagctcagcctacagtggggtgagagtgcacctgcggtcagagtcagcccagcgcctggttgggtcttggactctagctgagggctgcagctgggcctttgctctcacctccccaccctctaacccttttgctcagcagctgcacactgaccaagcctctggttcattgttgaatcagacacttggcattcctcccaaatgcaaggcagaactgatgcctggaaagggcacactagtgtcacagggcagtagctgtcccgtttgccaccgagcccacctgtaggcagcccagagttcctgggcatgctgcttcacctcctcctgggccagctcctgcaggtgcttgttggccccgacacctgcgtaggtagcctggaaggtcagcatcagtgtccggagcagctttcccagggggtgcagtgagttgctcagagcctgggccagtgcataggcaacagagagagactaagcactggggtctggagcacagcatgcccacaccagcctcccaacacttctcccatctcatacacgagaacactgaggtcctctgaggacaagggatccacaggcctgtccccttcagtcagcaccctgctatgaaaaatgggagcccttccccaccagggacagtgacaatgtcacccccttggccaccccagcagggctctcaccttcctgaggtacagctgcagggccttgggctcccggtgctgcagcagctcctccaggatgtcttccatactgcccacactgtcctcagggtgggtcctgggcaccacacacagcatccctcacccacacctcggcccagccccctccccccaggaagccctccccagcccaccctaacctgtgcatgctcacacagccggcctcacctctcgcaggacaggtaatcctgagacctacgcagctccctggagctctgcacgtcgaagcccagcagggcctcctgcaggtccctggggcagccagcacacacaaagtcccggaaggggctgtagactccctgccagcggctttccacggggaaggcacccacgcccagctgcctgcgatggggatggagggtgggtgatggggcagagagagatggagctgaggtaggcaggactctgcccaggcccttggaggggtgggggtatgagcctggcccaggatcaagccccaagaagggtggatggattgaaccatgcagagggggctgacctccacggctccaggaggaagagcagcagagaaagggacagagaatctaccctgcgacgagaagacagacagaagcatatggaatcctggaaagacggagacagaaaggtgggcagatctggaggccaagccagagagggggtcttggtccaagagagaccagtgtccaaagtctgggattcccctccaagacatccccctctgccctcccttacagctggttccttcctgtggttgatcccgccctggccaacaggctggggcctggctgcgcatgtctaatggagccctgcactccagtgtcatgctcgtaggctacacgcagcccacactcacacccaggctggggcctgcccctagggattgctgtccactcccagctcctgctgtcagggagaagcagcatgcagggacagcgggccaagtagtcaactgtactccctccctacatctgaaatgctgcctgggaccacttcccattagaactgccacccacacagattccttcctctgtgcaatactgagtcttcctcaacagacgcaacaagagcaactgttttccaaggaggaactctgttcctacaggaaaagaagtctatccttctctggaatactccttgataatgactgtgattccacttagcaagtttccttctttaccttggctgccaggaaactcagagccaggctcaatgatcagttgtaaatgccgtaggacatgtctacatatccctttcttttaaggttaacatatgctcttattttctattttttttttcctgtatgtttggtttgtaaaccgtattgtatcctttcgagacaaaaaaaaaaaaaaagcaggacctaagcaaagcctacaaataatatttctctccagttttgtggtgtaccgcattatatccacacagcccctgatcccaagagtctctgactggagttgtacaccctgggctctcggaactctctagagggctaagaggtgggtgcaaaaaggcccctctgaggagacctgagtctttgggatggaaacacagacacatccccagataggcccagagccagaggggccaggcactcacctcttgcaggtactgctcgggtctggtgggagggcagccgtgtccagcacaccctgtgtgtgcagtcctctccctgccccactgccgaacgagccctccagggtgaagccattggggaaggtgaccttgccctgggagccaggagaaggagcagggatgtctgtctgcccagttacccttccagccaatcatgacaggccacaagcctgtccatcagtgtcagagaggctaaggactaatgaatgggcttcccgccatccattcaagctgctccatgctgaggggttcataatcctctatgcctgccagagccccccaccaacagctgtgcccacgtctcaggggctcgctcacctctgaggtaggaagaggagagagatgcagaagggactcacaggcaagagtggggagaccaccactgaggggctggggtgggggtaagcccagggacaggcaacgcctgaggagggcggtgtcttgccacatgaggctgtcccattcatagcaacctgatctccacccctttgctccagtcattatgaaaccaaaacagcccctacatttccaaaggctccagcggggacacattgccttttcctgggttagctcagggaggcacacactgaaggccagtgcctccagggacagctgctcgaggcactggtactggtggagggcgtgtattctgaactaggagggtatggagggacacagccaggagaccaccggtaccctctggatagcaggcaaggccactggtcccctctcacctcactccagaatcaatcgcaactctgtggcagggtggagttgctgtgcccactccttggctccaagggaggtgggacaggccctcccctacctgcccccagccctgagtctaagtggggagattacagacaccaaccaaggccttggcagggtgtggaggggggcctcagtggtcctcaccttccccatgagggtcaggtccctggtgaaggtgccctcatacagggagtcgtcttcagagaggaggatgcccgggcccttggggagaggaagccagggagggtagaaagggtgggtgaggaagggccaggaaactcagggtggagagagatggccaaagaagggagatgtgccctgacacatggcgagaggggccctgag

SEQ ID NO: 315281 - DNA, 4001 bp, Homo sapiens
gcccattgtgtttcgaggcccatacaggaagctggggggccaggcacagtgcttcccaccagtatctgccagttctctggaccgaagcagggagcagggcgagcagcaagagggtgggggcctgggtgggggagccctgggcagtctaggttgtcatgggaccctcggagcctatggagctggcggactcagagccagccttcagctgcaggcctccagggttgtagagatcgaattcctcagctactgccagctgcacgcggccattgaggcccctccggcctggctccagaaagactacgtgcttgtggacgctggccttgcggctgggtgcgtctggcggtgtggtgctgagtactgaggactgtgcgctcagctcttggagcgggctgggtgtttggggccagcggcggcagcggcaggcacggcggcagcagcggcagggtggggcgaacaggtagagcagcacgagcacaaggcccacggcacagcccagcagtgtggtgaagcctgtgttgaaagcctcgggctctgggcgcggaaagtgcacgctcacgttgtactcgtgcgtctggttgtggtgcaggcggggcccagtggccaggcacacgaagagtcccgcatgctgctcctgtacgttgcctatggccaagctgccgtcggccagcaccgcgatgctgccatcgcgggatcctggcgccctgagaagctcctgctgcggcgaaacccaggcaatgcgcatggccgggacgctggtgttgcagtaaagcctcagggaccgacccaccagcgcgtacaggtgctcttccggccgctctaggccaagagctggggccgacgagcagttctcaaagacgcggctgtgctggaagaagcgcacgcgggacgcgggtaccttgaaggccaagcatacgtactcgcgcgcaaagtcgcgcacggcgctcaggccccgctggtgccagcgctgtagcaggtggtagaggcggcagtcgcaaggcaaagggttgttgtgcaagtagaggccgttcttgaggaaggccggcagcgcggccagctcaggtacggagatgtgtcccagccggttggaggagaggtccagagtaagcaggtgggtggcgctcagaccgtgcaggtggtcgaaggagaacgaggcgagttcgttgcagcccaggtagagatggctgagcgcgcgcaggccgtggaaggcatgctcgtccaagtgcaccaagcggttattgaacagaagcagcttctccagcgcccccagcccgtcgaggtcgtggcggccaagcgcccgcaacgtgttagatgatagatcgagcagcctcaggccgctggcgttgacgaagacgccgcgacccagcgcatctagttcgttgtggtctaggtgcagggcgcgcagctggaagaggggcgccaaccagccggggcgcaggcgctggagcgcgttgtggctcaggtcgaggtccgcagtagcggcaggtaactcggctggcacgtcctgcagccctaggccagtgcagcttagcaggtcggcagcgcagatacatttgtaggggcagttgtggagcgcacggggcgggaaaccctcggagtccggggtgcctaacccaacgcgcagcatgcagagcagtgtccccagcagcaccaaccaggtcatggcggcgaccaccagggacagtacagagcagctctgtgcaggttgcagttccaggactcaccctcttctgctctagtgcgacatgggtggcaccggatggcccttgccgaggaggcacggcgggttcttgccagccgacggcccctactctccggttcccaggttgtgaggcggtgcggcactcttagccgcgctcccttcggcttcgctagccctctccaagcgagttcctgatcggctcctaaatactccccccaggggcggggcccgggctcctattggttcccgtttgaggaggcggggcggctacatccctttgtgcccaatggccccgcatgaccgccagatggggagcaaggccaaccccaaagtccccgtcagcctttggctggcagctctccgccgctcgtttttcctcggggagtaaaagggggagtctggaagaatgtctccaagctgctgttagtgtttatttgaagtgactttgaaggactgataatattatggggcaggcagactctcactatcttaaggtggttcgcctgagccttcttaaagtggtaccccaggccgggcgcggtggctcacgcctgtaatcccagcactttgggaagccaaggcaggtggatcacctgaggtcaggaattcgagaccagcctggccaacctggtgaaaccctgtctctactaaaaatacaacaattagccgggcgtggtggtgggcgtctgcaattccagctactcgggaggctaaagcaggagaatcacttgaacccgggaggtggaggttgcagtgagccgagatcgtgccatcgcactccagcctgggcaacagagcgagactcgtctcaagaaaaaaaaaaaaaaaacaggctgtgtggcaccttactagaatacaggacttggggtttgggaagcagggagacggaaaggatgcagggggggtgatcatgtacgagccatggcactcctcattggcaatcccaagagagacttttagccaggccccaagccttctgactgcccttgcaccctcccctacctaggagagagcaagccacatcagtgctcctggcagatccctgcttccagctacgctcaatatgctatctcctgggacagccagagcccccagcacctggcactgctctgccagcccctgaccggaagcgcttctccctgcagagctgtgagtgggctggtggggcaggtcagggaaatctggggctgggtcgggtcaggagccttaagaacagcaaagtcctaggctgggaatattcaagaggcatcacatcctcagctacctctgacttgacactacctaccactccccagatgcggattatatcagtgccgatgagctggcccaagtggaacagatgctggcgcacctgacctctgcatctgcccaggcagcagctgcctccctggtgagtgggaacacggtgcacaggtccatgccacttgaatatgtgtgcactcctacacaggcacaacggacatccacatagccaggcatccaactccagcccacccttcactctcctccctgcagcccaccagtgaggaggacctctgccccatctgctatgcccaccccatctctgctgtgttccagccctgtggccacaagtcctgcaagtaagtgggccccacagcttggtggtggggagagcagtaggtacatgcagggcagtcctcatcccctcccctgttgtagagcctgtatcaaccagcacctgatgaacaacaaggactgcttcttctgcaaaaccaccatcgtgtctgtagaggactgggagaagggagccaatacgagtactacctcctcagctgcctagccctcacagcctgtgccatcctggaacctccacctttgaacccagagccaggctgggccctatttatgagctccctttgcccttctcctgtatcccacaccaccacatccaacctccttgcctgcctgtatcctcattggtgggagcccagccatggccctaattgtgcctgagcttgactttcagtcagggccacagtgagcattaaattattattccatacagccctggccctggcccttcttgagggagtggggtttgtggggtgtgcccagcagggatcctgccagatgatgtccacatgagaaggcaggtgtccaacagcttcagcttcacccagtgccccccagacaaataatgacaagtccagggtcttctgatgtgtcaggccagcactccccttgctgatgggaaaaccggggctcggccagccccactgcatcccctcacatgatgatacgaggctctggcactgactcgccaatagacttgtggggcagc

SEQ ID NO: 315282 - DNA, 4001 bp, Homo sapiens
cgaatttgtcccggccaagcccctcagattcacgtcctttcagacatcaaacgcctgggcctttacaaaaacctgcttccgcgcccccggccgcgaacctctgctgcactcgcccgctgcgctctctgaaggccgcctttctaagccagcgcgcgtctccagccttggcctgggctcctgctcgcctaaggaaccaaagacagtctccaagctaggaggttctggcaccccagccagggctcccgccccaccacgagcccgggcggacctggagcaccggtggccgctggtacgcctggggcgagccggtgagggtagcccgaggcccggagaggtctttaagcatcgcgggtccgcctccctccctctcgagccctctttgttttccaaatactctaacgctgacgtcaccgggctggacagcaggctgcattctttctaagtgagggccaattcgtggctccagagaggattttccaaggaagacaaagaggaattcttggactagttgggggcaaaggcacctgtaacccccacctaaccaaatcagcccgcaggaccctgcaacttgagctccaagcggcgcctccatccctgtcccccgccacccccacccccgccgacctgcaacccgaaacactgtggctgttgtctccggagtcggccctctcccctctcccccagccccaagagacccgcgcgtttctagagccccgcaaagcccagcgcgctgcgctccctgggcagagcggcccttgccaggcactgcggctgcctcgaaagggcgcactgcgccccgaggacgctcgatcctcgaggctccgactcccggaaaaggccgggttgcgccgagactccagctttggctggggcacgtttctgtggcctcgcgcgctctcccgagcgccgagcggccttccttaccgctgcggcccgagggtgcccagcgcagtcagacaccacaacctccggctcggcccagctcagctcggcggcgaagatgtgttctcggccgtggcgccgacgctctggctgttcgcgccccagcgcgcagccccagggtcggcccgcgccggaggcggctgctatgccaggaatgtgagagtttcaggttccccctcgggatcaaagcgaaccacaaataacctctcagcgcaccgccctcctccgccctccgccttctcccgctccctcctcccggcccccgccttcctccggggaggcggcgctgctggccgagcgccggcccggcccccgagctccgttcctccgcgcccagcgccctccaggccgcggtgtgtccgcccctgccccatgctttgccttcggagctgctggagacaatttaatccaactctgcccattatcgcctccactcccagtcgccgacccgctctcacccttcatccctaaacccatcgacgggacgacagcaagggctgtaccacgcgtgtcctggggttgctgcgggaggggactccggctgtgtgtgtgtgtgtgtgtgtgtgtgcgtgtgtgtgtaccgggggaggtgggaaagggaggagggactgcaaagacatccatatcctctgggctgggacagtgccccgggctaagtgaatgcttccagccacagagcctctttcccctaacccccgctgttttcacccccagcggcaacctttgaatgcacttttgtttacaaacaccttcgccagctattttacgaccgtctcgacaggaagtgtgaatctgggttggaaaatccggtcaatttgacccacctacccaactgaatcacccgccgccaggcgctctgtccagttcttccccaaggtgataataggcgcccctttacgcagagtgcaaggtgtgccaccgctggcttttcgcccagtcatccgattcagccctgccaagcaccctccaacggagttctgttatcatccctgtgttgtaaatgaggacaccagggctcagagagcttaagcagcgtgcccagagtcacacacagtgagaaccaggtaatcaaccactgggctgcttggtttctcattctcaaaacccctccctggctatcagaatccaggctccctagatggacagggcagacactgggagccctcctctctccacttaccctgtccttgctttagtctcttctttacctccccctacacccctgccagccaggggctttcccctgtacccacttctgtggctcctgcatggaatcctctcctctgcccccaggacacttccactgctagatggaaaccccttcttcagaaagctcgctctgacacatgctgtccccgttccccatcacacaagccctctctacaagtcagttggggtgaggtgggggcagtcaggcccctgtccacccagagagtcagggctgatttctacccctggctgggtcctcccatcagcatggagtttgcaagtcccaaattcactggagggaaacaaggacaaggaaattctgcaagcttaattgccagggacattgttaatttttaataaaactcacaaaaagtgtgtgtgtgtgtgcgcacgtgtgtgttttacttggaagtcaaatactgtgtttcaaacagtgattggatctgagatgattgagcaaatggatcatttgtgccaagctacgggatatttgtctttccaaggatccccttacgaagagaagctgtgatcagtataccactgtaggtaggaattttagaagtgaaaggaaagaggtctctgagtggccttaccttatggacagcataattggtggaggcaggggagtggttgtggacatgtgcactcgggttgtaaaaccaggggaaagaccacatggtacagtcctgtctttcaggcatttgggaggatacctgacaaaatgtttgacaaatattcttgagatggttgcagaaaggcgtcagttcaaggcagctagggtgaaggaggtacatcttggagtggacaagcctgctgcagagccacacaggcccccatgattgctaatttctgtccccaaagggacagaagcgggagagggatcccaaaacctaaatgagaaatgtgcatgtacttttatttttcctttccctttctctctgcagaaagaacagaaggcaagatctgtcaggcatggcctgcggtggagcctacctaagctggcggccaccccagctctgcaggatagttggtggagaaggtgaccactgttcagatgtgccagaggcagatgtgcacaggggacactgggccggccagcctgcttgcatatgaatcttcacctacagcagaggggagagaggctctcttagtgagccaatgctttcttcttccacctttgtctcaatctactttgtcccattctcctttacctcctctcttcctcctacaggttatgattcttcccagatgacaatgtggctggctgggtcaggaatcctatccaggaaagatgcggaggtgacctaattctcagagtaagccaggctggaggcctttgctctaggaagtgtagctccttggggtgtggctgcatcataggtgtgtacagggcttagcaagggatccaggcacccacaccatcgcctctccttagccccggtctgggtctgtgcctgttttatggcctcagtctggccctgcagctgcatcccactgcacccaaccagaacatgaaagtgagttcttggtgggaccctagcagcctcctcccatggagccgggaaggaaatgttccccttacttcccaaatggttgcttagtggaggagagctccagggtgcaggtggcaagatcaaaggatgactgttagttgtgaaattcacttttccagcttcccctgaacactccctctgacaggttatggaaacaggaaacctaccggaatctggagcatgaagcaaattcataggaagaatctgaacattaggatggaagttccagtgctccagttccaagaacagaagaagacccaagtgggggactttcttctctttgtccttctgcaaacc

SEQ ID NO: 315283 - DNA, 4001 bp, Homo sapiens
ccccactggtcctctaggcacataagggatgggcactcagcatctttcttgacatcagtgtcaaggaagcccatcttgacttgggccaactggagaagtaaggggaggctgttggttgagagacctggggcaggggagaggggactgtgagcctaaagtgctgggagattatatcggagaaaggagttcccttctaagcctgggctcccagtggttcatggactggaaatctgcctgcctctctcacccagcttcctttccacagcctcttccaacacaaatctccaaactgggatccagggaaaactaaacagaatccacactgccacaggtcctgtgtgtatgggcaggggttgggggggtgggtgggaggaatgtggcccctcctctgccactaaactagccctagtgtcctgcttcagtttgggctatggcatgttggcagagcagccattcccgatcttttccctctccccaccccagtactccagctgcccagagctggggagtgggggatgagtctggagggcacctctgtacccatccttcctggcacccagtcatgcgccccccacacacaacgaggggtagatgtgcaagactccagagctacccgaggcaaagcaagcaaatgggattcaattcgtatgggattcagttcgccctggagttttatctgcgggcatttcctatgataatcactctctgggccgactcccacagagaaggcaggggagcggcaggaaggaatgcggagccttcctgacagattccaggcgctccatagtgtgcccggactgggagcaaggaacatctccaaggcctctcatcgcgaatttgtcccggccaagcccctcagattcacgtcctttcagacatcaaacgcctgggcctttacaaaaacctgcttccgcgcccccggccgcgaacctctgctgcactcgcccgctgcgctctctgaaggccgcctttctaagccagcgcgcgtctccagccttggcctgggctcctgctcgcctaaggaaccaaagacagtctccaagctaggaggttctggcaccccagccagggctcccgccccaccacgagcccgggcggacctggagcaccggtggccgctggtacgcctggggcgagccggtgagggtagcccgaggcccggagaggtctttaagcatcgcgggtccgcctccctccctctcgagccctctttgttttccaaatactctaacgctgacgtcaccgggctggacagcaggctgcattctttctaagtgagggccaattcgtggctccagagaggattttccaaggaagacaaagaggaattcttggactagttgggggcaaaggcacctgtaacccccacctaaccaaatcagcccgcaggaccctgcaacttgagctccaagcggcgcctccatccctgtcccccgccacccccacccccgccgacctgcaacccgaaacactgtggctgttgtctccggagtcggccctctcccctctcccccagccccaagagacccgcgcgtttctagagccccgcaaagcccagcgcgctgcgctccctgggcagagcggcccttgccaggcactgcggctgcctcgaaagggcgcactgcgccccgaggacgctcgatcctcgaggctccgactcccggaaaaggccgggttgcgccgagactccagctttggctggggcacgtttctgtggcctcgcgcgctctcccgagcgccgagcggccttccttaccgctgcggcccgagggtgcccagcgcagtcagacaccacaacctccggctcggcccagctcagctcggcggcgaagatgtgttctcggccgtggcgccgacgctctggctgttcgcgccccagcgcgcagccccagggtcggcccgcgccggaggcggctgctatgccaggaatgtgagagtttcaggttccccctcgggatcaaagcgaaccacaaataacctctcagcgcaccgccctcctccgccctccgccttctcccgctccctcctcccggcccccgccttcctccggggaggcggcgctgctggccgagcgccggcccggcccccgagctccgttcctccgcgcccagcgccctccaggccgcggtgtgtccgcccctgccccatgctttgccttcggagctgctggagacaatttaatccaactctgcccattatcgcctccactcccagtcgccgacccgctctcacccttcatccctaaacccatcgacgggacgacagcaagggctgtaccacgcgtgtcctggggttgctgcgggaggggactccggctgtgtgtgtgtgtgtgtgtgtgtgtgcgtgtgtgtgtaccgggggaggtgggaaagggaggagggactgcaaagacatccatatcctctgggctgggacagtgccccgggctaagtgaatgcttccagccacagagcctctttcccctaacccccgctgttttcacccccagcggcaacctttgaatgcacttttgtttacaaacaccttcgccagctattttacgaccgtctcgacaggaagtgtgaatctgggttggaaaatccggtcaatttgacccacctacccaactgaatcacccgccgccaggcgctctgtccagttcttccccaaggtgataataggcgcccctttacgcagagtgcaaggtgtgccaccgctggcttttcgcccagtcatccgattcagccctgccaagcaccctccaacggagttctgttatcatccctgtgttgtaaatgaggacaccagggctcagagagcttaagcagcgtgcccagagtcacacacagtgagaaccaggtaatcaaccactgggctgcttggtttctcattctcaaaacccctccctggctatcagaatccaggctccctagatggacagggcagacactgggagccctcctctctccacttaccctgtccttgctttagtctcttctttacctccccctacacccctgccagccaggggctttcccctgtacccacttctgtggctcctgcatggaatcctctcctctgcccccaggacacttccactgctagatggaaaccccttcttcagaaagctcgctctgacacatgctgtccccgttccccatcacacaagccctctctacaagtcagttggggtgaggtgggggcagtcaggcccctgtccacccagagagtcagggctgatttctacccctggctgggtcctcccatcagcatggagtttgcaagtcccaaattcactggagggaaacaaggacaaggaaattctgcaagcttaattgccagggacattgttaatttttaataaaactcacaaaaagtgtgtgtgtgtgtgcgcacgtgtgtgttttacttggaagtcaaatactgtgtttcaaacagtgattggatctgagatgattgagcaaatggatcatttgtgccaagctacgggatatttgtctttccaaggatccccttacgaagagaagctgtgatcagtataccactgtaggtaggaattttagaagtgaaaggaaagaggtctctgagtggccttaccttatggacagcataattggtggaggcaggggagtggttgtggacatgtgcactcgggttgtaaaaccaggggaaagaccacatggtacagtcctgtctttcaggcatttgggaggatacctgacaaaatgtttgacaaatattcttgagatggttgcagaaaggcgtcagttcaaggcagctagggtgaaggaggtacatcttggagtggacaagcctgctgcagagccacacaggcccccatgattgctaatttctgtccccaaagggacagaagcgggagagggatcccaaaacctaaatgagaaatgtgcatgtacttttatttttcctttccctttctctctgcagaaagaacagaaggcaagatctgtcaggcatggcctgcggtggagcctacctaagctggcggccaccccagctct

SEQ ID NO: 315284 - DNA, 4001 bp, Homo sapiens
atgtggcaacccacaggacaaaagcttcaaaggtcatcttgatgatcgcaggctctcctaagtactccatagcaatgcccccaaaaaacttccttagcctccccactggatggacaaaaagcctgaggttgagggggtcacatgaatcacctggggatcttgttaaaatgaaggttctgattcagcaggtctgcagcagtgcctgagactatattcctaacaagctccaaagatgctggtttagagaccacactttgttgttgttatttttctttttagactgagtctcactctgttgcccaggccagagtgcagtggtgcaacctcagcttgctgcaacctcagcctcccgagtagctgggactacaagcacgcgccaccacgcccggctaatttttgtgtttttagtagaaacgaggttttgccatgttggccaggctggtctcgaactcctgacctcaggtgatccacccgccttggcctccccaagtgccaggattacaggtgtttgagtcacgtcgcctggccagggaccacatgttgaatagagaggggttaagcagaagggatggccagagagcagcatattaaccttggtttctggcctcctagcctgatgtagtaagactgggatattcccctccctacaaatgtctgtgtctctggaaatgactcagggattctgtccaagactgcaagccctgagaagctgtgtttgactcatctctgtgcccctaagcctgaggtagggactcagcccatttgctggctcatgactaagaaaactcatagagcagaaataaaagggcccacctggtttggtcttagctctgcaatgtctccaaccactagactctccatcagcttcacccggtcactaccaagtatcttggtctggggaagagattgaaagcctcaggccattgcaacagctacaatccaaaaggctactaagcaaggatgcatcctccctgccatccacagtgcagtccagcccacccaaagtgactaaccagtcttttggttctacacgtggcaaaggaccaccttctgatttcctgacctcccccagtcactctgtgtggggggactgccagggaactggacaggacctagcaccttcctgaaataaccccttttcaaaccaacatccagcccaatacatgagagtgggtgtcagccctggaaaacccgggacattaaggcacaccatttaatgggggcaagctagaaggatgagatgatgagaccctctgagctcatttccttggggccattgacctatccatgacacccccatgacctctagctcttctgagaaggctgtccttggaatccagttcacagcaaacaaagccaaggagtggaccactgtaaacagggaggaaggcctgatcagatggccagtgtgctcccctggctcacctgcagcatatgagacacgtcaaagagcgagcagtgctggcgtgtgtgcaggtgcgagtcagtgtgactgtcccggtactgcactggcagactccaacccgcaaacgccaccattttcccgccgtgggccaggtggaagtcatagagcggtgtcctgcggagcacctcctgtgggcggctgggcttagtgccaccagggccctagcccccagccgcttccctcccccaccctccaagatcagcaccctctatcccacctgtgcgcaactaagtggacgacacaaggccggggggaatgcctgcaggcgaaagcccagacgggccaccacacttacagccctctgcatcgtcgcctgcaacgagtgcagacggcgcacagaggccaccacactgccaggcacgccgggagatgtagtccaggcctctgctcggacaggtctctctccggagcaaaggatctgaagggggcgtgggcagccccaagggcaggctgggatttagagcagagaatgcaggaacccgcaaccacagggaagaagcctccagctctttcggctgactcttcagggcagctcgggcaatccagagctgattgggctgcccagaacaaagctaggggctagaccgccccctgcagaaccgccctgtctccagagggtcaaagttctggaaagggctgaaaggtctgaatcatacctttaggacctcaagagagtaaggtcaagtgggggtggggaaggtgggccagcctggcaggtaggcagcaccacagtagtctgtcctcatgtggacccctagttccacagctctcccaccaggcagacacaggcagccagcagtcatgcattccacaagtatttattgatcttactgcataccaggccctcagatggggacacagccacgaatgaagcatggtccctgctaccacaaggtcctcttcacttacacacacactgaggactactgcttcgtcacgctttccgaagcagctgagtggggctatgtaagtgaccttgcagatgaagtcgccacctgcaagaactcacaggtgagaacagagggtggccaccaaaaggtcactgaactcccccgagaaaactgttgagccacacacatgtccaactttccaggtccaagacatactgcagtactgctttgtaatagccaccaggtgcaaagccaggaagaaccagagggaaacaggtttttctcacatgagggaagagcagcctgcatcacttaatggttggactgagttaatgcaggacttaggcctcttaaaaggcaacaatgagaacccttacttggacccactccccaccacggttgatctctcattatgctgagcatatctcttggaaaggggcagggcgggcgcggtggctcatgcctgtaatcccagcactttggaaggccaaggcaggcagatcacctgaggtcaggtgtttgagaccagcctgaccaacatggagaaaccccatctctactacaaatacaaaattagccaggcatggtgatgcatgactgtaatcccagctactcgggagactgaggcaggagaattgcttgaacctgggaggcggaggttgcagttagccaagattgcactattgcactccagcctgggcaacaagagcaaaactcaacctcaaaaaaaacaacaaaaaaggagaggggcaactgggagaaaggatagagatgtgctttgggctatgtcagatggcagaagggtcccagttcttttttttttgtttgtttgtttaagatggagtttcgctcttcttgcccaggctggagtgcaatggcatgatctcaggtccgcaacctccacttcccgggttcaagagattctcctgcctcagcctcccaagtagctgggattacaggtgcctaccaccacgcccagctaattttttgtatttttagtagagacggggtttctccaggttggtcaggctggtcttgaactcctgacctcaggtgatccgcctgcctgggcctcccaaagtgctgggattacaggcgtgagccactgcaccctgcctagaagggtcccagttcttatgctcaggccctggttttgctagagacacgtgcccaggccctatgggcacacccacttgaacatatattcaggagccagctcagaaaccaagagactcaggctgcccaaatcttcaggtttccttcctaggcaggcagcagaagagttcagacaggaaatttctctctgtggcataacacaaatggaaagaaaaccactaggggacacacaggaagaaataaggtttctgtttcttcctcaagtgtcccaagtgccatggcagcaatggccttccaggtccatacatggagcaggttttagtaggtcagcccagcccaactgcactgacatgagggagcaggcagaagacaggaatgtgcatgttgccagaaggggcagagggcactcagggattctcagtaagtacaactgactggagtgtttttgggtagaaggaagaattgagttgcagccaggcgaagacagagcacccccatgccaggagctcatgctgaagtaacacggtaag

SEQ ID NO: 315285 - DNA, 4001 bp, Homo sapiens
ttcatgagctcctgtgcctaagaacgctgaggtttgggccaaggcaggtggaagtttttgtaaaaatggctcacagggccgggcgcggtggctcgcgcctgtaatccagcactttgggagaccgaggtgggcggatcacgaggtcaggagatcaacaccatcctggctaacagggtgaaacctcgtctctactaaaaatacaaaaaattagccgagcatggtggcaggcgcctgtagtcccagctactcgggaggctgaggcaggagaatggcgtgaacctgggaggcggagcttgcagtgagccgagatagcgccacgcgccactgcactccagcctgggcgacagagcaagattccgtctcggaaaaaaaaaaacaaaaaaaaccaaaaaggctcacagctgtcccccataggataactgcaagatatccctaacaccttggcaaaaattatacacagattggtgtgggaaagggtttacacccccatgacaaggatctcggcaaaagttaagcaaaatgcgccctgctacttctgtcaccggtgagccaggtgagggcttaattaatccagtactcaataattaaccgagtactacccagtggataactcaaagcaagacgaagttttggttatacttttgaagtccctgtcttacaagtgctccccactttcctgctgctactcctttgtccttgctgctctgtctcctgggatacccttctcactttcctcagctgatccaaacctgactttcggaggcccacgtagattttccacctttgtaaagttttctcaaatcactcgagcttcagtaggccttctatccttgaactcttgcttcttgtcctaacttaatctactaaacaagctaggtcagctttgtggtcaattgctcaggtattattgcctccaactgttacgtgtacattttgtacccatgattccttagtagatctttccacatttggtctcaatctttttcacctgtcccttctccaaacacctccaaccctgtcacattttccagccttgacagttaaaacccccttttccacatcactaatgccactcttcctttcaagataaacgcaggcgtcagctcttgaaggtcaacatcccatttccgggattaggcgcgaaggtgccttccctcataaggggctggaaggatgggaagcatcaagataatcaatgcccagggcacactgattatcttgtgtattaaagccaccgtcccaagtactcgtcacccagtacgaccactgtttcctgaacaaacttttcttactcacgtgacagtcccgatgcctgcaatgctctttgtttcttcctttttattccagtgaacccacagtcagtctaaaaatcttaggtcccaggtcgcttcctataggaggccgcctccaaaccccaggctgagtgcggtcccggtacccacccctccaggggtctcacagttccctaagcacagagcatggcaccaactggggagtctgtcaaacagcccagatgaatgtctttccaaacacgcggtgcctgcgtttccagggacagggacacgtcttatcaatttctatatattacagctttgtaaacataatatttataaaatcaaagcgggaaagccttgttccttgctagaaatgagcctcgcaggccaccaccatccgcaccgtacgacaggccgtccctcagctgcggcttcctgcctcaggcaggatgtaccaaacgtggaagcggagacggggaggtctgggggtgccacgcaagtccctttcctcccgacacgagtgcagtaaagaaaaacggttatgagcgtaaagtgacagcctcggccgatgggaatagggggaagtccgacactgagcaacgaacgcattcccgcgcctccaaaacctaggccgggggcgctggaaacccttaccggcacccggccaccgcggcagacgcttgctcctgccacgccccccccccctcccccgcatcacgtgtctgcactcgctttcctcggattcccggatgtgggtgagttcatttgctcgcgtgcaggggaagtctggagaaggcattgtttcaattattaaaagtgtgggggcagtgggcggaacaaacgcgccgactacagaggctggacgtaagcttagcggtggcgcgcgtgcgcagcgccggcccgaggtaacggcgggaaggctcaggggcgtgcttgcggcaaccctgtaaccgccggtgcgcaagttggaggggcaaggggctgccgtgtcctggtctggaggcggcccaggctgccttggtgattctggcttcgcggcctcatggcttgcggccggtttgcgcaacggcctgcgaaccaccaggcgcgtccccgccggcttgggtccgccccgaagcccagtccctcggcctggcccgctatgccctgcacactggcggagtctggcgtggcgcagcccggcgtggggttcggccccgccaggtggtcagcccttcctcggagtccaggtggctgggggcgcttcggagagtggccaggtgggcgagcgagctgcgcccagtactcaccttccccggcggacccaccttccttttcagcggagagaccccagtgcggcctccctgccagggctgctgtctagctagcgctgttgggactacttcattcacggcacaaggggacccgctcatttagtgtggcatgttaaggttggcagcttttaaaatagtgagttggtttaaacggttatgttagtacaagaggtacggaaatgtggcataaatcgtggactgaaattggagaaccctgaactaacggctccatgcacacaaatgagggatagaaagaaataaggacggtttcttaggaacactttaatcatggagatacttgaagacagtacatttaggcttataatgtggtttttcttacgtcccttacgacatcaggagagtaaagatgagtatgatgtcagagacaggtcgtcttttacagtttcagcaccgtacgctgatatgcacagagtagttttccctgagccttatgtctggttaaacttattaaaagaatttattattttaataaagcagtattgtagggtagatgccctgtatttatacagttcctcaagtgcttgcatttattttttagatacgaggaaatcataaggatcgttgattagatttctgttagctgtagcttaatgataaagtgtatatattttcttatttggcatgcagtaccatttttagattgatttttattttgagtttgctttttgactgtggcattatcagtgatcagggtagtaaaaagctctgaaactaaattagagtagagatttataaacaggcacactgccttttaaaatgtatgtagatgcaaatctaaaagttgtttgtaaaaattgtgtatgttgattgtactgatgccatttcctctcgttaaaatggtggaagacctttgcttagtcctttctgttctaatttatgttgtgctggcagatggtgacagcatcagtagtccactctgtcattgcttcctgctttcaaaaaatgtcaacttgacttgaaattcagctaaagccaacattgacagaaggtttcaggaactgaatctccgatctttatgttattttagtccgcctccccgcccccatcaggagctaggtttttcagttttacagagccacagtactgtcattacacatacacaaattaataaaaattctctaatgtcaatatccagtcagataacgatttcttcaactgtctcttaaatgtctttttacaattagcttgtttgaaccaaaatcccacagggatctgcctattgtgtttgggtgatgcacatttgacatcttttaatctatatttgttccctcatagttatagctatgggattagcccctatttttccttacagttctaaatttagcagattgcatcgcacagtatcctttaacatgtatctctgttgcctttgtgtcctctaaaccaggggccc

SEQ ID NO: 315286 - DNA, 4001 bp, Homo sapiens
ttcgcatagtccagtttagtgttatctcagtatgttcatgagctcctgtgcctaagaacgctgaggtttgggccaaggcaggtggaagtttttgtaaaaatggctcacagggccgggcgcggtggctcgcgcctgtaatccagcactttgggagaccgaggtgggcggatcacgaggtcaggagatcaacaccatcctggctaacagggtgaaacctcgtctctactaaaaatacaaaaaattagccgagcatggtggcaggcgcctgtagtcccagctactcgggaggctgaggcaggagaatggcgtgaacctgggaggcggagcttgcagtgagccgagatagcgccacgcgccactgcactccagcctgggcgacagagcaagattccgtctcggaaaaaaaaaaacaaaaaaaaccaaaaaggctcacagctgtcccccataggataactgcaagatatccctaacaccttggcaaaaattatacacagattggtgtgggaaagggtttacacccccatgacaaggatctcggcaaaagttaagcaaaatgcgccctgctacttctgtcaccggtgagccaggtgagggcttaattaatccagtactcaataattaaccgagtactacccagtggataactcaaagcaagacgaagttttggttatacttttgaagtccctgtcttacaagtgctccccactttcctgctgctactcctttgtccttgctgctctgtctcctgggatacccttctcactttcctcagctgatccaaacctgactttcggaggcccacgtagattttccacctttgtaaagttttctcaaatcactcgagcttcagtaggccttctatccttgaactcttgcttcttgtcctaacttaatctactaaacaagctaggtcagctttgtggtcaattgctcaggtattattgcctccaactgttacgtgtacattttgtacccatgattccttagtagatctttccacatttggtctcaatctttttcacctgtcccttctccaaacacctccaaccctgtcacattttccagccttgacagttaaaacccccttttccacatcactaatgccactcttcctttcaagataaacgcaggcgtcagctcttgaaggtcaacatcccatttccgggattaggcgcgaaggtgccttccctcataaggggctggaaggatgggaagcatcaagataatcaatgcccagggcacactgattatcttgtgtattaaagccaccgtcccaagtactcgtcacccagtacgaccactgtttcctgaacaaacttttcttactcacgtgacagtcccgatgcctgcaatgctctttgtttcttcctttttattccagtgaacccacagtcagtctaaaaatcttaggtcccaggtcgcttcctataggaggccgcctccaaaccccaggctgagtgcggtcccggtacccacccctccaggggtctcacagttccctaagcacagagcatggcaccaactggggagtctgtcaaacagcccagatgaatgtctttccaaacacgcggtgcctgcgtttccagggacagggacacgtcttatcaatttctatatattacagctttgtaaacataatatttataaaatcaaagcgggaaagccttgttccttgctagaaatgagcctcgcaggccaccaccatccgcaccgtacgacaggccgtccctcagctgcggcttcctgcctcaggcaggatgtaccaaacgtggaagcggagacggggaggtctgggggtgccacgcaagtccctttcctcccgacacgagtgcagtaaagaaaaacggttatgagcgtaaagtgacagcctcggccgatgggaatagggggaagtccgacactgagcaacgaacgcattcccgcgcctccaaaacctaggccgggggcgctggaaacccttaccggcacccggccaccgcggcagacgcttgctcctgccacgccccccccccctcccccgcatcacgtgtctgcactcgctttcctcggattcccggatgtgggtgagttcatttgctcgcgtgcaggggaagtctggagaaggcattgtttcaattattaaaagtgtgggggcagtgggcggaacaaacgcgccgactacagaggctggacgtaagcttagcggtggcgcgcgtgcgcagcgccggcccgaggtaacggcgggaaggctcaggggcgtgcttgcggcaaccctgtaaccgccggtgcgcaagttggaggggcaaggggctgccgtgtcctggtctggaggcggcccaggctgccttggtgattctggcttcgcggcctcatggcttgcggccggtttgcgcaacggcctgcgaaccaccaggcgcgtccccgccggcttgggtccgccccgaagcccagtccctcggcctggcccgctatgccctgcacactggcggagtctggcgtggcgcagcccggcgtggggttcggccccgccaggtggtcagcccttcctcggagtccaggtggctgggggcgcttcggagagtggccaggtgggcgagcgagctgcgcccagtactcaccttccccggcggacccaccttccttttcagcggagagaccccagtgcggcctccctgccagggctgctgtctagctagcgctgttgggactacttcattcacggcacaaggggacccgctcatttagtgtggcatgttaaggttggcagcttttaaaatagtgagttggtttaaacggttatgttagtacaagaggtacggaaatgtggcataaatcgtggactgaaattggagaaccctgaactaacggctccatgcacacaaatgagggatagaaagaaataaggacggtttcttaggaacactttaatcatggagatacttgaagacagtacatttaggcttataatgtggtttttcttacgtcccttacgacatcaggagagtaaagatgagtatgatgtcagagacaggtcgtcttttacagtttcagcaccgtacgctgatatgcacagagtagttttccctgagccttatgtctggttaaacttattaaaagaatttattattttaataaagcagtattgtagggtagatgccctgtatttatacagttcctcaagtgcttgcatttattttttagatacgaggaaatcataaggatcgttgattagatttctgttagctgtagcttaatgataaagtgtatatattttcttatttggcatgcagtaccatttttagattgatttttattttgagtttgctttttgactgtggcattatcagtgatcagggtagtaaaaagctctgaaactaaattagagtagagatttataaacaggcacactgccttttaaaatgtatgtagatgcaaatctaaaagttgtttgtaaaaattgtgtatgttgattgtactgatgccatttcctctcgttaaaatggtggaagacctttgcttagtcctttctgttctaatttatgttgtgctggcagatggtgacagcatcagtagtccactctgtcattgcttcctgctttcaaaaaatgtcaacttgacttgaaattcagctaaagccaacattgacagaaggtttcaggaactgaatctccgatctttatgttattttagtccgcctccccgcccccatcaggagctaggtttttcagttttacagagccacagtactgtcattacacatacacaaattaataaaaattctctaatgtcaatatccagtcagataacgatttcttcaactgtctcttaaatgtctttttacaattagcttgtttgaaccaaaatcccacagggatctgcctattgtgtttgggtgatgcacatttgacatcttttaatctatatttgttccctcatagttatagctatgggattagcccctatttttccttacagttctaaatttagcagattgcatcgcacagtatcctttaacatgtatc

SEQ ID NO: 315287 - DNA, 4001 bp, Homo sapiens
tgttcatgagctcctgtgcctaagaacgctgaggtttgggccaaggcaggtggaagtttttgtaaaaatggctcacagggccgggcgcggtggctcgcgcctgtaatccagcactttgggagaccgaggtgggcggatcacgaggtcaggagatcaacaccatcctggctaacagggtgaaacctcgtctctactaaaaatacaaaaaattagccgagcatggtggcaggcgcctgtagtcccagctactcgggaggctgaggcaggagaatggcgtgaacctgggaggcggagcttgcagtgagccgagatagcgccacgcgccactgcactccagcctgggcgacagagcaagattccgtctcggaaaaaaaaaaacaaaaaaaaccaaaaaggctcacagctgtcccccataggataactgcaagatatccctaacaccttggcaaaaattatacacagattggtgtgggaaagggtttacacccccatgacaaggatctcggcaaaagttaagcaaaatgcgccctgctacttctgtcaccggtgagccaggtgagggcttaattaatccagtactcaataattaaccgagtactacccagtggataactcaaagcaagacgaagttttggttatacttttgaagtccctgtcttacaagtgctccccactttcctgctgctactcctttgtccttgctgctctgtctcctgggatacccttctcactttcctcagctgatccaaacctgactttcggaggcccacgtagattttccacctttgtaaagttttctcaaatcactcgagcttcagtaggccttctatccttgaactcttgcttcttgtcctaacttaatctactaaacaagctaggtcagctttgtggtcaattgctcaggtattattgcctccaactgttacgtgtacattttgtacccatgattccttagtagatctttccacatttggtctcaatctttttcacctgtcccttctccaaacacctccaaccctgtcacattttccagccttgacagttaaaacccccttttccacatcactaatgccactcttcctttcaagataaacgcaggcgtcagctcttgaaggtcaacatcccatttccgggattaggcgcgaaggtgccttccctcataaggggctggaaggatgggaagcatcaagataatcaatgcccagggcacactgattatcttgtgtattaaagccaccgtcccaagtactcgtcacccagtacgaccactgtttcctgaacaaacttttcttactcacgtgacagtcccgatgcctgcaatgctctttgtttcttcctttttattccagtgaacccacagtcagtctaaaaatcttaggtcccaggtcgcttcctataggaggccgcctccaaaccccaggctgagtgcggtcccggtacccacccctccaggggtctcacagttccctaagcacagagcatggcaccaactggggagtctgtcaaacagcccagatgaatgtctttccaaacacgcggtgcctgcgtttccagggacagggacacgtcttatcaatttctatatattacagctttgtaaacataatatttataaaatcaaagcgggaaagccttgttccttgctagaaatgagcctcgcaggccaccaccatccgcaccgtacgacaggccgtccctcagctgcggcttcctgcctcaggcaggatgtaccaaacgtggaagcggagacggggaggtctgggggtgccacgcaagtccctttcctcccgacacgagtgcagtaaagaaaaacggttatgagcgtaaagtgacagcctcggccgatgggaatagggggaagtccgacactgagcaacgaacgcattcccgcgcctccaaaacctaggccgggggcgctggaaacccttaccggcacccggccaccgcggcagacgcttgctcctgccacgccccccccccctcccccgcatcacgtgtctgcactcgctttcctcggattcccggatgtgggtgagttcatttgctcgcgtgcaggggaagtctggagaaggcattgtttcaattattaaaagtgtgggggcagtgggcggaacaaacgcgccgactacagaggctggacgtaagcttagcggtggcgcgcgtgcgcagcgccggcccgaggtaacggcgggaaggctcaggggcgtgcttgcggcaaccctgtaaccgccggtgcgcaagttggaggggcaaggggctgccgtgtcctggtctggaggcggcccaggctgccttggtgattctggcttcgcggcctcatggcttgcggccggtttgcgcaacggcctgcgaaccaccaggcgcgtccccgccggcttgggtccgccccgaagcccagtccctcggcctggcccgctatgccctgcacactggcggagtctggcgtggcgcagcccggcgtggggttcggccccgccaggtggtcagcccttcctcggagtccaggtggctgggggcgcttcggagagtggccaggtgggcgagcgagctgcgcccagtactcaccttccccggcggacccaccttccttttcagcggagagaccccagtgcggcctccctgccagggctgctgtctagctagcgctgttgggactacttcattcacggcacaaggggacccgctcatttagtgtggcatgttaaggttggcagcttttaaaatagtgagttggtttaaacggttatgttagtacaagaggtacggaaatgtggcataaatcgtggactgaaattggagaaccctgaactaacggctccatgcacacaaatgagggatagaaagaaataaggacggtttcttaggaacactttaatcatggagatacttgaagacagtacatttaggcttataatgtggtttttcttacgtcccttacgacatcaggagagtaaagatgagtatgatgtcagagacaggtcgtcttttacagtttcagcaccgtacgctgatatgcacagagtagttttccctgagccttatgtctggttaaacttattaaaagaatttattattttaataaagcagtattgtagggtagatgccctgtatttatacagttcctcaagtgcttgcatttattttttagatacgaggaaatcataaggatcgttgattagatttctgttagctgtagcttaatgataaagtgtatatattttcttatttggcatgcagtaccatttttagattgatttttattttgagtttgctttttgactgtggcattatcagtgatcagggtagtaaaaagctctgaaactaaattagagtagagatttataaacaggcacactgccttttaaaatgtatgtagatgcaaatctaaaagttgtttgtaaaaattgtgtatgttgattgtactgatgccatttcctctcgttaaaatggtggaagacctttgcttagtcctttctgttctaatttatgttgtgctggcagatggtgacagcatcagtagtccactctgtcattgcttcctgctttcaaaaaatgtcaacttgacttgaaattcagctaaagccaacattgacagaaggtttcaggaactgaatctccgatctttatgttattttagtccgcctccccgcccccatcaggagctaggtttttcagttttacagagccacagtactgtcattacacatacacaaattaataaaaattctctaatgtcaatatccagtcagataacgatttcttcaactgtctcttaaatgtctttttacaattagcttgtttgaaccaaaatcccacagggatctgcctattgtgtttgggtgatgcacatttgacatcttttaatctatatttgttccctcatagttatagctatgggattagcccctatttttccttacagttctaaatttagcagattgcatcgcacagtatcctttaacatgtatctctgttgcctttgtgtcctctaaaccaggggc

SEQ ID NO: 315288 - DNA, 4001 bp, Homo sapiens
attaagacatagtaaagactgaaatgttatctcagcattcaaaaaagtaaaaacgaaaaatgtgcattttatacaaaaatactgcatcatatctacacacgtattgctttaatttgggtttgtaaagaaactattggaaatttacatctattcttaaaaaacaagatttatactactagttcagtagaatatagtaaacatataaacttacatatcttaccaatacatttccagaaggtggagaatgtagggatttattttcctgtggcaatttagaaatgaatgcaggagattcatcttctacctcctccaaaacaacaatacacactcgactcattcgatcttttaaaacactaaattccaagctatgtgataaaagtcacagttggaagagcacaagtagtttttcctcctcttctgtacaacacttacaaacattctctgaacagcacagctgggttttttttttttttaaagttaataagtactactggaaaaacaagtttaaaattatgactacataatttgtaacttcctaaatataacgaaattctattatttctgttggattactgcaatacttaagaagaaatttcacaccaacatgtcaataactaaaactgagtccaagctcatttaaaaatatttttcctctaccaaaatagtcttattgctctatctctgaaatttacttgcacaaaacaatcattgtttttggtgacacaacaccacacaatatagaatgaaatgagaaacaactgctgtgacagagatgatcacagcgatacccactcttgcctgcaaggtcatatagttaccagtagctgttttgcttataattgaaaataaaaaataaaatctcactattctgtttccacttctaatttgtcttcatttcttcatcactggtttaatgcagatactattcacagaaaaaagatctagagctcagcacaaatcctgaaaatgaagctcagaggttaacaattctttcagtgtttgggaaaggggcaaaaaacaaaaacaaaaaaaaaaaaaccactctgcattaatagcaaagctgcagtacgtttacatgtgatgagtcagaccacaagagacaatacgactcttggtactagaatacagcttgattaatccaggtttcccatataatagaagaaacacagttagctttattcccatcgatagcataagcaaggcagagcgttcattctttctccatcaggcagttgtctgtggctgctccagcaaaagggcacaggcaccaggcagaaatggtgttagtggagaatcctagtagaacaagcaggctgtgaaggaattagaaggcatttgagctcaaattactgcttcaggctttttgttttctttaaaaaaaaaaaggggggggaaaaacatagtagtgtatcattccagtgtttcctttgatctccacatgaatacagcttccattaaacagtcttcattcagagaaaaaaatagcagactgtgcatcttctttgagccaactactttattcagtcatctgcctctttgccaatatagtttccttccactgtgaaaaccgccacagttatccttttcagatttcaaatgctttcctgttcctcagatgatcttgcaaaacaccactgacatccccaaatgagtaggtccttaaaaaatatctatagaacctcagtatcagtcccacagaagcattccaacggagcaacagtctgaagagcaaagactgcagacccacaggatgaaatgcctagtaatgctcacatgttacacttaccagagatctgagctacttctcgggatgtaacttcctctagcaggagaaaaaaatagtgcatttggacagccttcacaattagaaggttcatgccagttctgtgactaatccaaatcaaactaaaaaattctataactgaaaaatgagtgcgcttttaacattttccactaaaagccacaaggaaatctggtgtactgcctctgctgactaacagtggttttagcaagtaaacaattccaaacggcttaactgctttcgtgtgttacaataaagcaaatgtttaaccctataatgacagttgcagtaagaatatgcctgcaatggactcataaaaaaggtttaaagatggagaaatattttattagattataaaaaccatgaaattgttttattcatatttttaccaagatcagttttaatctgccaggtgtattttattttctagaatgcaaagcttaaacaaatgaaatttaagattgtctaacaatttctaaattggtgaatttaatcaatcattgattcatattttaaagggaaaagcaaaaatttcataatgtagaaatcctaactctaaaattatataaatcatttgatttttcactgaagaaataaaataatcctaccttcccatttggatagggaataaagccttaaaaatctgttaaagaggtacatgaaaaaaaaaatgtccttcgtcctgaattacctatgtcaaaagggcacagggtaatacaaataatctccctccctataaatttcccaaagccataaataaatgtcaaagccaatcatttcatcgttttttttcttctttctctgtttacccaacatgggggatatttctcaagagaaaacttacaaagaaaataccatggtcccccttcaatctgtgttcttcatattaactagcatttttattaataaacaataataaacataatagttacttttgaacatctgtgatatgctatgtgctgtacattctcatttaatacaataaccttgctgtattcccattatagagggaaaaacagactcagaaatgatgtattttacccaaagttgtataaattaataaagttgtgtgttattttaaacacatactctttctaatctattctgctatcactgagtacacacacatacagacacactctcttctctccactcatctccagatctttgcaacctgtaatactagcttataaaagtgatcttaacaaacaggtaacctataaaggttgtgaaaagtttaggtaacaaaggaatatactatttattgctatattctaaaacgagttatttttaaatgggtacttcaaagcaagtcttaaaaccataaaaaggaaaaaaaaaacaaaaaatcccagcatgatacaaatataagaatgtcagaatttaaaacaagaaccattgaaagctataaaatgtatcaatctatggaagaagcaataactctaacatatttgtaccaattaaaacatgctaacaattcattagttatattttaaaatatataaaatacttttatgccaaattaaaggtatgtaaatattgaacatacatcaattatgttatccatctccacatagctgaatcaaaaaatcttaatatttgaaatatctgaaagtgaaacaactatagtaacaatatcctatatttcatcttcagggttcccaagcccacaaagcaaaatctctttttatcttaacaatcttaacttgttccaaagtatctagtacctaagttcacctacttagacttaagcaggtacatcctgtttcttgttctaagtcaacctccacacttaggtctttcccaaccagaaaacaaactccttgaaggtagggactgtgttcatacatattgtctccttccactttcttccacctataaataatttcattgaaatgaattctgtcgtcacgagactctggaagggtggagatttataaacaagaatagtgggggtgtgttggtatacatatattttaaccagaaaatataggtggcattaaggtgcaacaaagtgagtttcatatctctaataagtgaacaattaaaatttcagaagttgacaggatataaaacaaaggtatggggtgatggttaaaactaagggctcaggagtcagcccacctgaagttcaattctgcttccatcatttcctagctgtgtccttggacaaaccacttaaattccctaagcctaaatt

SEQ ID NO: 315289 - DNA, 4001 bp, Homo sapiens
attctgaagagggaaaaagaaacttgtgcatagtatatagggttcagtactatctgaggtttcaggcatctacttgggggtcttggaacatacctcttcaaaagggggtactactgtatttgcttaatatgcataaagaaaccctacaggaatgctaagatattaatgagagggggtgcttatacgtttgtgttggtggtgggaggcacattgaaaactgggcatatggaggtactagggtagtaatgcaactttatattatacctttaaatatgtatatatcggccgggtgcagtggctcacgcctgtaatcccagtactttgggagaccaaggcgggcaaatcacctgaggtcaggagttcaagaccagtctggccaacatggtgaaacccaggccctactaaaattacaaaaaaaaattagctaggcacagcggtgggcgcctgcaatccaagcttccaagctactcgggaggctgaggcaggacaatcacttgaacctgggaggtggaggttgcagtgagcctagaccgtgccattgcactccagcctgggcaacaagagcaaaactccgtctcaaaaagaaaaaaaataataaaaaataaaaaaaatcatgcatttcttctaagagcctaatcaaatgtttttaattccttggaaaataaaggtcaactatatgagaaatcagggctatatctgagggcaacaatgaaacaatattcccccaccaacattagttaacatgtgatttacaatataaacagataaatatgacacagtaatgtacactacaagagcagcagttggctgtgttcctgtaaaatgaaaaagagtgtaaaagcaacaaacatagcagcacatttcagatggttcagattcccagagctcatgtcagtgggctgtctaaagctaaatagagttctgttccacacagaatactccaaagttatctatatattcatatatactttaaacgacaaattcattctagaaatggaaaagacatttccagaatatagttaactagttcaatagctagttggagtattaaacaccagccacaacagctaataatgaggatggagatacaggggaggcagggagaaaccatacccacttaaaacaaaaaacagtctttgtagagagaaataaaaccaaatgtcgttaaccgcctctggtggcataatcacatgccctctacatggtagaagatagtatttgtggtttataaggatgaccttaagtaaccaacagaagattaatttctttactatttcctactcattaagacagaaaagaatataaaacagcagtcccttgtcatttgttgaagttaggttactggcatagcctgtggtgcgaaaaagcactgctaagaaacaaaagacaacacacatagcaatttaagaaagataccatcagtgagtactataaaccaatatttacagaaaacttacatgccagaagcacctcattaaattcaaaatggttatgtccaactgtataatcaatattttaacaagtcttttcttgtcccccacaaatctatgcataccaactgaactttcccttcagataaacggccagagcctatcctcacacatatatctgaatttagattcacctttctagagtagagatgtgactgagtttctgatattacatgcaataaataacacaactaaaaatcaactgcaggatcacctaaacaggttgtatccatttcataccacagttatagattatataggaaaacccagctaatcagtttcctctcacccaatctttacacgtaatatttcacccatataaaagtgcactctgaaacaatagttttgtaaaagaaaaggttacctaaatctagaattaaatgtctagctattcggaaataaaacataaattcaaaaacaaaaacttgatttacttacttacattagtctagggctctaggcagccagcaatgcagctgaagagaggtctaacgttgtgaagacacagtcatgggttagtggaaggaacactggagcaggagagatacgtgatctcataatggctgtataactagttggctgtgtgacctggaagtgtttcctggggcctgggtcttcattttgcaaatcataatccctgctcctaggctgtgtgtgtggtgaggtgagggggaggtggatatgaatatgtatggacaggattgggtgaggatgggccccagatttaaacaacaaagggcactctttctgcgaagttctacagtcagcaattctattaggagtatcccatttgactccagatttcattctgcaagacaactgattgacttattttctcctaatctaattggtcactaaattcttccaattctttgatttttgaacctcaattacagctgacccttaaacaacactggttcaaactgcatgagtccacttatatgtagattttcttccatctctgcaaccccagacagcaagccctccacttcctcttcaccttattcaatgtgaagatgacaaggatgaagatgtttatgatgatctgcgtccattcaatacacagtgttttctctttatgattttcttagtattttcattttattgcttattttattgtaagaatacagtatataatacatataacatgtaaaatatgtgttaactgtttatgttattagtaaggcttttggtcaacattaggctattagtagtttttagggagccaaaggttatattcaaagttcctattgtgttggggttgggggagtcagtgcccctaacctccacattgttcaagggtcaactatacctgtaaaataaagcattgtgctaaatcatccttatgatccatttccagttataacgttctatcctattttggaatattcagaataaattatgtcatacttattaaaccttgtcaaatggtctgaatgtttgcgttcccccaaaatttatgttaaaatcccaaccccaatgtcatggtattaggaggcgaggtcttttgtgaggtaattgggtcatgaaggcagtgaatgggattaatgcccttgtaaaagtggcccaagagcgctccctcaccctttccaccatatgaggttatactaaaaagactgctggctataaataagaagtgggccctcaccagataccaaatcttctggcatcacgatcttcccaggccccagaactgagaaaaatttttaagtcactcagtctgtgatattctgttatggcagcccgaaaggactaagacacctcactctaacattaaaaagatctatgttaggggtcttcaaactactatccacaggcttcaagccacctaatttgtaaagttttactggaacagagccacatctattcaatttaaatattaaatatgtagctttcactatgacaacagagttgaatggcctgtaacttgtatcttgccagagtctgtatggcctgtaactagtatctggccctttacagaaaacgttagccaacctctgatctaggctaagaacttgatagtaggtactattaaagttattgctaactttatacatgtttgtaataattataaatagtctcacaaatcattttccaaaacttctatttgcagagaattgttttcttccttgctcctaaatcacagaggagatagtccataaccagtgagctgggccagaagctaagtacttttatccctcttcccaaactggaaataatgcttttctttggctacctaacagtgcagtggcaaaaggttcagattcggttttcaggctcagagtagaatgagcaaaaaccaatgacatttccacttttccaactataatgctgaaaaaaatagctgctgcactgtatcttttaagagtgttgtggataccagctattgtgggtttgttcaactcccaacccctggcaactcagaatatgactttaactggagatagactctttacagaggtaattaaaatgaggtcattagggtgggccctaatacagtatgactggtgt

SEQ ID NO: 315290 - DNA, 4001 bp, Homo sapiens
agtgttgggattacaggcgtgagccaccgcgcctggccgcaagtggcattttaaagttcaatattaccactgaagattaatggatatacataagactggagtggcatcacaattttctcacaactgcaattccaaaataaaatccagttgcacttttgcttaacacaatcctgaaaaacacaatcctgtttctgttaaaacctaatggtgaatcaaatatgagtctctcctaaaagttcaccaaatttctaatgcacatagtaatctaaatcacaaaaacaactttgtcaaaaatgcaggactagaaacaaaggaaaacatcgatcagtcattacttcaaccattaacaatggaagcacaaagtgccatttgactggtaaaggttactggaaaacccagatctcgagtttcacactgttaagagtataagatgcacggactgtactggaattagcagaaatggttcctgctataactgtgctttacctgctattctctaacactgctgtccagtagaactatctgaaatgagataaatgttctatgtctgtcctatccaatacaatagccaatagctacatatgtctactgagcacttaaaatgtggctagcaaaactatggaacttggtttaatttcaattaaattgctacatgtggctagtggctctcttataggacagaacagttgtataatttgaaatacaaggtataaactgtattgactaaaccgtagtttttcaaagtatcatgacctgatgttaacaccaggcaagaccattctgatacctaatgatacacaaggtctgcgatcagcctaaacataaaattcacttatgaaatgagaattcttgatattagattcagaatttaaggtgcaatctttattaagtaatataaaaaatagtctcaggttcttccccattgttttcgcaaacggggtgctcactttcaaaatagttttccaaaacatccaagttattttcccttcaaatctgttcaacatcttctgttcaggaaaacaatggcaaaaataagttgtcaacactagtaagtgtcctgcgacaaattaatgtgtaaatgtcacacattaattttccttttccttaaaagagggggaaaatgtttggcagcgtccggatccttcaaaagccttattacccatctttccaaatgtttaggtgtacaaaacattcagatacagttgcgatttcgttcctagatacaaagtagtttttcagttccagagaattacaagtcattttgacttgtattctttgaccagctcttcataagtcaagaaaagtaacaagatggtgcacaaaatgtcaaaagaaaacaagtctggaaacttgcattgagtaactagtcgctaagaggaatcaattgcctttaacccggagagagagtccctcgcactacccagccaagcaaacagaacaaggtcgtgaccctgggtcacggccgccagtaccgctcccgcccggcagcggggaagccacctgttaggcccgagcctcacctggcaggaaagaggaagcgattgcccggcagctcgcccgacgcgagggcggtgagcgtggaacccgcccctcttgctgcagcggctagacccccgtcggcacgtgggcttcacccaggccccggcagctctgacaggcgggtcgcccgcggaccccggcccgccgtctcgcgcaggtccccggggcaggacccccgtttccctcgcaaccaccccgccgagcgggcgtcccagcggcccacaccgccggtccgccctgcttcccttccttcccggacggcgcgatcccgccctgcagcccctcacctacctggtcacggagtttgaggaacgccatggcggtcgcctccgcgcccactccagcctcctcctcctccgccgctgccgctgccgccgccgaccggcccactgctcccgccccagtagccttggccgctgcccgggaccagcgggtccgcggccgactgcgctgagaagacctgcgggcagggggcggcgccgcctccccggccgcccgccgccgccgccgccgccgccgccgccgagaggtgaggtgcccggccggtcccgcctcctcctctgaggactccccgccctcttccttcctttctttctccttccctctgctgcctgccctacccgccgctgccgccgccgcctcctcacgcccccttcccgaaataccctggcagcccccgcggccgcgccgttccagcccgcggcagcggcggcatccaaactccacaatattaccaccaccgcccgccgcgattggcggccgcgcgggggagaggccagagtaagccgagcgcccattggccacgccgccgcgctcgctggtgacccccccgcctaccgcgacgggaggggcatgcggaggaagccgcaagggtgggcgcggggccgcggctcgggcggggcgggggagtcggcaggggtgcgggccgggggagggcggccaggtgtcccggctcccaggcgctgccgcctcaggcgtggtaggcggagtccggggcggaggtggcgtggggaggtggggaacggcccgggactcgcacgtggaggtggagcgcggacgcctccctcagccagggcaagactaaggagctgggtgagggaccggaagggctggaaggggtgggcacctgggggctgcggcgagtggcgatgggcgagccggacttgcacgtggagaaagcgtgagaatgtgcccctgggtttggggagggtggggagccaaggagtgggatgagaggtggtcacggaatggggggcgctgctgtcctccccgggggctgcaggccgagaccgggtgaggggcgggggtgatgctggcactctggacggaagggcgtcgtcttcgcagccgaacaggttgtggacgcccaatcgtttttctgcccgtagtcccaatccgaagctaagctgtgtggttttcccttgaaagctccccagccaggcttgctgcctccacccctttcgcatctgaagcattttgcctcccactcgagagaaatcaattttcttaaacaaacaaaaaaaaagatgtgcaggatttctaataaatagcatccttggatggaggagaagaggaatgactccctcatcctgccacacacacccccacgccaccccgcagctctgaaacggcttttctttcttagccagccgcacgctgttgccattccaggctcgtgtgggagaagattgttgtgcgcctgggtctgtccgcccgggcggctccagcctctggtttataaaaggtgcagatggttaaaacacaaacgtgtgacgtcagggtcggtttttaaaagtctcttctacccactacatcagttgtgtctcttgggatggactttagagaatcgattcgagcctaatggcagtctagagaaatggagatcttcgtcaggactatcagattattgtaatgctgcacttataacaaaaaacttagatttagccacgcaaaaaaaaaaaaaaaaaagaaaatagagtgcaagataaaaaaacacacctgattaactgatagtacgacccttccaatattctttgagatatccatgctatggttccattgaaacaatttcttacctaaaattatgtccctcgtcatgatattttctacttaaaatggaggaattctcataactgtgatctaaccgtcataatgaggctaaaaaggaaatcaaactgctcttgctttgcattctcttcagtagctcctttaccctttatttcaactccagcagataaaatagagatactatttgtcacccaacccctccttatcagttcagtgagggtgaatgagttaatgtcgtgaaagcacttgagttctccaaaacaaagatgttgtgataatattactacagtactttgtgattacaagttagctttgtaaataattaccaatgtgccatatccagtcgtgttctatcttggcctaggagtgttaggatttaccctcatttataagta

SEQ ID NO: 315291 - DNA, 4001 bp, Homo sapiens
tcagcaagactccaactgtcctttagagcagctccagcatacattaactccagataccgcctgccttgtttgtcttcagagagaggaatgtggaaataatccttaaaaatcaatagcatattatgaaaacagtacatccttacgttactagaccagaaatgtactctctttccctttacatttttttcctctgggcattataattgtttgggacaaagggaagaagtattaaataggggttcttaacttagagaacttccaaaacatttatgggtagaatttagatgggaagaaactacatctttattttattaactctaaatgaaattgagattttctttcaactatacatgtaggcagcaaattaaagtaggagtagtcgctgtacctgtgactgacaccaatagaagtcacagatgttttcatatcacattatagttgttgcaaatatttcaaaatattatttctactgatctgtattttgaaaataatagttattagatgagctgctagaacttgttagttaatgtgttaattaggaagtccacatgtcactatatcatacatttgctttttaatattggaaaatgtatttcaatataacaaatttcatttctatcatatctgttttattttatgcatttaaagacattctgagaagcagtctatagacatcaccagacttccaaaggggttaataaaacatagaggttaagatcccttgtgttacaagatttagatttcaatcatcataataatctactgaatatcatgtaactatggttcagtaaatgccgcttagcaaataggaatgaccatctccaagttaaatatttgatgatcagaaactaaatattttgcttaattttttattttagagtgaacatttatatgaaatttataaggaagatactatacccaagttatttcttattctggctctgtgatcctaggtaagatagtcaacctctcagagcttcagttttttctgaatgcaaaatgaagccatagctcacaagttctctaaagtcctctctgcttccaaaatcttctgttctttgtagttgtttgctcaccaaataagacatttatctgatgactggcatgtcccacgtatatagcctgaagttggtgtcttgctttggtccttttatgaagaattgcaataatattatctggcctatgcacaacccacacattccctaaaaagaagtcagactttttttttttcttgataattgactggctctttttgctttcttgtccaacactaccagagttactatcttcttataaatctattgtgtaagcaaataatagtattttcaaatagttttcgttccctgtttgctgaaaatgtacccaatagcatctctaccctttgtacatttttaaatgcactgcattgttaaaattaatatacattttggtggtttgggaacgaagtacatacctttatcatcagcttgacaacctccacagtttcatctgctgaaacatcaaacggttcaaaagatccttcaaaggcgatgaaaatcctcattgtacaattaccttttcaaacaaaaaatatccaactttttcaaagattctcctggatggctagaaaaattccggttcacaattaaggacaaaaatgatagccagaggcagctgtcactgtctagcctcaaaggtaagttgtagaatgtgaagagcctagtcccacagtgccacagtatcaggcaacacagacaccagctactttggaggaaatatttatctgcggaaggcagtagtcaatagccaccttattcctatattacggaaaccagcaaacttgacaatggttgaggcaagtatggacaagcttcaagcatgtgatacaaaaatgctactcataaattacacttttgtgatgtggtccccatcaactgactcctgaattcttatttacataagtacagctgattgaagaacccttaaaaatagatatttgattgggatgcactagcacagggtgaagcaaaacaagagttgattttattgaatgtgataatcctgaaagttctctgtaaataactcttgagctgaaacattctggtttccataacaactttgtgtacttgttctctggcagtatttataatcctgccacagggtacagaacaatacccacttgcaccagggagatgaatgtgtaggcaaatcattctgtggctttcttttctgatttctgtgtcatagaatctgctgagtagcaacacaatatagttggtattttctttaatccttgcctttatgttatttagaacaatttcccattgttatctccttcaacccccacttagtgttggtggaaaatatttcaaacccgctcaataagcgagcaaataagctgaacatggtggcacatgcctgctatcccacctactcaggaggctgagatgggaggatagtttgagcccagaagtttgggggtgtaatacgttgtgattgcacctgcgaatagccactgctttgcagcccagggaacatagcaagaatctgtctcttcaacataatagaagaaaatactccatttataaaaggaaagataatgtattaagaataaacttggctgggtgcggtggctcacgcctgtaatcccagcactttgggaggccaagttgggcagatcacttgaggtcaggagttcgagaccagcctggccaacatggtgaaaccttgtctctactaaaaatacaaaaattagccaggtgtggtggcacatgcctgtaatcccagctactctggtggctgaggcacaagaatcacttgaaccctggaggcagaggttgcagtgagctgagatcacaccactgcactccagcctgggcaacagagtgagactctgtctcaaaaaaaaaaaaaaaaaaaaagaaagaaagaaagagaaagaaagaaagaaagaaagaaagaaagaaagaaagaaagaaagaaagatcttaacaagaaatgtgtaagagccgtataacataaacataaaatacaatcaataaacataaaaaagggctgaacaagtggcaggtatatcataaccttggatggaaggttcaaaattatttaaagtcatcaattcttcctaaatttatctataaattaatattatctcaataaaaatacaagcaagattttttttgtttatgtaagcaagatggttctaaaattcatgtagagaaaacaggcaaggatagctggaaaaactctggaaaagaagagtaatgagggggcagtcacctactagatgttagaatttaatataaggctacagtaattaaaacaggatggtacaggcacatgaagagtcagaaaaatcaatgtaaaaatagaaagcatagaaatggattcaaatacataaaagaatttagtgtatggtaaaagtgacatctaactaatcagtggaggtggagtgggaaaataagataaattattaatagtgttggattaaccaggtagtcacctgaaaaaaacactggagacttactttttaccttacagcaggagaaattaaaaatgactctaaaacgagtttaaaaatttaaatgggaaaaattgaatcatgaaaactttagtcttcttacatttcatgagatttttcaatcatcttgagtaataagacctttctaactgtgacaaaaattcctaaagctgtcaaagaaaacattgatcaattcaacttttttttaaaaaaaatctacatggaaaagtaatttgatataaagccagggataaataaagttagaaaaatatctgcagctgggcatggtggctcacacctgtaatcccagcactttgggaggctgaggtgggcggatcacaaggtcaagagatagagacaatcctggccaacatggtgaaaccctgtctctactaaaaatgacaaaaattagccgggcacggtggcgggcgcctgtagtcccagctacttggaaggctgaggcaggagaatcacttaaacccgggaggtggaggttgcagtg

SEQ ID NO: 315292 - DNA, 4001 bp, Homo sapiens
gaaaaaggcttagtacagctctcatgcaagccatgacaaatatatccatttgaggaacactgatttttcacctccaagcacagtactaggcacataactaaaactctaatatttaaaaaaagaatgaatccacatgatgaatgattatacaagcattttcaaagatgtttaagaagaatttgatccacaaaaatgctaagtgagaaaatgtaaggtggaaagaaaaagcaaaagtatgaagtaatataacaatattaccccaattaggtaacaatactaccctaattttgtgtacattcatatacacaaaaatacaaaaattaggaagaaatgcatcaaaatgttattacatgtggcaaaactacagattttaattttcatccttataattttctctgtcttccaagttgtctacaatgaaaaaagttggccagcacagtggctcacgtctgtaatcccagcactttgggaggccgaggtgggaggattacctgaggtcaggagttcaagaccagcctggccaacatggtggaaccccatctctactaaaaacacaaaaattagccgggcatggtggcaggcgcctataatcccagctactcgggagaatcgcttgaacccgagaggcggaggttgcagtgagcagacattgtgccactgcactccagcctgagcgacagagcaagactccgtctcaaaaaaaacaaaaagaaaaaagtttcagtgggtttaagtgcatttacacacttcaatttatcaagacttttctatgcccttccattattttagatctttcaaatttcattcatctgcaactctacgattctttcagcaacagctgttcagaacagatgatttactttccatagcgaattttaaactgtttatcatgcagaatgggcccttagaaaacatctagtcctctagatttgtatgactttaaattaaaagtagacactacaaagtggatttaaccgctttaaaccccacaggattagatttaaactccgcaggatttaaggcaatatgatacaactgtgtcttgagtctgaataaacctcagctgcactttttaagtctgggatctccatacaccgtcctgctggaatataaggttttacagaaggcagcgcacaccaatgctggtgctgtgaaggcacccacaaaatcagacgctgcctataggggagaaccccattccatccacgtttctcaggtgtcccaggcactagccagacaggtatctattatttaaactgtacagtatgtcccagtcaaaagcctggaaactcagtcacctcgatgtgagcattatcctgcaagcccgctccggccaaacctgcttggagacagcctagtccgccctgatccccggactgcccgggaagcaagaaccccgggacccgcgagctgacccttctaaaaaccacccttcactccgctccgccgaccaccccactcactgcctccttccccaaagcgctgaggcccccaacatcctccatcctgacttcaccagccccaaatttccgcctcaccgcctttctctcaggactcaaaccctcgccccagacccataatcccctccacaaacctctcccctcccctgcgaccgccgctccccgcaacaccttcactcgtccctgcccccacagcccccgcgcccatcctggtcccacttcccatccccaggggtgctggcaccgggaggcggcccgggaacgcagggcggcgaccaggcggagctcctggagcctgcagcggccggggctctgtggctgcaaggggccgggctctgctgcggacagctggggggtccgaggtgccctccccgactcaccagccgccgcagcgctccacgtcttcggaggcgggtccgagagccggcgagaaccggaggccgggcgaaagagtgctcggtgcggggggcgggccaggccagtggggcgggcgccgccgagcgctgggcgtggcggacgcggcggggcctagatgcggtcacacgcaggggggcggggccgcggcgggagaggcggggcctcactgggcggtagctccgggaggggcggaactgcggtgggaggggcggggcctcactgggcgatcgtagtggacgagaacctagactggaaccggtccgaagaaaaaaaggcagccctcattgggctgtcgcctggaacaggagaccaggccgggagaaagggaggggcgtgcctaacgtactgtaccacccatcgaaatccggacggcagcgggagaggcgcggccgagaaggcagaggcctggttgggctgtcactccgagccggggcggcatgtggctgggctctccaaccgcgagcggtcggggcaggggaaaggaatacgccccttcacatttccctcttccatctcttaaagaccagaacctaattttctggtcactttcaggtataagaacaagtctcattttaactgtagctcactttcaagttgtgaaaaacgcagatccttttataattaaaacctaacatccaaccacagccaaatcccaaaacccttgctcctcctagaaatcgccagacacctttccacctccaggctcagagtctgccccagccattccttctgcccagaaagctcttccctcggttggctgcttggctcacttcctcacctccctcagtgtttgctgggctctcactttctccctgaggccctttctgaccatcctacttaatacctgttctcatctgctcctcaccccaccatttccttacctgctctcctatttcttctgtccaccacactttttgactttttgttgttgttgttttgagatagagcctcgcaatgtcacccaggctggagtgcagtggcgcagtctcggctcactgcaacctccgcctcccgggttcaagcgattctcctgcctcagcctcctgagtagctgggattacaggcgcgcaccatcatgcccagctaatttttgtattttttgtagagacagggtttcactatgttggccaggctggtctagaactcctgacctcaggtgatccgcctgcctcggtttcccaaagtgctgggattacaggcgtgagccaccgcgccctgccggctttaagtgtttttagttacccagggtctaccacagtctgaaaataggtgaggccagaacaataagatatttggagagagagagagagaccatattcaccttttattacagtctatttttataattgttctattttattattattcattgttgttaatcccttactgtacctaatttataaatgaaactttatcatagtatgtatgtatgtgtaggaaaaaacatagtatacatagagttttatactatcctcagtttcaagcatccactgtggatcttggaatgtatctcccacagataatggaggattaccagccccaatgtttagaacagtgttaggtccatagcagacaagcaataattctgaaatgaaaaatttaaaaaatgaatgaacactttctgcctccatacatccagctttggccagatcaatgcctcaacaaactgcagtgcggagaaggctggtctgttctttactccccacccttctctgggtcttccaggttccaggcaggaggcagggaaactaaaagaaaggagcagaagactcgttacttggtaggagcagtttgtcattctttctagtcctccgatgctatcatggcagctcacaacattattaaccagtttttgtgcagctatctttttgtaggtcctgtgtggttatgttcagaagttctctctttcttctgaaaatcaggacaaattatttatgaacttcaataagtttagacatgaattactccttagacttttgtttttaaattgtactcttcttatcttctcatcctagaacgcacggccatcctccatataatttcattttcttatatttatgtggctggaggaattaggaagaaaaatgaatggaaatataaaagtcattttctcttgtataatct

SEQ ID NO: 315293 - DNA, 4001 bp, Homo sapiens
agtaagtgaccctgcagccctcccagacatgcccctcccctcagccaggctccagttcctgtttattccacactagatgggagaaagaaacagagagagattaggcccaggattctaaggccattttgaccctccctttcctggggctgagcatcagtaacccccgccccctctccccagcactgagctcaggaatgatccttttcggccccctcctgtgcagactctcgggctcccgccagtgactcactaaggcttgcctgcctgcctgcggctgcaggaatggcggtaggcattactccagttggttcaggcctggggcccccaggcataacctttagagcatccagtctcttgggctccactacccttcagagaaggtcgcagggcctgaacttccggcactctaattcacagaattcaaacattccaggaaagggtataaggagaagagaagggagcccttaggccctaatgtggacccgggagtgtggcttaacctcttccaggcagtggaataagcaggcaaagggcacaggaggaaggtcctagggctggcagactacacttccatcacccaagctgcttattacagttatttctgattaccacccccctttcaaaaagctctggaatgcaataaaaataaggactggggggtgggggtggcgcaggctcataaaattaagaaatccttccatctgaaatcgtgattccaggcccatgaagtaactcatttctggcctgggtgcctataagcaagaagcagggatgtcaggatgcctgaattatccaaattatttgggtcaaattaatttagactgtttgagaaaaggcattaatttggttttagatttcctggattagccctggtattaatttcacagggagtactttagaggacttttctaaactggaaaataaagccttttcctgtggctgtcaaggtcttccagaggggtgagcggtctctcaaggtggtggactcatcccatccctcagtcccaaacaggctgggagaggagatgcaaaatggaggtagagcctggggcaaagcaccaagtccacaggtatcgagtggtaggtagcgaagggcacccgagaaccagaggggggccttgggcaagaatggaacatttagttaaggggaaagaccttcagtgaaagccaggcagcgtcctcaggtgagcccacagcagcaaactgggctggtggagtgaacgtaaaggtaagggtttccagtatggaaaaggtcaaggctttaagaaggaaaaaccggccgggggaactgacagtggtgaataagggaaagctggggagacagagcctgcttggggttcaggtgcagagtaatgagagggtggtaggcttttcgccttggggaggacattgtgggaaaagatggtgccatgggggtgcgggggctgtcacaggtctaaggaagaagagccgcggggtgccactgaactaagaggagggggtgccgcatggcgtgagacctgtcacggtgcaaggcggcggcacaaaggggtgtcactgtcctacgagacggggaaattgtccttgcgcggaggggtagggggttggcacgatcctagggagggggcgctgcgcagcgttcctgctctgggaggattccaagcggtatccctctcatgggaggcgccaggcgggtcaggtggagggcaccgctccccgccagccctgcaatcgcgccccgggcgcccccgccccaccgtcagctagctcccgggtccgaaggctgaagccactcccgggtgtgggcagctttccgccagctcagtgcagggcaggacaaagctgcgcggcgaggcagacgacccgcagcgtcctcctccacgccataaggccagatccccggctcacctggtgtcctcggccccctgctctgccggcccggccactctccggatcccaagatgtccgcccgccccctgctcgtctgcccgctgcctcggctttcaccgcagtgccgccgccccgccccggccccggctgcgcgtgcgcgccggcgtctagcgccgactacaaatcccgtcaggcctcgcggcctccttgcttgcaatttgaagcgctctaggtttagcaaaactacaactaccgactgccttcgagaaaccgcccccgcctcaggaaggggtaggcgtggccttagtcggccctaccagaaatacacattccagcatacaccgctccacccgcctcattttttttttttttttttttttttttttttttttcactgagcgctctgggaattgtagtccctgcacttcctcctgttcctatttgtgttctggagagctttgggatattaatgccatttgtggaagcacatctgttaagccttggattgctgtaggccttttctgtctccagagtcccaggactggctgtcctcactttacacacaaataaatacaactgggcagtagaagtgtttgtgctgaatttactgctttctaacactacctctgattctctcaagcttttctcatatatttgttccggacatgagctttttccaagggatcaagacccaaggagaggagcggggaggaaggaggcgactacttggaagaaactaaaccttttcacaaataagtccatgactgtacactcttcccggaggtcagctacagcttttcatgaacgagccgatgttctccttagctatacctatgcgactgtgtatgccttctagtgacaggcatatatgttgcttagaagacgttcgaagagttgaatttagtttgacatgggatttgaaatcccctctttgataaacagaatctttacatccaagctgaggagacagacccaaccctcacacatgaaaggcctgcttggttcttgcagagtcttaagaaaatctgttggctcttctctttctgtaggcagagataaactgctgccttccttgggcaggactacgcctgtcatgggaggaaggaagggcaagaaaggacagatctggttgcaaatgttacagtccttcccagcctccagccagaagccacgatgtggcaggatgaagatctgacctctctcacatcatagtcacggcctgaagtcattaagtgactgaatacaggcacttctaatttttgaaccagcactcaaggcttcacttctacctttgcaaaagctttatcttccaaaaataccctaaactgctaccaatttagagtaaataataataatgataaaataataataataatagctaccatttattgagcacctactctactgtgtgccaggcactgtgctaggcacttttcgtacaatatctaatttaaatcctcacaacaaccctgtgaggtaggtattattatcatcattttacatacgagggaactgaggctcagagaggttaaataactctatcacacaaccaaaaatagtagagctggaattcaaacccaaaaccacctaactccaaatcccatgctccaatgaattaaagtagagaggggagagggagggccaaattcaagacagagtgttggagtgaaatggatatgatatgctgataagatatgggaagaaggaatgtaagctcataaatgtttctagctggtgagcctatgtagattgtgatgaagtaaccaggagaggaattcaggaggaacatacttggttgggcagatgagttgagtctatacggaactgtccatagagatgtccagtaggtaataccaatacagatctaaagtctgggggaagttgggggttggagctatgtatttgggaatcaccagcatatcagcagcaattgaggacatcaggatgaatgactccattttgggagtaaatagaaaggaaagagaagtgaatcaaagatggaacgatggaagcactgatactgacaggcatgagcaatcgttgagaaattctcaagagagtcggacaagacagagtcagagagagaagtacatgaaacagccctgtagtggtggctagaagccatggactgg

SEQ ID NO: 315294 - DNA, 4001 bp, Homo sapiens
tgtccaccctgcctgctcaccagccagatgcctcaccatcctcataaacaggcccatgtttctccagcgctgacaggttgaagctcttgagcttccggttcttctcccagacctgaggacatctgggcattaggctgtttgcccgctaacagagccttatctgtggggcagagcctctctcttgtcacccactacctggtcccatgcagactcacctccaggaactgcttctcttccccagggcccgtgcctccagccttgcgcagcacagctttcatggtgcctgaaggagactctctgctcagcagtctgtggacatggggtagcacaggtcaggattatcttgcaataaccccttcctgctccctactgggcacacctcttaggagagattcttgaggctctggccccacaccagcttctggagcacctctagccccaccttgcctttcctccctgaggcagagactctactctctgcaactccccaggccaccatgggctctagtccaggctgagtttggagcaagcttccagtgcttatcaggccatgtcaccagaaactgaatgagctcccaagggggcaagaacctggctgctggcctcccttctaggcacatggtgagcattcataaaaggcttgcattgcggacggctgtggccttgcccacaagcttcctccctcaaacttactccccccgggtctccacactgttgcctgcaggtcctgcaaacaccactgagtccccgtcatggaacaccaggtattggcggcagaatcgaatgttctccatgcgttccaggtccctctgggtccactctgtgaggggaggcatgagactgctcaccttgtcttggctactcctggctactgcccccagccccacctgacccaggaaggcctagatctatcttccccaatctctcaatctgtctccagacactgacaccctggctgcaggctggacaacacttggccacaaccctagtccaggcctccagagcctgagctgacagcctctttgagagaaccccctagtaaccccagcatccaccctggaatcttgagggcagcctggcatgtgtatgggatggcgtgttggtggagagccctacaaggtccacgccctgagcccaggtttgacttctacccctacgccgtcatctcgtgcactcatggccgccattcgataacgccccgcacgccccctccccccctccacacacctgtgtgcagggacctgtgggagtgtaacctccaagtccaggccggctccctatatacccttacgcactgtcaagcagcgagccctccacacccccttccttcccaccccagtgcgcgaccccgtcgccagccagttccccttcgcacacacaccagtgtgcaccgtccggtattggccgccgtactgcgtggtgacctccgggcccaggcaggcggcgctcagcgcgggctggcggctaaggccccgatacagagccgccgcctcctcgggctcgctcagcagcacctgcgcaggggacacaccagggtcaggcccggcccgggctgcagggaccacggggaccgcgggccgagccctcacctgacgttccatagtctcctctctgccgccggggcgaggcggggcgtgctcgcgcccggaagtgaggcttccgggggcggagcctgggacggcccgggctgtctccgcccctgccctgcggcaatctgtgaggggcggggccttcggctaatgggtgaggaccgttggcagggggcgggccttgacggtgagaggacccggcctgggagcgagaagtcctgggtgggtgagagcaggggtctcgccaggggcggactagccaagtggggggcggggccgtgggctgagtcctgggcctcttaccgaggggcgaggcgttggatctcggaggagagggggcggccctgtggaagcggaacccgggagcccggcttcggggagggtagaagggcctacgagagaaggggttgagggggtgctgcaaggcggaagcagcgcggtcggacgggcatggcccaagcacgcgaagggcggggcccgaggggaatgggaccaatgagtctttgaggatgaagggcaaggcgggcgggtccggattggagccctgcgaggaatgtggagccgggagcctgtgagcgtgagcgtgagcgtgagcgtgagcgtgagcgtgagggtgagggttgggcggggcggagccggccgcagcgtggatctcccgcggctctggggctgactgtagggttccttcgggtccaccacgaggccgacattcactacacagtgccaggccctgccctggagggagttccacgcagacgaagaagagaagggccagggtccgggcggagggcgcgaagcaaagccctggggtgcggggcagaggggcgggtgccaactcttagggtgctgcccggacttatcagtcgccaggcctgccgcaagagctatctatccccgcagcctttacccagccttctcagtggcaccttgttggggaccgtgagctggtgggtccctgccttcctccccaggcctcaccctgagctcttgggtgtgaaaggcctggtgggctcagactccacccaggaccagggagcttcctgtggaaaaaacctaggcaggcaggttccctgtgcacgtggtacaggattggctgggctaaggtgccaacagagatcaggagaggctggacagtaaggatgttccctccatatacctgagtctggctggtcttccacattcagggccctggctccctgctccatggcgtgcttgtgattgagagtccacttgtctggcctgtagcttcccctttcccatcagccgcatcattacttactcaagataactagttaagtaaaaaaaaaaaaaaaaaaaaaaaaaaaagtcccggccggccgggcgcggtggctcacgcctgtaatccctgcactttggaaggccgaggcgggcggatcacgaggtcaggagatcgagaccatcctggctaacacggtgaaaccctgtctctactaaaaatacaaaaaattagctgggcatggtggcaggcgcctgtagtcccagttactcgggaggctgaggcaggagaatggtgtgaacccgggaggcggagcttgcagtgagccgagatcgcgccactgcactccatcctgggcgacagccagagtccatcttaaaaaaaaaaaaaaaaaagtgccaggcgcggtggctcacgcctataatcctagcactttgggaggctgaggcgggtggatcacctgaggccaggagttcgggatcagcttggccaacatggagaaaccctgtctctactaaaaatacaaaaattagccgggctgggtggcacgcgcctgtaatcccagctactcgggaggctgaggcaggagaatcgcttgaacctgggaagtggaggttgcagtgagccgagatcatgccactgcactccagcctgggcaacaagagtgaaactccgtctcaagaaaaaaaaaaaaaaagagtcccaactttctgacgccactgcatttgtcagtatgtacaggactgtatcaaggccagaaacaggagtagaatgagtggccccagccaccaatttgggtggaaagattggaaaataggatgttcatcaagcattgtttataataggaacactgggaacatagtgcctgttccttagattgtgtgtggtagactggctatgaactaatggtgtatctctctggaggttgagcactggaagacgaacatttaagtacctgaaataaacgtggaaataaacagaaagctagaaaacaggatatattgcaccttctggcttctgtttaaaatgaagactggaacaacaaacaggaaagaaggacacgcatcaaaatgttaattctggggagagggccagaggtgaagctgggattcctgtttatctgtgttaaaaaaaaaaaaaaaaaaaaaaaaggtctagcaactctgggtgacttc

SEQ ID NO: 315295 - DNA, 4001 bp, Homo sapiens
acaaacaacaacaacaaaaaaactccttgtgagagaaagggcggacagcatccattatagttttcaatgtcctttcattctaatttactcattacttattgagcatgttattaatgtgtacttaagactttgggtaacatatggattatatacgacatatatttttgcatcttcttctgatatcaataggaagattgttcttatgaggagtttaaatactttacaaaataagtataatttaaatattatttttggccgggcatgatggctaatgcctgtaatcccaacactttgggaggccgaggtgggcagatcacttgaggttaggagtttgagaccagcctggccaacatggcgaaaccccgtctctactaaaaatacaaaaaattagccaggtgtggtggcaagtacctgtaatcacagctactcgggaggctgatgcaggataattgcttgaacatgggaggcagaggttgcagtaagccaagatcacaccattgcactctagcttgggcaacagagcaaaaactccatctcaaaaaaacaaaacaaaaacaaacaaacaaaaaatacaaaaattagctgggcatggtggtgcagtcctgtaatcccagctacttgggaggctgaggcacaagaatggcttgaacctgggaggcggaggctgtagtgagccgagatcgcgccactgcactccagcctgggtgacagagtgagactccgtctcaaaaaaaaaaaaaaagaaatatgatttttaacagaatatgaggtaattaaaaagcaatccaactaaggtgacagtgcatccaccttgggcctggcactagctggaaatcactgctccacttgcattaagcttacccgtggagaagccctggtcccaggattttaagggtgctatgcgctcagtctccacagcacctcctctggaggcgacctctgctgacactctcttcataccaacgaggtgaatttgcccgggttacttcctggtaaactacgaagccacagtgtaagcctaggcctggggacaggctagaatgtaagcctaggtctcccacaagcccgcgctcttagtgcctggggacacagcccctgacctcaaagatctgcagaacgtgaaggactagattttgaaatttcacctcataaaataaaataggttccaataagtcattaggtctcaaagactcatttagccattaaatataacaagacacgtatctcccaaacacaatattttatgccatattgtcaaatgcattttctagtcacaccattaattccagtttccagattattttactgcgatgcaccgttggacagcttgctgagaattcacctaggacggtgtttgtgcatggaaacacctcgttgtccagtttggaggggtaagcaaaagacgctgggatgagttcacactgggtttggttttatcttaggcatgttgctagtgtatctgaacctcagctttatcactggaaaaatggctctgatgatacctaccttgtacatttgtttgaggaaaaatgagaacaagtctaaagctaccggcacaagctctcaatcagtggtagttatatgtagctgaaatggggcaatggagagtctagactgtttctattttagacattattatcataaatgaaaagcttaaaactacagtacataccttttctttcaagatgaaggcagtttccagatgcagaatcagccgatttgagatgcctgtcttggtgactggcctctcccaagctattttataagcttcttcaggtctctgatgtttacttttcatgcatgccacgcccgccgcccccatccagtcaggagggttggcctaaaagcttagtctgtatcgaaacacaaagatgggatgttgtgtccatcctcctcccccgatttccttcacagctgctccctgaagaagaaatgagatattgttttcgcgcgcgcgtgtgtgtgtgtgtgtgtgtgtgtgggtatgtgtgcgagagagagagagagtatgtgtgagagaaagataaagtatattttcatccaaaacatttttttttttgctatgtggattttctaatttaatttttttggtcagaatgcacttttaagttccagcaggacgtgttgcaacatgttttcaaacatctggtatttatttttcatttttgtgtaaatgaaaaatcaacaagctcatttcctgaagtggaacatggagttcctgactccactaatgggagtcaggtaatggcgcgagggttatgagtcaaagctggctttctccaggatcctgggcagccccctaacttctctgagccacagtctcctcgttgtaagtaggggctgtcattctttctccaccagagccagacgtgtaggggagataccagttctctaacaactggggctaaaagttgagaatgcagaagacatcttctgtcgctctgttctctgtcccttttatgacccttgcagcgagaagttcaagacagtctgtcactgcttgggggtgggggccggggtggtggggagtgtggacttaaacccaggggtgcttttggtccagccttatctctcctggtggaatgaacaactttgactcttgtgagtgagattctatgtctttgtgataggcaggaggtatgtttagagacatttagataaggcagtgccttcgtagtagacttagactcctaaatgaaattcattctaaaatatgtaagcaacagagatacatttacagcactgagtctataaacatgaaaacaacaacacagatccgtaacatcccaaacgttgtgagcgctttctttaagatgttctttgccttttcagaaacataagaaattcctactaccacccagggcctgcctctcgctgacctcctgtgctgccctcccctaagagctctgtgtagctcccttccccactccaggtccctgatcagatgacacttttccctaaaaagcttcctgacctttcaaaaatagcactcttgtcactgtccctttccctgcttcattatatctttacctgaaattctctcctttatttatacattatcctgcttagtatgttttccccaggaggataggagcttgaggcgtgccaggagtttgtctctttgactctgtgttgtgccccagtggctaagcacatactaagtgctcagtaaatacttataaattaaatggatgctatccaaagaacttaatgagtttctaagatatacaaaaggccccagaggtaatattcacgcgattttgatttcaattgtatttctggagaagcactagcctgtatgtttctgtcttcttcacctgtatcacatttgccaccaagaattgcctgtcattgaagaaatacacagttagcctcttttcagcctattacaaaaaattctctctcctctaagcagttgcacagttttccacaaagcactgttgcctaagtttccaaatatgtatgttggagttggagatatctatgtattttagccctcagcactgaagtcggcaaccatggagctgaaggtccaggtctaggagtcacagcgggagaaaagccacacgatcttcctaggtctcagttcattttttctgtaaatattggtaagtgatatattccttagggaaatcctctcttcacatgtttctggaatgtatagccagtaacaaattcttaagcagcataaaacaaatcagacctatcttctaagcaagtgtttatttttaagtcccaaaataaatacacatttgttcaaaacaattaaaatagcaccaaaatgcaggactcaggaaatgtaagcacctcataatcccacacctcagagataagcattattttgtttgtaattattcctctagatctttctatacagatccctatgtaataataacaatattcaatgttctgaaacttttttttttttttgagaccgaccttcactcactctgtcacccaggctggagtgcagtggtgcaatcttggttcactgcaacctc

SEQ ID NO: 315296 - DNA, 4001 bp, Homo sapiens
ccgtctcaggaaaaaaaaaaaaaaaaaaaaaaaaaaaagctggcacagtggcacacgcctgtattcccagctgctagggaggctgaggcaggaggatcacttcagcataggtgttccaggacacagtgcactacgatagtgtctgtgaacagccattgctctccagactgggaaacatagcaagatccccatctcaaaaaacaaacaaatatattgtaaaacggacactagtatgatgcatgcttgtaaagaaaaaaaaaaaccacaattcttaagttgtaaactaatctggcaaaaacctcaagacattagatgagtcaagagtttatctctgcctcacaagtcatttccagggcagtgtgcaatccattctgagccgtttatagtctttatgggctattaaaaaaaaaagccaagtaagagaagaaaggtaaggcaacctgttgaatcttacataataaaaagtaaaatgacaaagtacacctgaccaattccacaaactttttgcaaatcatctgaaacaaatacagtttataactttatatggagaaatcatcaagaaaaaaattgaaccgagtatactggcagtcaagataaaccaaatgtgagtttctctttttgtcactatcagctgttaagagtacattagcagcaggcaactggcctgtgaagataactttcagaataaaaaagaacaaatcaattctacaatcagagccccatttcaacttggcaattaacattggcacaaaatccatggcagaagtgccatccaggaaaaggagatctagacctcttctgcttttcttctttgggggccatgttcaactgtaaagacacacgaaatggtgcaactgcatttctaaatcagcaacaattcagaaatgtttcattctaaatagtgtccaaccagcaacaccgtcttaaaccgtttaaattatcgtgtaaaacggcttagagatgaagttttccctatgcaagttacagcccctgccaacattttaaaaaatatagctgctttcattctgcagtactgaaaacatattaaatggttacattttccaaaactgtcttaagctagagcaaccacatcagcatcattccgacgcacagaacacagggcttttattttgatgagtttattaaggccaagtctgcagggagcagcgcagcagtcgcggagcggcgaaggcaccgtccatccctcgccgtgcacagctcgagtgacagcgaccacagtcacggccgcgacacgggcacattcggcggggagagcggtcttgggctccgggacccgtcacgggctttgccattagggctccacacacaaccttacagcctctcccaaagaaaaacgatccatttccttccttagcttgctgagcctcggaaatcattaaataagactatcggggtttctctcccttctgcaatttttctgaagaggttctcagggagaaaattccaggatcgagatttggcacctcacatcaccgcgataaaaacggcgcctttcgtcaaataaaaaggacccgcgcgcgtacgtgaccgcccggcccacgagcaccagcggctcggtctccgcctgcggccctcggcccagccgagcaggcccacgcgggccttgggcggcgggcccagcctccacaactccgggcgcggcctgcgacgggcggtgacctagggcggcggcggcccccacctgggccggggcgggcacctgcgggagccgcggaggcgccagacctggggtcggccagctgggctctccctcgtcgcccaccagctcccgcgcctcacctgcgggctgtcctccagcgtctcctcgatgggcagcttgtcgatccccggcatcgtggcggagggagggcggtggcaggagacgcagctgccgcccacagctccccgcgccggcccgcccgccgcagctgaccccggcccgccctctccggcaagggctgcagccgtccccgcccgcacagccttctccaggcgccgagcggccgtgcgggaaatcccgccccctcggcctccctgccccgcctcccggcgcgtccattggctcccggggacgcccatccgcgctgcggcggtggtcgggaggttcccgtgcggcgctaggctctcccgcgagcgcgggcgtcggaagcggcggaggtggcagtgtctgccctgggatggccttccctgcacgcgcgcgtttgtatctaaatcgcaggggaccgtctcttcctcagcttgccggcgcgaggagccagagcctcgagttagggccacacgggggaatttggggcgggttgacttttcccgcaacatattttgtcagagaccttggagaaagtcctactgctggcgccttttagtttcctcagatgataacattcccaactccgctcgaagcgtccagtcttaatcccctccagcagaatggtgctgactaactcagatgtctgagatccgcagctgtgtcaataatagggctttctggcaaacttgtgaacgtaggctcgaaattgtttttctggacgcttgaatatcagtatattcagttgaaaacatgtgattttgttgccagtttatcagttcctacctggcctcccgaggtcagtccttcaggactgacgctgcaactccaactcccatgtttcttttaaatcacaaaggaaaatatcttttaaaaatcaggatacactgattaattatgttagtaactaattggcatttgttgaatcaaaaagttttggaagcgttaaatagttttagcctctaattttacaataaagtgaagctcaaagttgggaatttgaccggatgagggctacaagcctatcctttcctcctccctcttcatctttcccaacctgtcaccctggctcgtttatgtctctgtatagttgtaggctttcatcattatacagagaaaataacaaagtaagtagtgtcttctaaacatctagccattaattccaccaatccattccattttcattcaagaaataccagagatgctgagtaaagattaattagctgcctggttccacagatacatgggaacaaatccagaatagtagtagctcaaatccaaatatagtaacaaatagaagttatatattttaaacgaaaatagtagattttcccatgatctcttgaaagaaaaataaaattatatttttaaagttttgttgagtagacttgcattgtagttttacggaattatttttagtgttacaatctttaaaagttttccccttagattgtttatcagccagtctctctctcccgaagagttctttagtttttgaggaagttgatttggaggcagttcttacaatgagttaagggttcccagttgtgttacagtttctttttccttgatatctcatttctactctgccaacaagaacaccatgcaccccagctctaaagaaggaagactttcaaggtaagtgaccttcctgattgaactgagttagattttaaatgaagaaaggttgtggcaactgttaagaatcaggagtaagtgaggagtgtaaacaatgtataagaaagaaaaaaaaaaaggcctggcgctgtggctcacgcctgtaatcccagcaatttgggaggccgtggcagctggatcacctgaggtcaggagttcaagaccagcctgcccaacatggcgaaacccagtctctactaacaatacaaaaattagccgggcgtggtggcgtgcctgtagtcccagctactcaggcggctgaggcaggagactcagttgaagccgggaggcccaggtgcagtgagctgagatcataccactgcgctccggcctgggcgacagagcaagactacgtatcaaaaaaaaaaaaaaaaagaaaagaaaagaaaagtatttgttacctaattaacttggccaaaccaaataattccgatgaaaaattcgattagttatctgaattatctgggtgtggtattgtcaagttaaatggtttccttcttagtatgttatgtacatctaa

SEQ ID NO: 315297 - DNA, 4001 bp, Homo sapiens
gaaagaaaaaatactttatgaatgactcataaacaattgattcacaaagtgtaagtacgctaagaggaaaataaacatgagccaatgtatatactgttactctttatataccttgaaatattacagaagcttgtgtttgcaagttttgatggtagtacagctctaaaataaaacctccggccgggcgcggtggctcacgcctgtaatcccagcactctgggaagcctgggtgggtggatcacctgaggtgaggagttcgagaccagactggccaacgtggtgaaacccccgtctctactaataatacaaaaaattagccaggcgtggtgttgcatgcctgtaatcccagctactcgggaggctgaggcaggagaatctcttgaacccgggaggtggaggttgcagtgagccgagattgcgccactgcactccagcctgggtgacaagagcaaaactccgtctgcaaaaaaaaaaaaggaagagaaaaataaaacctcctccggtagaaaacaagctaatgaaccaacaagtttcaacgttcaaagttagaggggcttctttcagcgttattctagtccatggagctcagctgtgatgtagactgcttacagtaaccgggagcggttgcttacttcagccaactgacagcccttctccctcagctgagcaaaaacacgccccctaaaaagtagtttttaaaaagtcaactttctaaaaagaaattttaaaaaaattgtagttactatttaacaagactaccataaaattcagcgtcatgatgttcagttacttgaaaatttatcaggtattttttaaaaattcgtttctaaaatttttttgcattagaccttagaccgcctaaaaataagcttaaaaacctaggagaataaaccaaacacatttaaagtttttgaaaatagtcaaagaaatagaagataagctcagttttcggagaatgagattaacaaggagcgaaaaacttgaaacggaatccagcgcaaggccaagtttagcaaagtgagcgctgaaggactccagactcttcggaaaccttgggtgctccctggccaccgcaacttcctgccccgggcggctccaggctccgggtggccgctggcttacataccaatggagtatgcagggactgtacacgaaacgcagaaggggagggaaaaggctggagttgctctgcctccctcctgaccgctgtccacacccgggcaagaaggtatgcagatcgcacccccagaaagggcctcgccaagtgtttgcttcccagagttggctttccccacatctctgcccaatgttgtccagctttcaataagatcaaggagaaaaagccgagtccagaaagaaatcttgcccgaagccctgtccctgtctcgtctggcgacagatcgggggcgggggggatcgctcaccctccgctccattgttcccccttaagaattccttccgacccccgacccggcgcccctcccccaccacagcgggcggaggaaaaaaacaggcccagaggccaccccaattgtggagaccctgcctttcccaggtcccgcctgactcgcagcccctcactcacccatcaaaatgcgcatctgcttcttgccaaatagtcgggagaagagggaggagatagtgaggcccatggcggtagtggcacttgtgatgggcagaagcagaaggggtttggggcgaccccgtgctttctcctttcaagctcccaggcaaactaaacgagagggaagagaaagagcggaggaagaaagagggaggcagaaacgtctcagtggcccctgtgccgatgaagatccggcacaggaataagccggtagaggacctgctaggcgactggcgcggcagctccggctctagcctttaggctctggctgtgccacgtcacgcggcggccgcggcgactccagcagcggcccggcccctccaacgcggacagaatcgcgtcaccgccgccccatccccctgcgcttccggtgcgcccgagccactgcgcttgcgcctgcaggggattggccagtttcgctgacgagcatctctcgacggcgccaccgcccggacgtggccccaggagccgggagaggccggctgaggcacatgcgtactgggagacggacaaagtcccacaatacctcgcttcgtcactgccaaatcagactcagggtgagacgcttccgcccggatgaaggtattgtcggggtgatagtccttgcttccggaaaggcgagctgagcattatgggttaggtgaggaacctcgccctcttctattacggtacgcgcgatgggtattccctgatgccatgaacttacacgtttcacacacgggaccagacgcttgctttagttgacgcatgaagaccggtccggtcttttgcggagaaaagtggttaaaagctgacttgtgggccgagaaactgtggcaccctaatgagctagggctagacgcttcgaccaccacgccaagtgattctgaagatctctaattctgtcaaggcgagagcgctccaacacgtgttcatcggctgttgctttttaaagagaaggcaaggaggaagtcttgcttttcttgtactttttttcctagaagcagcattaaagatttactccttatgttgaggaagcggaaagcctcttcactttaaaagtgtttatgatcgggcctggcgcggtgactcaccgcgcccggcctgctacaccttttaaaattcacagcaatgataaatgtattagactcattgccaggataaagatttaatctatttttctagtagtgccgtcctatgtggttctgtagttgcttattccaactggtatatttccataggatggggttgaataagaaaaacttgcaaactttcagaaacagtaagttatttttatatttttgaaggcttgctgagtaacgcttctcttggtagcactaccttatctacccttcagagactgttatttcttaggagtggccctgggcaattaaaagcaaaaacttctggccgggcatagtggctcatgcctgtaatcccagcactttgggaggccgaggcgggcagattacgaggtcaggagatcgagaccatcctggctaacacggtgaaacccagtctctactaaaaatagaataaattaaccgggcgtggtggcgggtgcctatactcccagctactccggaggctgaggcagaagaatggcgtgaacccgggaggcggaggttgcagtgagcggagatcgcgcccctgcactccagcctgggcgacagagcgagactgtcttaaaaaaacaaacaacaacaacaaaaaaaccccaaaaacttctttactcagaagtaccctcctttgcattggagatacatgtaaagagttgcttagcagttgaataactcaaaattgcattttggaagcttgctaagtgacaagaccttcttgtatccttttgtgaacccccaaaatatgagacaggcctcagttaatttagaaagttaattttgccaaagttgaggacacgcgtccatgacatagcctcaggaggtcttgtagacatgtgcccaaggtgatcagagcacggtttggttttatacattctagggagaaatgagacatcaatcaatatatgtaagatgaacattggttcattctggaaagactggacaactcaaagcaaaggcaggaagactctgagtggggagggagcttccagggcatagatagataagagacaaatggttgcattcctttgagtttctgattagcctctccaaaggaggcagtcagatatgcgtttatctcagtgagcagaggggtgactttttaaagaatgggaggcaggttggccctaagcagttcccagcttgacttttctctttagcttagtgaggtggaggccccaagatttattttcctttcacactttaggccttatgtctgtttttagttttatatagtagaattccttaaaacaatcttcaactaattcttagggtcttct

SEQ ID NO: 315298 - DNA, 4001 bp, Homo sapiens
ctgcacacacttcagctagcctccctcaatggtgacatcttgcatgttattttactttttcactcttattctataacaaatgtacaggggaataaatttagaagagcttcttaattcataaaccaatattttgcaaatgaccagtatgtaatgttacaaaatcctgcatgggtaaaagatccactcaaagttcaatgtagaccaatggattttaatgtcacagaatttggaaagttcattcatatgatttcaaatttcacattgcaggacgggcatggtggctcacgcctgtaatctcagcactttgaaaggccgaggagggtgaattacttgaggtcaggagtttgagaccagcctgaccaacatggtaaagccccatctctactaagaatacgaaaattagctgggcgtggtggcacgcacctgtagtcccagctactagggaggctgaggcagaagaatcgcttgaacccaggaggcagaggttgcagtgagctgagatcatgtcactgcactccagcctgggcgacagagcaagactccgtctcaaaaaaaaaaaaaaaaaaaaagttttcacattgcaactcatctttaagaaactgctacttgttgagtttgtgttgtaatttcaaagaatatccacaattatttcaaaggctacaagaatactcctttttctagcatcatatctgtatgaggtcagattttcttcttacacttcaatagagtaatgcatcagaaaaggtgactgcaaaagcaggagagaattctgccatcttccattaagccctaaagtactaaaatgtaaaacaatgccattggtctcacaatttttttttgtgtgtggaaaatatagttaacacgtcacgcatttatcattttattttgaaaggaatgaataaatatattttaatctcagttttcactttgaatatggtaaatatctaggtatatcctatagaaacaaaagttctttggagtccttaacaatttttaagaatataaagaggttctgagaccaaaaaattggaacagcaataacaacagatggcctaaggcttagcatttaattgaaaagaaattaaacttcactaagcatctgttcttcagtacaatcctaagagtaaataaatgatgcagtaacattcagtagcaacattaggataccgtcagacatccaagtgcttcatatacatgattcatgtgatcctcgacaaacacatggggtaatggacaattattatcaacctcttaaagatgaagagacatgagatctaaaagtttggccaggtagagaagaagcatagctgggaatgaatcaggtcttactgactcttgtacacacagtctaaaccctggcccactttcctgggatgggcattgagagtctgtagcttaaactagcatattaaagaaacaaagaagcaaacgattcaactggtctacagtgctttccctgatcgaggctatcaagagcataaggcagaattgccactagcagaaccacatttactcagcaattttttattgccttcttcctacaaatgggcacttacataggtctgtggattctgcaatgaacgaagtacacaaaaatagttgctatgatggagtttacattctaattaaggatttccaaaggcctggctaacacagatggagaaagtttgggagccctgcagaactgacaaccacactcagtaagtaaggagtctcacattcactccctgattttcatgaggtgaacagtcagtctttctgaccttccttctgtccccaaccatctatatcatgtccctctaatgtgaatgggctgagtggtttgcatcctttaatattgctcctttgatttttcaaatcctctttgagcacttaaagccccacattctggctaccctccccgctcccccatgcttacctgtcacgaatccccttagagtaaccattttcagtcctacgtggtgtgtctctctctggaaatgcagtttccttagtgtgtcctcatgcagaagaccctgtatttaaatgtaatttttatacaatcagacctcctcctgcccctgcaccacccagacacaccctgatgtcccacccttcattcattcatttgttcattcaatataagtatgcttagagcatagtgtaactgttgctgaaaatagtaattattctttttttatactcaaacttcctacctttgacaacccttcaaggcgactcctgtgctttttgatgcaaccacctttttacttttacacttgcgttgttcaaagttttaggtgtaaaattcctctaggcgtggtaacacacgcctgtggtctgagttattcgggaggctgaggtggaaggatcacttgggcctgggaggttgaggctgcagtgagccctaattgcaccagtctactccagtctgggcaacagagcgagacagcaagaccctatctcaaaaaaataaaagtaaagttttaggagtgtatctttaaaatagtgatctgatctaagaattttcttatggaataatccatttatgtttgataggataagaacacagtaatcccaccttatccacagttttgctttctgtggtttcagtcaactgccacccaaaaatattaaatggaaacttccataaataaaaaatgtgttagttttcatttcttttcttttctttttgagacggagtttcactcttgttgcccaggctggagtgcaatggcatcatctcggctcactgcaatatccacctccccggttcaagcgattctcctgcctcagcctcccaagtagctacgattagaggcatgtgcaacccaccagctgtttttgtattttttttagtagagacggggtttcaccatgttgatcaggctgtcttgaacttctgacctcaagtgatccgcccgccttggcctcccagagtgctgggattacaggcgtaagccaccgtgtccagccctttttttttaaatgctcaaattttaaattggctgtactgctccgcccaggatgtgaatcatccctttgtccagtgtatccatgctgtataagctacctggcctatacaatgcagtcgtataggaagaaaccgaggatcctggaatgtatccccatggataatggggggatcactacttatttctacctaatttcttacaatctttgtgtgtttttaacttttccagccttctgttagaatggttgccttttattttctccccctctcaaatggtatgtaagttatatgcaagatttaaagttacattatttttatttctttattctttgtttagagatggtattcactctgtcacccaagctggactgcagtggtgccatcatggctcactgcagccttgacctcctgggctagaatgattctctcacttcagcctccccagtagctgggactacagatatgcaccaccacccccagctaattaaaaaaaatttttttttgtaaagatggggtgttgctaggttgcccaggctggtctagaactcctgggcccaagtgatcctcctgccttggccccccaaaatgctgggattacaggcatgaatcactacgtccagcctaagtttgcttttatgttcctaaaagtggtcattattatttttgtcataaatatttatttagatttaaccatatgtttatcaagtactttgatcatcattgcttctttcatcctctttcttttgggcacagttttattttttctgatgtagaatcaaaaatagttcttttaactgtaaacattttcaaactttctttgtctaaaatatctttattacgttatcattcttgcataataggttaggtgagtacagaagccatttatttgagaagtctgctaacatccaaacttttattcctttgcaggtaattgttctctactctctagttgcttttattttattttattttatttttctaagatggagtcttgctctgtcacccaggctggagtgcagtggcacaatctcggctcactgcaacctct

SEQ ID NO: 315299 - DNA, 4001 bp, Homo sapiens
aatctacctctccagatggttggtgaggattcaatgaagtgttaagttatgcatcaatttcaaaagagtcagttttgaaacctgtggttctccaagctctaaaatcctaagctatttgtcctaatgacacagcagactgaactctagaataccacaggaatatcacaccactgcaaattactaggtggtgctgagtctcccaaaacacagaagtgaaacaaaagcattgcactgtttttgaaatgcatattcgatatggactaatcaaataggttttgagattattttcctggaggcagaattattccgcacggttacacagcccttagttttcccctttgttgtatctatctatgtataaacacatggcctatatagtaggctattttcctctcgctgaagcttctgaagacaaggcctttttgtcaagggtaagtgcaaaaccagtcaaccttacaaaaggagtcatttaatgctcaattttccaactttcctatgattaaacacttctaagctcaaacgctgttattgtaatctagatggtgttttctttcccccttccccaacaaatgtttaaattgtctccgctggattcccccatccccaactcccccctacccccatctgaccttgaaaacagagaagttttccttttctctacttaccctaaactatttaaaaatggaggccctctgacctttttacaacactcttcttgtctgacacaccaaatgttaatctgaaagccaagaggagggaaaaggtcttgcagggcggggagggggttgtggaaagggggtggaggtactatatatttggcatcagctcagaaattcagaaatgtttgtgcaaccactcccccagccaggatcctcccccaccccccacccgcaactgccttctaacacattaataaaaaaagatgtgagcagacgaaattggagagcccaggagggacagctaaggcggtcatgattttgtacccaggcaagaccactgatcaccatcccacatgtccacccctcctccctcccttccaacgtgccaagtttaggattgggacctctgcagcttccacccccatcccctgaggtggcccggtaaacttgcggcagtaccacccattaacagcttgtgtgaggcaaacggaaggactgacacagcagcctctgcgcgtcgggacagcagcgctgtgcaccttaagaatcgtttatgttctttaaaaaaaaaaaagaaaaaaaagtgcaatgagcgcacaggcctggaatacattaacttgtgaaccgactctatcacaactcgagagagtccgtctctccctcaaacaaaaagaaggtgggggcgggggagaaaggccaaggcacattaccatcctgtcccgagctttccagatactccgtcaggtcacagccaaacgcgctggcggctccctttcgtttcagcttctgcttagcacccttgttcttcatgagttagtcccaaagaggctgcccctccgtctctgccgcccctctgcttggcaccgctgtaagatgggctcccgggctagatcaccggctgccccgcggctctggggggccgcatcggaagatggaagaacttgggctgggggccctgcgcatggaccccgcgggccgcgggccggcagagcctgagatccaccccgcgccgctccggggccgccgtgccgaggccgtgcagactggcagccgcgggccggctcgcctgggagtgtcacttcctcacttggagtcctagggactttcacaggctcctgcggtgtcttcgggtgtttctcctcagcttaagagggagggcaagctctccccaccccttactaagtgccccggagacgacgcggacgcggggcgaggagactgcccagggggctgcggtgggtcctgcgccctgggcccgctgtctcgccttcagacgactttggtagagcgaaaaacaagcatcctgtcgctgctgcccgccctcacgccttcctttttttcctgtcttacaaatcctaggatcatccagctcaggaaatgctggaaggaagttagctagggaggggggcggtgggtggaaatttttggcagctcggtgcttgtgagtgtgtggagctagaggaagtaggtgggtgggttgaggagcacggggttggggtagagaacgcgttctcccgagagcagttctgcgactccagagataactgggcagccccggaggaaatcgcgctcttctcgcaggacccgcagccgcagccgccgcttcctgccccgccgagccggctctttgaagtggcgggaggaggtgcgctggcattctgcggggaccgtgctggttgggactttcagaaccctctgccctggttttatcctcattgtcatcgtatctttgacactttctatttcggtgcccgcctgtctgctacgcaaatacttaaagagtaatgacagagacaaacaggggactccagcggagaaacctgacaggcagtggcttcacgccggccactcccatcccaacctcctctgcagcgttcgtgcacccccacctcagctcactcccctcccactctggggtaaagatacccctgggcaaagagaggctgcagctttgtaaccactgcccaggaaatcagatttctggttacatattcaagacacacacacacactactgcaaagttttctaaatggaagtgatttgggggggacaaaccaggatttaagatgcctctgacacatgaaatgtgaagaaagcagtctcccaggttctttcataatttgtttcaagttgtttcaagagggcatgtttttttcttctccagttagattttaaattctttaacttctgtgtactcagcacacagaaagcactcaaattcttgtgatttaaccatttgaggattagatgaaacttcctgtataaattcaaatccatatacaggcttgaaggataggggcatatgtcatacagctcagattgctggcaaagctgcatccgtagcattttaggtactgaatccctttacagtcactgtctctctatgtaaccttaacagtctatgaactttgacccttgacattttctctatgtcagaggtcacaacttgatagccaccctgccagatctggcccatagatgtacttggctggcagacaccatgctttaacacgttttaaaattagtagctagcattaaaaagttaagagatttcacataaaatctgaatttctggcttctcttgaaaaaatggaagatctagttacaccacaagtgcattcccatatggcaaggacggctgatgctgagttgtggcaggccccttggaggcaccctctttagagagacgactcttgcagttttgcagaccccacggcctgtcttcccccttttgcacctgcctggcctctgctgccacttgagtttgcagcccaacctctatgaattgtctttcctgtttttcattttccatctctcagtgacactgagaagcatttgccccagtcatcttggtgaaatgtcttcaagtaaccacagactcatttgtctccttcctctcccacctgcaaggtagtcccgcccagacgatgagctcttcaccatgcctctcagcttggtttattcctttccaggcccactcagtgaggaccatccactcctcaattattaaagtaactcctagtgggatttgttgagtccaatctcctccacttcctccatcctatgtattaaaagcttgaggagtcatcttgaaggattgctgttgttatatgcctgcctgccttgctgaaaacctttcaatagctccccagtcctacttttagggcagcaatttctaagcattttgtaaactgcttggagagtatctgataaggtatttggtacaatggcttgttcctccctttatttatagagaagcagctccatatgggactataatgatcactattagcatttgcttagcagtttacttcagcaaggacttttgcattcattctttca

SEQ ID NO: 315300 - DNA, 4001 bp, Homo sapiens
gttcttcttcttcgagctggtaggactgtcaaaatcaaagccactgaccactgccctgcgataagacgtggaccgcaagcctctccgcagagaccctgggctatccacgtcgttatcgacctcactctcctcccctgcgtgacccaggggtcctcctaggccctccaccatgctgcgcaccttgaggagtctcttgtggggctccacattttgattgttggatttacttattttaatttccgaggccagactcttcggaatgatctgctgcttccccactttgagggcggcggggctgtttgtactcaaaaccacggaaggattctcgaggagctcgttctcctgggagggcagcctttggagggggagtttttgttccgaagaacttttctggggcccaggaaagagcccccgttcggggtcctttgccttccggccggactgcgaacctgacccaggagagtcgttattagcggcaaggccatttgcagtgggcgaaggcaccgggctggcagtcaacccagtaaggtcctcctcgggggtgcagggggcgggcgcgttaggagtccgcggggggcgcagaaccggcggcggcggcggcgcaggcaaggtcaccgcgccatttgctggggatttcggggagccgccaggcaccgctttggggagcttgggtgacttgggccgtcgaagtcgaggagaggcagccctgtactccggggatgccgtcccaccattggccaccgctctccgctgggcgcccagaagcagggggctcctatgtaccgtcctgctgtccgaggcggtgggcacctgggcgggaatctgcgctgcgaggagcgtccctccgtcctccaccgggaaatccgtaattagtaacccgttggggctctggtaggactggggcctcggcttgctccggcccagaacctggtggggctgaggaatcgaccgcctccgccacaaaggggttatgctgttgctagaaaaatccacctcgctctcgccgtccatagccgggcctcgaagtcagcgccgggaggagcaacaccgagttagtcttgcctaaagaggaaagaagttaggaaactgtgcctctggacaaccggggacgcctggccgactcgcgtgctcccagaccggcggtccccctgctgctgcgcaggacacgactgcaccgcacttacccgccctttctcgggcaaaaactgcaccactgcggtgcgcggttcccggcagaaatctgggctgccgcccaggcggattaatccaatcacctccgcgtccctcccgcgccaaaagaccacccgcagcaaatgagcccgccacccattcactgagtgcaagccgaggcacaagaaacttgggacgagttcagctttcttgggaaactcgccgcgggacgctcccttctgtcgccatccagcctcccgccctcatcatgggtaccctcgcgctccaggtgcgcggctcccacgcaaatttaccttctggggcttgcaatgtccggggccgaggagcacccactaccccgtgggtggcccgggtccgggaccgaagcgcagccgcgagagcttaggagagcgctgccgccgaccgcggcgccggcgccggcccgcccccacgcctgactacgcccccacacttggccccgcccccgtttcggccccgcccagatccgcctccatcgcagccagaagcaagaagctgtcttcccgcccccgcgtgcctacaatcagccccagtctccctgggaaaccgacgagcgcacctgagctgggttctgagctccagcgttttggggctagaagttgcggactagtagctgaggcggcacgggagtgtaggcgcgcggggtcgttgccgggggcacagagtgagaacaagcaagggagccctgctgaattgcagcttaggaagccctgaatcctggaggtgcgttgaaaccgagaacgcgcggcgtagtagactttgtgagatgcgtgggcagtagcgcagagttctaacgcagagtcatgccctctcagcattcaggtggtcttaaatcagatgggctcgtcccagtgctgaaaatgcattataatataaacagatagatgggcttgtttgtgcctagagtctttccgtaggaaagactggcagctctgaagagggaaactgggtggctaggaaaccggagggagggagagttttcatataattatttttggtccttgtatgctttgcatcttgaaacctatctgtgaaaaataagctcaatttacactacaaaaaaagtattggtttccaacagtacatagaataaaactcaaaatccttagcatggcttacaagacacttcactactgccctacttcttcagcctagtctttcctccatcactttcttcattatttttttggccacactcaaagtttgacagcctcataaccttccctttcgttccttcttgacccgacttgtcactgcgtcagaaaggccttccctgtcccctccttaattataccattgccccgtttattttcccagccacttgttctcttctatttttgcacttataaaattttgtatatatatatatttatgtgtttatgtttattgtcttttgtctttacacagtaatttgcatgagggcaggggtcatgtttttttttcttctccgtatttccggcacatggtgggcacttaatatttatttaatgagtgagagaatgaatgacaggaatgaagtgaaaacagtgaccattccttccaaagtgcttggttgtcaaatagtagaaagatggctgtgtcttggccaggctcctgctgtgtgacaataatgaggcaaacttgagaagacaaataattttagaccataagagctgtataattgattctattagcaagacaaatgggcccttctccaagttctctttctgcattcatgcattcagcagggatgcagtgagcatccactgtgtgcaagttatgctgcctgtttttgccctagattgaatgcaatggccaaaaatattaagatgtgatctctgggtggtgagatgaaggatagtatgtttcatgctgctttatatttttctatacttaacgaaatatcctggacaatgaagatatattactttgatctgagacattttcataaacaaagaaaaaaagaaacggcatcgaaaaatgtataagaaacttttttttttttagacggagttttgctcttgttgcccaggctggagtccaatgatgcgatctcggctcaccgcaacctccgccttcagggttcaagcaattctcctgcctcagcctcccgagtagctgggattacaggcatgtaccaccacgcgcggctaattttgtatttttagtagagacagggtttctccatgttggtcagggtggtctcgaactcccaatttcaggtgatccacccaccttggcctcccaaagtgctgggaattgcaggtgtgagccaccgctcctggcctaagaaaatttttaagaaagaaattttccacattgggtggaagacatggctgattacatactcacatgtaggtacatagactttttttttaatataaggtgttttctataccaacatgtattgctgttatattggggaaatataataaattaatttcagaagtggttaccgactgacaaatggagtattcacctaattcaaaatgcaacctgtgacctatgttaagaagctgtaaaaggtgatgtgagaaggtggcttttcttgaaattatgttgcttctacaaacaagtataaccaatatttgtgacgacttcataggatcttcttacctcatttccaacagacaacaaaatacctaccaaaacaacaacaaaacaccaagctctggtccttcactgagggaagtttacaaactcacagacctagtgcctattcaatttattgttatctattcaaatctaacctatcttcaattatatgttccactcaaaagaaaggaaaagagctgctaataaaactatgacaa

SEQ ID NO: 315301 - DNA, 4001 bp, Homo sapiens
cagccaataatctgccatatttcactcttgtcccccccaattctgcctgagcttagaaatttaaaagtgatgaatttcacttcttcccacaaagttgcactaaactcggctgtgcctgccagcatcaaagtggccaagagctggatgtacactagcaatcaagagcaaaacacagaattaaaacggaatgacttcttcgggtttcctctacgctcctcctccccactcccaacacatttactttccgcttagtgaatggcgtgccacactcctgcccacttttacctttatccttcccagactggaaaacttctccttgtcttccatcaccactttcagaacaggctgggacattctgttcttcttcttcgagctggtaggactgtcaaaatcaaagccactgaccactgccctgcgataagacgtggaccgcaagcctctccgcagagaccctgggctatccacgtcgttatcgacctcactctcctcccctgcgtgacccaggggtcctcctaggccctccaccatgctgcgcaccttgaggagtctcttgtggggctccacattttgattgttggatttacttattttaatttccgaggccagactcttcggaatgatctgctgcttccccactttgagggcggcggggctgtttgtactcaaaaccacggaaggattctcgaggagctcgttctcctgggagggcagcctttggagggggagtttttgttccgaagaacttttctggggcccaggaaagagcccccgttcggggtcctttgccttccggccggactgcgaacctgacccaggagagtcgttattagcggcaaggccatttgcagtgggcgaaggcaccgggctggcagtcaacccagtaaggtcctcctcgggggtgcagggggcgggcgcgttaggagtccgcggggggcgcagaaccggcggcggcggcggcgcaggcaaggtcaccgcgccatttgctggggatttcggggagccgccaggcaccgctttggggagcttgggtgacttgggccgtcgaagtcgaggagaggcagccctgtactccggggatgccgtcccaccattggccaccgctctccgctgggcgcccagaagcagggggctcctatgtaccgtcctgctgtccgaggcggtgggcacctgggcgggaatctgcgctgcgaggagcgtccctccgtcctccaccgggaaatccgtaattagtaacccgttggggctctggtaggactggggcctcggcttgctccggcccagaacctggtggggctgaggaatcgaccgcctccgccacaaaggggttatgctgttgctagaaaaatccacctcgctctcgccgtccatagccgggcctcgaagtcagcgccgggaggagcaacaccgagttagtcttgcctaaagaggaaagaagttaggaaactgtgcctctggacaaccggggacgcctggccgactcgcgtgctcccagaccggcggtccccctgctgctgcgcaggacacgactgcaccgcacttacccgccctttctcgggcaaaaactgcaccactgcggtgcgcggttcccggcagaaatctgggctgccgcccaggcggattaatccaatcacctccgcgtccctcccgcgccaaaagaccacccgcagcaaatgagcccgccacccattcactgagtgcaagccgaggcacaagaaacttgggacgagttcagctttcttgggaaactcgccgcgggacgctcccttctgtcgccatccagcctcccgccctcatcatgggtaccctcgcgctccaggtgcgcggctcccacgcaaatttaccttctggggcttgcaatgtccggggccgaggagcacccactaccccgtgggtggcccgggtccgggaccgaagcgcagccgcgagagcttaggagagcgctgccgccgaccgcggcgccggcgccggcccgcccccacgcctgactacgcccccacacttggccccgcccccgtttcggccccgcccagatccgcctccatcgcagccagaagcaagaagctgtcttcccgcccccgcgtgcctacaatcagccccagtctccctgggaaaccgacgagcgcacctgagctgggttctgagctccagcgttttggggctagaagttgcggactagtagctgaggcggcacgggagtgtaggcgcgcggggtcgttgccgggggcacagagtgagaacaagcaagggagccctgctgaattgcagcttaggaagccctgaatcctggaggtgcgttgaaaccgagaacgcgcggcgtagtagactttgtgagatgcgtgggcagtagcgcagagttctaacgcagagtcatgccctctcagcattcaggtggtcttaaatcagatgggctcgtcccagtgctgaaaatgcattataatataaacagatagatgggcttgtttgtgcctagagtctttccgtaggaaagactggcagctctgaagagggaaactgggtggctaggaaaccggagggagggagagttttcatataattatttttggtccttgtatgctttgcatcttgaaacctatctgtgaaaaataagctcaatttacactacaaaaaaagtattggtttccaacagtacatagaataaaactcaaaatccttagcatggcttacaagacacttcactactgccctacttcttcagcctagtctttcctccatcactttcttcattatttttttggccacactcaaagtttgacagcctcataaccttccctttcgttccttcttgacccgacttgtcactgcgtcagaaaggccttccctgtcccctccttaattataccattgccccgtttattttcccagccacttgttctcttctatttttgcacttataaaattttgtatatatatatatttatgtgtttatgtttattgtcttttgtctttacacagtaatttgcatgagggcaggggtcatgtttttttttcttctccgtatttccggcacatggtgggcacttaatatttatttaatgagtgagagaatgaatgacaggaatgaagtgaaaacagtgaccattccttccaaagtgcttggttgtcaaatagtagaaagatggctgtgtcttggccaggctcctgctgtgtgacaataatgaggcaaacttgagaagacaaataattttagaccataagagctgtataattgattctattagcaagacaaatgggcccttctccaagttctctttctgcattcatgcattcagcagggatgcagtgagcatccactgtgtgcaagttatgctgcctgtttttgccctagattgaatgcaatggccaaaaatattaagatgtgatctctgggtggtgagatgaaggatagtatgtttcatgctgctttatatttttctatacttaacgaaatatcctggacaatgaagatatattactttgatctgagacattttcataaacaaagaaaaaaagaaacggcatcgaaaaatgtataagaaacttttttttttttagacggagttttgctcttgttgcccaggctggagtccaatgatgcgatctcggctcaccgcaacctccgccttcagggttcaagcaattctcctgcctcagcctcccgagtagctgggattacaggcatgtaccaccacgcgcggctaattttgtatttttagtagagacagggtttctccatgttggtcagggtggtctcgaactcccaatttcaggtgatccacccaccttggcctcccaaagtgctgggaattgcaggtgtgagccaccgctcctggcctaagaaaatttttaagaaagaaattttccacattgggtggaagacatggctgattacatactcacatgtaggtacatagactttttttttaatataaggtgttttctataccaacatgtattgctgttatattggggaaatataataaattaatttcagaagtggttac

SEQ ID NO: 315302 - DNA, 4001 bp, Homo sapiens
gagatgtaacggggcaagaacctccactttcctaccagaagttcagagtccacttttctggggcacaggcctcatggaaaatacaatgtaaggggaaacctctggaaaaataactgtgcttcaagtgcctcgtgtagatttcaggacgttcagtggggctccaggttcagagctcttatctgtggagattcagaagacagaaactaaattgccaagaagaaagataccaaatgggtgcagaccaggaaaactctacagatggagggggcaatctgctagaaatgaatgaatgtgggagaaggtgacaagatcaggtccctggacccttaaatagactcccacactcacagagactagacaatgtcagactgtcaggagacccaaggcttaaaagaatcaagtgaaatctacccaccctccccccaaccaagaggcaaacattcaatcacaccccagagcttccagagaaggtccaagaccccatttcccaacagtgtccttgacaaagttcatctctaatcccacattctgagatatactttgcacaaggctagttagccataggaggtgttacagcaaagctcaaatttcccagtgcggaagggaacaccatggctactgtgtaagcaccaccagctccttaccagaataaggggaaggagcaactgcctgcacacccacctcattgagaagctagggctgtgcacgcgctgttagatgtcagtgataataatcacaagagcagctaacacagaggatttaccctgccccagtcagtattttaagcactttatccctatacaactctttaaggtttgtactgttatcatccccactttacagatgagaaaactgaggcataggtaagcgaagtaacttgcctaggactacacagctaagacaaagacctagcaaagctccccttctccacaccccagggaagaaagtggttatacctgggtagtgcatggaacgcttaaaaataagtttctaccggtacattcagggcaactaccgtctggcagttctcgcgtcctcgcccagtgcgggaagcaagcctgggccaggcaataaatccagcaagccgagtcctctaagaacaaggcgctctgtttccgcaacattcaagcccgtgatggggctgctgatagtgcaagagcagctctccaccaccgcaaagcccaagggaacccgtttccactcggctcaatcagcttccagcctcagaaaacgctcacccgtctctggctgcgaggcacccacgctgaccttaaccccttggcgtcctccaccctggtgtcctatctcgggattttctggctgctcggtttacaagatgcagccgccgggacaagggcctcaggcaggctgggacggcgcccgccgcccggagcgccctgagcccggctcccccgccgcgaagtgacccgcggccctgtgagccgccaccagcagcgcccgacgcgacgctgacctgcgggtgccccgcggggctggagaagaaagttgagcgaaaggggcgcgtcccaggacaggtggcacctccctccccggaagtggctccgggaattttcgctcaaggggctacccggggaacagagtcagggtccccagcaggagcgacggctagtcgaggctggcggtggcactgcccacctgcgctgcgcccagtgcgcccccgtgcgctgggcataccccagaccagggagcgctcagggcccgccggggacgccgagacctagcagggtaactcggaggtgggagtgggggtccagctcggggaccagggcaaaggagggactagaccggaagacggtctcactccgggagacctagcgggggtgtcccgccaaaggggtgtctagccggggagggtctagcgcgggagcgggtttcccgactgcttcccgcactcacctcgacccccgcgctggttcggcctctccaggctggaaaactcaccgcggcggcggcggctgcggcggcggctcccctgggctgggcggggccgggggcggggaggccgggccggccacgtgggcgggaggcgggccggggacccccgcgggcgccggagccgggcgacgcaggacttggacgtggccacgcccggccaccgctcgacaccccagctccccatgcacggcctaggtctacagggaggctagaaagaggagagcggaggccccaggacatccctcccccgccgccacctaaatcagactcaggcggagagaattgaccgagtcggaggaggggtaaacagccctgcccctcgctcccactgtcccgccagagaacgcgccgcggaaaccccgagggcgggtcaagggccaggtacccgagtgggagtggactctcgtgccggggtggtaggggctaccctagcggtccagggccagagcctgcacgcggcgcccccacccccaccgctgggctgatcttgggtgtgtcagatcttgcccaagcctcactttcctccacggtggaggtgagaatgaggacgagcctggagctgcgtgaaccccggcgcccagcaagctctcaggaatcgccggcctgtaggtggacgcagagcctgaaagtgaggggcctgggtcgtgcatacggaaataaatatgggactctaaataaagcgagtttctgcaggcattcattcattcaacagatgaacgcctacggtcttcaccacctcttaaaatcagaaataaagaatgccccagactgtagttactgggctcaagaaagtgtaaactctgatgctaaaaataaaaaattcatcggttccccccatgtgccagcggtgcattttaggtgcttgatcgaagttaacattaacgacagcctttaaggtggagggcctgtgcgggcccgcttctcaaatgaagaaatcgaagcttagcaaggtgaagccagcccccagagccagaggatcacagtctggcccctgtttacagaggaaagagcatcagcccaaagtactaagactcttgcgcaggtgcaggaagggtgtgagggttgagagctccctgggagaccacctgtagtgacagcagcagctgggatgcagatcttccagacttacttcacagcaacctctgccttctgttgcaagtgctcagccttgcagtgctgggtggcctcttcctggcctgcagcccaccttttgggccagaaactgggcatcttgagcaaaccaacttctgttccaacagctgcaacttcatcccactacagcttctgggggttccttgaccccagactcaatgcgttatgacccaccagtttcctattcagggaacacactctctccagtactccgtttccaaggacaactcctgtgtccagacccctagtcctcaaccttttccccaagaacccttttgtcattctccttcctccctaaagcagaagatccctacgacaaccaggcgtgtttatcaagtaattacatttactaagcaaagggcttctcctctctctgaagagcctgctccctcatctgagcccagcagtcccttcagatccgccagccaacacctggtgttctacccaggcaagcttgtcaaagagaaaagttttctttgcatgagattcaatttaacaattatttgagcatctactacatgccacacactgtgctaggctctggggacagtagtgactggataccaagatagacactatccctgaccttatggagcttatgagctgatgagggagatagtcgactgacccctcaccaggcagcaagggatcaggatgtggtgacagacacctggaagaagtactggcccaggcagagcacaggtcacactgctggaagtccatggacgggggaggtaaggggagaaagaggctggaggggccttgatggacaaagtgagacattagaccttgtccaccgaaaggttcagacagagacatgatgggatgtgagctacagtttgaagacatcacactggctgctgagtgaaagatgatgtggcaagtgagtctcc

SEQ ID NO: 315303 - DNA, 4001 bp, Homo sapiens
ttgactgaagcgctttaatggcgtggccttcacgggcgggatgaggtttgctagcgacgtgactcgggaaaggggtttgacccgtttattactaggctcctatagagttaaaaaaaaaaaaaagtaaaatgtcaaggtcaattgcaaagacaacataactccatcatacaactgtgttccactccacaaggtactggttgtacactgatctatggaatataaagtgtcacgtctcactctggctgtatggagatgacctggcttaggaggcagggaaggagaaatggcaggcaggggatgtcaacagaggcagtatctgggaagacagaaaaggggcagggatctgctccttatccctcacccccagcatctgccagcttttaattcagaagcttccacttagtagaaccagtctccccaccccttctgtagagaaaagcagtgtctgatttctcacccaatgaccttgtcttttgttgcttctggtttcatctctttaaaaaccttttccccatcttgcctaaagccactcttatgcaatggctttcctaaagcaccaagattgttttcttacttcattaaattaaaaaaaaaaaatttaaaaaagaagttctattactgggctcttaagaaagcatctttgtatctacagcatatttgaaatgcacatattaatatttataaattataaccagacggcaaaagaaaatgtatagagaaaaagccctaccacggacatcggtttctatactatatatagccacaagttttgaaaatcacctccacataaaacattagttgcaaatctgcaagttacttcaaaccaggctgataggtgggagggcgcctacccattccaaggactttgcagacaagaattacataaataaaaataacagcctggccaggcgcagtggctcatgcctgtaatcaaagcactttgggagggcgaagtgggtggatcacgaggtcaggagttcaagaccagcctggccaagatggtgaaactacatctctactaaaatacaaaaattagctgggcgtggtggcaggtgcctgtaatcccagctactcgggaggcgtgggattgcttgaacctgggaggtggaggttccagtgagccgagattgcgccactgcactccagcctggttgacagagactctgtgtcaaaaaaacaaaaaacaaacaaacaaacaacaacaacaacaaaaaaaaaacaggctatggggaagagaatgatgatagacaaaacattttacaaagacaaagagaagagttacccttgtcctcctaagctccatctgacctgtagtagatgctagacagcacatgaagataccaaattttgatgggcaaagccaaagtagccaattgtggtggcaaacctcaatcatttccagagggagcctctaggtattcatctttccttttcagccattgctttcaaagtttcgagggttaaggcagaacttcagattctccaggatatttctgcatccccgttctgaacatagtaggtgcctggaaaaatctttcgtgaatttggaatcctgctgagacactctcatgtcattttatgcccctgccagtctcagaaatcaacagccttctttgaaatagactgtctccaagctttccagcatttgcatataaaaatttaaaaacttaaaaagaaaattcaatacaatctcacaatgtggccagaaacgattccatgatttctcaaagcagttaaatacttttccaagacggagaatgcaaccaggctgctgggtacctctccagcttcttagcgtgctaagctgaacagacagcagaaaactctcagaacactaggaaggctcagttccaaaatgcagaggatgaatctcccaagatgaaagccattgcgtgacaatgatttaagtgctgaagggaaagatctgacagctcttctgcttcaggtgacaatgcccttcaggatgctccctgtccagtgccaggctcttgagcatttgtgctcagaggagggtttaaaacatttttttacgtcagagctgcaccactagcgtactgaatacacacacacacacacgcgcaagcacacacacacacacacacactgcctcttaagcatcccctgaatttgtctaaatggctcctgctttgggctgaaaatgccaggttggtggcacaaactgcattacagcaagtgaggtgacaaagattccctgagggagcaggacctggtctcagagaatcctgcccgctgactctgagtctttctctttctctctctcttttttatggttaaagctgctgggtcacagatttttatatcagaatggggaagctgaaaggcaaacgccaactgggttcccttgttttaaaaaggggccagagagcactgcacgcttgacaggacgggggatgatccagctgtgttccacttgctgtgtcatcttttctaaggttctgctgactttgctgtccattttgcatgacccagtcggacaggcattttctgcacagctataagatgtaggttcaacacaaatcccagcctctctgaaggttgagtgcagtgctgctacgtgagattgtaattaaaactgatttcctaaggcattgccgatttggatgtaaacatcaggctgctctctggcaatctgacattcccaagtaatgaacaattgaaccagaagccgttgctgtgtgatttagtgctatgatccagcaatgtaagcaggtgcaatttcaaaaccagaacacttacaggttattggatctatgggggaggctttatgcctaacccacatgagtaaaatatgaattatggtgttctccttgaggccttctgtgagaatagaagattaaaaaaattcctggcctcattagatttttcttttccatttactcaatatgtctccagctacattttactgctgtctaaagagagccctcagggaaaatgtttccagattcttgttaaatagctctactgagaactagcaaatgcaatcgtagggatgctttcaggctttacagagaggtaacagaacacaacctgcagggacgcttcctagtccaacaactcagctgccagaccaagctgggcaaggtcaatgctaaacccaggaaccaagtgtcctgtttcaagtgcagacaccaccccccaccacgtgattttaagatagggcagaagggtatctcactaaagtttaaaaaaaagaaaagaaaaaaagacactgagcattctgtatagacagtattttgtgaataacagtttgtttcatcttttccaggccttataacatttttgtttctcttgtcttattgcactggctagaaccacctgtatattgttgattacaagccaagacagtgggtatactagtttaattcttggttctacagtgattattaataagatttcatcattaaatatttgctgagagcatgggagaggcaccctttaacacgcagagaaagttcttttctgtaccaactttgctgtgaatttttatcatgaattggcagtggcttttatcaaatgtttgttcttcatttagtcagaggacaaggaaagaaaaaaaggaagagaagaaaagaagcgacgggtgggaagaaggaaaggagagaataaaggcatacaggtcatattttttcataaagaaactgatttgacaatttaaaatatcttgtgtttaattatgaacaaaggagaataaaacactatgcaattttattcttagtatgagtttttttattaaatggattttgatattccttctctaggggatacaatgatttttatcctctcctcattcttcccctcaacaggtaaaagccaaagcagactatatgcaatgtaagaaaatgcctatcgtaccaatataatctagcatacttttttattcctccaaaaatagttccattgaaacagactggcatacaggaactccccactcattttccctgcacttcctttttgcagccagagtggggtgaggaatagta

SEQ ID NO: 315304 - DNA, 4001 bp, Homo sapiens
ctcaaatctttcagccttgtaatacagagggtagttttcaatcactattagaggtaataatgaaatgcaaaatatgtactacatataatcatgcaatagtgtcgtatattcacagagaaattgagtatttgtttctctgttaaccttcagagctccacgcaatattaccaccatgtacaataacggaatattcttaaaggaagggaattctgacacacgttacaacttgaatgaacccagaggacattatgcaaagtgaaataagccagtcaaaaaaagacaaatactgtttgactctacttatatgagatacttagagtaatcaaaatcacagagacagaaagtagaatggtggttgccaggggatgggggagggaagaatggagagttattgtttaacgagtatagagtttcagtttgcaaggtgaaaagagttctggagatggatggtggtgatggttgcacaacattatgaatgtatttaatatcacaaaactatatacttaaaatagtcaagatggtaaattatgtgttatatgtattttaccacaataaaaaaaattgaaaaaaaattagtatgtctagaatggtcatacacaagagctggaattagggttacagaaatcagtcccaggaacatagttctgatgagaagaatagaaaaagcaatgggcattgcctttaaaaaacagttttggcaggccaggtgcagtggctcatgcctctaaccccagcactttgggaggctgaagcttgagctcaaggaggattgcttgagctcagagtttaagatgagcctgagcaacatagtaagacccacgtctccacaaaaaaaaatgaaataattagcagggcatggtggtgtatgcctgtagtcccagctactcgggaggctgaggcaagaggactgcttgagcccgggcggtcaaggttgcagtgagccgtgattgtgccactatattccagcgtggatgacagagcaagattctgtctcaaaaaacaaaaacaaacaaacaaataaagaacagttttggctcatccaaaactttaacaactacctctacaaaaaacaaataaataaaagggatagggaatgtaaccttcagagctcctaaccattcttcaacccatggaaatataacatttccagacactctttccaaaataacccaaaccaaaaaacgatgttcttaatgagaatggtatcaagtctgagtctccactgataatatctgacttcactctcccaataataaacagactcaaaacaccaggatcactttagggaaatctacaaaacagttgctccaaccagcatgaacttctaaaactgagtttagccatcttccaatccaaagaaaaagagaagatcttggaaatccactttgtgattaaatagcaacaacaaaacagaaggcagatgcatccttcttttccctcttttccttcccattaattaaaaccattctcttacaaaaattaaaacagtagcattgcacagcagagcgtgaaaagcccttccctttgttcccctccaatcacttatgctaaaggaggccctgacagctatgcacgccactcagctcaccctcgcaaccaagcaaagccatctgcggtcttaaacacagccacacagtgctcttctgattcatacgaaagtgaggcgggaatctggctccatcatcccaggtgcttttaacagcagctccctgatcagtttcttggaaggtaaagagaacactgcatcctcccacacctcagatcctggcaccaccccacccggctcgggtgggagttgagagccggcccatcccaggctcagcagcagggggcttacctgcgaacggacaaagaggcagcaccacaccatggggcgctctgacctcatccacccggactcaccggctcctaactgcagtggagccctgtgcacaggattctctgaacagggctgagcatagtttccctgaaggaactcctccccgccacttgggctgcatgacaggaagtgacaggggccatcagttacaagtgtcagaggctgagagccgcaccagtcaagagctccccacctctcctgctactgctgcttttgcagagcactctttgggcattcaaaggtacaccagaagttcagtttctgactgacaatccccagcctgtaagagacaaacagtgctcactgggtccccaccaaaagcaatgtgaagcatcccatcggctgcagcggctgtgctgcctggagctttgcagacccaaacactggggtgaaatagaaaataaagcatcactaggagaagggacactgggaggagagctttgggtcttcaaagaggaatcaatgatctacttgaactttacccaagaatcagtagccctgtccgggatacagagcccacactgagtcgcggttcaaaagcaactacacacccatccgtttctttttgtcttatgcaaacctggcatcttctcttcagagccctttcaaaatagctgcttctggaaacctccctttcaacttttgtcatggataacaagaggtcttcctgctcagagctattatggaaataattcatggctgacatttcttgttttatgaagtggggatctcaccagaatgaacatcttgctccagttccttgccttataaaaaacccagacctcttgggtgaggtagacttgtctcataggaaactacaaggtttcagattgaaaactatgcctggctcactccttccccacaaacaaaccagcactctcaccctccttgcacattggcagaaggtctcaaactcaaggagacataactccagtgtagttctcaattatttatttatttattttagttatctaatggggtagtatttgacttgcaaaaatcttcctaattacaaattttagctgttaagatttagcccagggtttcctggggccttcttacaaatgcacggatttttaagagccttcctctgtctcaagcctgagtaaagtctggggacccagcaaagacagcaggttcatttgaacaacaagcttccggtctaacagaaggagattaaatccaagacttttatgagaaagcaggctctttccattcacgttgccagaaatttgcaaaaagtgctgaggggtccaggaaataagtgagcttggcaaatgcattttcatggggacaaagtctgagaagggttctcagagccagagacacatgggcagcgttctgatgggtgttctaggcaaaagaactggcaaactcaacagcaaggcagtgcagaactacagggtattttggaagacaccaagtactttaataggtctggaagctgaactgacaggcttgggtcttgcttcaaaaagtgtgagggaatcacacctgcttagagaaaggaggaagtgaaatcactgtaaaaagccttacgcctttcaggcaagcatctgggtcaccatggagctagcacctggaagcactcggtaatgagtgtcagatcaaatgacagtgtccactgagaggtgggtttcagattgtccttgggattccctatttcctaaagcctgactccccacaaagcaagctggttaagtggtggctggtggaggggtaagggcaggtattcctaaggcgtcttgttccagcctcctacacaggaagggtcctaaatttgaacaagcctgtaaacaacttgagattagctagctttggggacaattcagccgatgaagaaagacagtgccctgggaaatgcgggaggctccatcacccagccattcctctcttggagtattttctgacaagccacttcaaggagtcccagcagccaaggccagcctcaccccagtaaggattcactggaaatgtgagacgaccagggcattgtacgttttatttctttggagaggaggaaggaaacattcacatgaacaaatcctagaatgattcaacctaacttccggctgctgactgaatgggaaagaagaactgaaacccgtgggctgcagcactt

SEQ ID NO: 315305 - DNA, 4001 bp, Homo sapiens
gaggaaaataagtcatattttatagtctagatccagctaccaatgaagaaaattaatatttgacatgtgataagtttcatatttgtgatatatagacatatctatattctatgtataagaataaaatgaaattaagcaggcaagttttacctaagcctttagctaaactactcaaaaacacaggactaagtaatagtaggaagggactggttagagtcctcagctatcctcactattcttttctttggcccacttcaatttattaatttattggttatgcctttcttccttacaagtggagtttgagtgggcaccaattgcgctgctcctatgttgattaaattaggaagttcccactgaaaaaatattatatccattccaggcctgaccaacctgaattctatgcaaatgccactagggccatcacactttcacagctgctggcaacaaaaactctttgtgataatattcgactgagctggagtgtagggttgggtttgagtgagggagaagttagtttgtgctcagcgtatagaaagctgaatacaaccagagactgcttggagtcctgtcagcctggagcagctcttgctagaggaaatgaatctttgatggtgtgctcccgaatatacatgattcagtgagccaagtgcatacagctgagcagacccaaggaaggcgagtgggtggaacctcaagaatgctgtgacaaggccggatgcacacctgccttcagcctttccccagtggtggtggtgatgtttgatgttcgcagagtgaggtgtgggagagtggaaagctcccagatacacgcatgagcggcaatgactagctgggtcctgtgggttccaccgcagcttgaccacagcaaagctgtaatctagcgaaagcgactgtattccctaagaccctcaaagagagggatgctttctcctccagctgaacccaacctttaaggccagtgagctatgtgccagagaaataacacgcaagaggaaaaggcagactaaacataacctgggagcactccttcacatcgcccgcaaggcacaggaaagttcccagaaagagaaatgtttccaatgttccaaggcagctttccattgaccctaaggactttaattcattttcaagatccatgtgggagacactccaatttactcatttagccccagccccccggctgaatgaccctcactggccacaggtgataggcagaggcgctgtgtcctgtttttgctgccaaagggctgcaaggccaagtctgacaggtgagagggctggtacgtccctctgctctcacaacccaggcaaaaaaaactcgcttaaagggtagcgacactggggcttgctgacacttccctgacactggggcttgctgacagtaggagaaagtccctctgagagtccagacagaagatggacagtctgagagccctgcaaaggcaaggaggcagttgctcccagaccggcaggtagagggacagggagagaggaggcagctagtgcttggtccacagagaaaaagcgagagaaaaggagacagggtgagagatggcgacggggagacacaaagaagactgtgggagagatgtagagagagaaagtggcacacacggagagtgagagatggaaacagagacagtgacactggacgggcgccgagaatgggagatggaggcagacgagacaggcagatgacccatagaggtccaggtgcagggcgcggccctacctcagcgtccttggccggaccgctggccgggggtagctccaggctgcagttcgctctcttgaccgtgaggtagaaggggtaatccttggccaccatggcggctgccgggcctgccctttgggatgtcaccgctgaccctaggcgactacaaaactcccaggcaaaagggggccccagctccacgatgccgggcggcggcggcgacacggagaccgacagccggcttctagccgggcaggactcgactgggctccggagccgagtgggcgggaccgtgccagccacgccttgatgggtggggagggggcgggccgccggctcggcaccgccccacgctgccgggagggcccacgtgccgcagcgcggacacctcctggggctgcgaggggcgtggggcggtcccgcgggtggagagggacctctctctccccgctggtattcgactccgggcgcccccgcagagcgtgggccgcgattgcggggcaggcagaccccatgatagctcctttcgggctctttggcactctccgggtgaaaggctgctggtagaaaggaggctggggcgaaaccgggcaacggggagaaaggaggctgtagtgacacctggaggcaggaaggagcctggggggaaaagcgagcgttttaaaagcccacattagaaaggggtggtgttctctcttaccctgttcccaggccactgcacgttttttttgttttgttttgtttttgtttggttttttaaatgaatgtcagtggaatataatctacaaatggcaaaatgcacccattttaagagtaccgtttgttgagttctgacaaatgtaaacacccgtataaccacctccacagtcggtatacgaaacatttccaccacccccggaaaattccctcgagacctttcccactttgcaccaacttttaaatttgactagcatattcagaggctgcctgacactcgagggcaatctgacagagtgtccttcaagtataaagctgtgcatggatgacctggcactaccacacctttctggatcctttttggagaaacaatgacattataaatgcccaagaaggcgattgatcttaaggttgtttgcagcagccctgtctggggcagtaaaaaataaaaaataactggaaacaatggtaatatatccatcaatagggagtgcttaaataaactttcttcactgtgtaataccgcttagcagcagtgaaaaaggagatgggtctatgggtgtggcatggaaagatctccaatgtattagactcagtttaaaaataattgcagactaagcataatacaataccatttgtgttaaaaaaaaatacaagtttaccaaagaatatcatatattttctataaagacatatttgtgggtaaatagcattgaacactgtctacaagaatccacagcaagcttttaccagttcccctgtggctgaagggaggcacctgggtttaaagaattaaagatagtgaacaaaagggacttaagcttatagctcatgttttaaaattttttataagaaaaatacagcctgggcagcagtgaaaccctgtgtctacaaaaaaaatacaaaaaattagccagggatggtggtgcacacctgtaatcccaactactccagaggctgaggtgggaggatcacttgagcctgggaggcagaagttgcagtgagccaagatcataccactgcactccagcctgggtgacagagaccctgagaaaaaataaaaaagaaaagaaaaaaagaaagaaatagaggaaggaagaaaggaaaaagaaaagaaaagaaaagaaaaaagaaaagatggctaggtagagtggctcacacctgtaatcccaacactttggaaggccaaggcagcagtgtggcttgaggccaacagttcaagaccagcctaagcaacatagcaagaccctgcctctacaaaaaaatttaaaaattagccaggtatggtagtgcatgcctgtagtctcagctaatcccgaggttgaggtgggaggattcctgagcccaagagttcaaggctgtggtgagctatggttgcaccactgcactctagcctggtgacagagtgagaccctgtctcaagagaaaaaaagaaaaataccttcattcatggcacttcttgggaaattatagttttttaaaatattataattatcatattttctttcttttttttttttttgagatagggtcttgctttgttgcccaggctggagtgtagtggcatgatcttggctcactgcaacct

SEQ ID NO: 315306 - DNA, 4001 bp, Homo sapiens
cactggattacaggcgcccgccaccatgcctggctaattttttgtatttttagtagagatggggtttcaccgtgttagccaggatggtctcgatctcctgacctcgtgatccgcccgcctcggcctcccaaagtgaggaggattatttgagtccaggagattgcagcgagccatgatcacgccactgccctccaaccagcctgggtgtaatcccagctgtaatcccagctactcgggaggctaaggcagaactgcttgatctgggagatggaggctgcagtgaaccgagactgcaccactgcactccagcctgggcaacacagtgagactccgtgtcaaaaaaaaaaaaaaaaaaagaaattgctcacaggcttctcaccaaccaaatatttaggtggggaaaactccaggctcctccaaaaaaaaaagagagagaactccatttcatactaaatgttctaggtgcacatttaaatgaaaatttaatttttaatcatctcaaagttaaatatccgaattctacttgaaaaagtgggccgggcactttttcaaaaaaaatttttttaaaggtcatgcacagtggctcacgcctgtaatcccagcactttaggaggtcaaaccgggaggatagcttgagcccagcagttcaagaccagcttaggcaacctattaagatcacgtatccacaaaaaattttacaaattagccaggtgtggtggtacgtgcctgtggtcccagctacttaggaggctaagaaaggaggatcacttgagcccagaaagtcggggctgcagttagctgtgatcgccgccactgcactccagcctggtgacagcaactttgtcccgcccaccaaaaaaaaaaaaaaaaaaaatttcctccagagccaaagtcacatgttcaggggacctaacaaccaaccatcctgggcttgcccaccacgcacagaacacgtaagttttagtgagtctgaagacgtttactccagatatgatcactagcgctgaattcaggtcatttactaactacacctccgaagaaaaacgacttggcacaaaactagaaatcagcaatttcgtttcaaaatcctacactttgtatctgtcttttctaatacggtgaccactagccacatgtggttatttaaatttaattacacttaaaaagtaagtaaaatttaaaatttagtttctcaggtgcactagcctacaggtcaaatgcttaacggccacgtgtggctagtagctaccatgctgaacagcaaaggtaaagaacatgtcgctatgacagaaagttctatgggaccaggcaatgaacagtactaaggagaagtcatccaagaacgcggctgcccaaccagcttctggcgaggcggcggcacagctccggggccgcacatccctaggggcgccgcgggctccgggatattcgcgcggacgcggagcccgcgagctggggataccctccacaggcgggcgttaaaccgcgcgggcagcgctgcgagagctcccaaagatgactcgagtggtgagccccgaggcggcgcgtttccccgccgcgccagacagggagagagggcctagatgtgccggcgccggttggtcagaggcggtggcctctgacctttccgagagctgagaaggcggcgggaggaaaaaaggcagacacacgctgggcgcccggccgctgacggcgggtaatgctcggacaacgtgccggcgacggggagcgcccgggcctcccgggcgacggcgaaggcggagtcccggcccggccagggaggcgcgcggagaggcccccccagcggccagccaaggtaaacaaggccgtgacgtgcgccgcgcacttaccgggagctgcggcctcgcggccgctgagcccgaacaagccagaccgggtcaggccgggccagagggaccggattggggcgaagcggcagcggaggcggcgggccgacgccggtcaagcccgcgctgcttcctccagaagagtcgtccccacagctccggaagtgcttggcgccgttgcgtcacttccggatcggggtcgacccacggtcgctcgggtcgcgacaggctcccggctagagggcctgtttagcgccgcctccttgaaacttagcgctctgacccagagtctgaccagggtacggcaggcgccgaccgcgtctggagccactattcgcctaccagcgtctcccgtcgagatgtttttaaccagcgcgtttctcaccggcttctcatttcactgtttgtactccgggatcgggcacggagaagacatcctggcgtcagtggagcagataaccattgtttctcggccgctatctggtcagaggggagctgggccgggaaattctgcctacaccccgaggcggtcgcagggtggccccagagccgcaaccacaccaggctttcgcttcccctgccgaggcctcgttcgccgcgcagttctccgacttacggtcaccgtgcaagattgcatcttaactgccttgcttgcagtttcttttcacagtataggagttgtcatcatgacttccagttaccttctgggaccggttgtcaaatgatgtggctagagacggaggctcactcagattgttgctgcaccacaatggaaatgccagtatgaagccgctgatgttaggaaggctccaggttgtgcaattccatagacaacaaatcaaatcatttccaaccatactggagtcgcgtatatacatattcaagacacctgtgcaggccgggcgcggtggctcaagcctgtaatcccagcactttgggaggccgaggcgagtggatcacgaggtcaggagatcgagaccatcctggctaacacggtgaaaccccgtctgtactaaaagtacaaaaaaattagccggacgtggtggcgggcgcctgtagtcccagctactcgggaggctgaggcaggagaatggcgtgaacccgggaggcggagcttgcagtgagtcgagatggcgccactgcactccagcctgggcgacagagcgagactctgtctcaaaataaaataaaataaaataaaaaataaaacaaataaagacacctgtgctggctggtcgctgtggctcatgcctgtaatccctgcactttgggaagccgaggtgggaggatcgcttgagcccaagaatttgatgtagtgagacccccctcctttctacaaaaaaattaaaaattagctgggcgaggtggcacacacctgtgcatcccagctactcagggggctgaggtgatataggatcgcttgagccgaggaggtcgaggctgcagagtgccaagatcgcaccactgcagtccagcatcggtgatagaaggagaccctgtctcaaaacaacaataacaaaccatacaatgtagaaagccattaaaaatcatgccgcgtggccgggcaccgtggctcacgcctgtaatcccagcacgttgggaggccggagccggcagatcacgaggtcaggaattcgagactggcctgaccagcatggtgaaaccctgtctctactaaaaatttacaaaatttgccgggcgtgatggtgggcgcctgtagtcccagctactcgggaggctgaggcaggagaattgcttgaactcggcaggcggaggttgcagcgagcagagatcgcgccactgcactccagcctgggggacagagcgagactctgtctcaaacaacaacaacaacaaaaaccttgtcgggtggactgctctgcctatggagtagcaattacttttttttttttttttttgagacggagtctcgctctgtcgcccaggctggagtgcagtgagagagccgctatctccgctcacttcaacctccgcttcctgggttcaagtgattctcctgcctcagtctcccgagtagctgggactacaggcgcgcaccaccgcgcccagctaattttttttttttttttttttttttgacggagtctctctctgttgcccaggctggagtgcagtggcgcgatctaggctcac

SEQ ID NO: 315307 - DNA, 4001 bp, Homo sapiens
tgccggctccggcctcccaacgtgctgggattacaggcgtgagccacggtgcccggccacgcggcatgatttttaatggctttctacattgtatggtttgttattgttgttttgagacagggtctccttctatcaccgatgctggactgcagtggtgcgatcttggcactctgcagcctcgacctcctcggctcaagcgatcctatatcacctcagccccctgagtagctgggatgcacaggtgtgtgccacctcgcccagctaatttttaatttttttgtagaaaggaggggggtctcactacatcaaattcttgggctcaagcgatcctcccacctcggcttcccaaagtgcagggattacaggcatgagccacagcgaccagccagcacaggtgtctttatttgttttattttttattttattttattttattttgagacagagtctcgctctgtcgcccaggctggagtgcagtggcgccatctcgactcactgcaagctccgcctcccgggttcacgccattctcctgcctcagcctcccgagtagctgggactacaggcgcccgccaccacgtccggctaatttttttgtacttttagtacagacggggtttcaccgtgttagccaggatggtctcgatctcctgacctcgtgatccactcgcctcggcctcccaaagtgctgggattacaggcttgagccaccgcgcccggcctgcacaggtgtcttgaatatgtatatacgcgactccagtatggttggaaatgatttgatttgttgtctatggaattgcacaacctggagccttcctaacatcagcggcttcatactggcatttccattgtggtgcagcaacaatctgagtgagcctccgtctctagccacatcatttgacaaccggtcccagaaggtaactggaagtcatgatgacaactcctatactgtgaaaagaaactgcaagcaaggcagttaagatgcaatcttgcacggtgaccgtaagtcggagaactgcgcggcgaacgaggcctcggcaggggaagcgaaagcctggtgtggttgcggctctggggccaccctgcgaccgcctcggggtgtaggcagaatttcccggcccagctcccctctgaccagatagcggccgagaaacaatggttatctgctccactgacgccaggatgtcttctccgtgcccgatcccggagtacaaacagtgaaatgagaagccggtgagaaacgcgctggttaaaaacatctcgacgggagacgctggtaggcgaatagtggctccagacgcggtcggcgcctgccgtaccctggtcagactctgggtcagagcgctaagtttcaaggaggcggcgctaaacaggccctctagccgggagcctgtcgcgacccgagcgaccgtgggtcgaccccgatccggaagtgacgcaacggcgccaagcacttccggagctgtggggacgactcttctggaggaagcagcgcgggcttgaccggcgtcggcccgccgcctccgctgccgcttcgccccaatccggtccctctggcccggcctgacccggtctggcttgttcgggctcagcggccgcgaggccgcagctcccggtaagtgcgcggcgcacgtcacggccttgtttaccttggctggccgctgggggggcctctccgcgcgcctccctggccgggccgggactccgccttcgccgtcgcccgggaggcccgggcgctccccgtcgccggcacgttgtccgagcattacccgccgtcagcggccgggcgcccagcgtgtgtctgccttttttcctcccgccgccttctcagctctcggaaaggtcagaggccaccgcctctgaccaaccggcgccggcacatctaggccctctctccctgtctggcgcggcggggaaacgcgccgcctcggggctcaccactcgagtcatctttgggagctctcgcagcgctgcccgcgcggtttaacgcccgcctgtggagggtatccccagctcgcgggctccgcgtccgcgcgaatatcccggagcccgcggcgcccctagggatgtgcggccccggagctgtgccgccgcctcgccagaagctggttgggcagccgcgttcttggatgacttctccttagtactgttcattgcctggtcccatagaactttctgtcatagcgacatgttctttacctttgctgttcagcatggtagctactagccacacgtggccgttaagcatttgacctgtaggctagtgcacctgagaaactaaattttaaattttacttactttttaagtgtaattaaatttaaataaccacatgtggctagtggtcaccgtattagaaaagacagatacaaagtgtaggattttgaaacgaaattgctgatttctagttttgtgccaagtcgtttttcttcggaggtgtagttagtaaatgacctgaattcagcgctagtgatcatatctggagtaaacgtcttcagactcactaaaacttacgtgttctgtgcgtggtgggcaagcccaggatggttggttgttaggtcccctgaacatgtgactttggctctggaggaaattttttttttttttttttttggtgggcgggacaaagttgctgtcaccaggctggagtgcagtggcggcgatcacagctaactgcagccccgactttctgggctcaagtgatcctcctttcttagcctcctaagtagctgggaccacaggcacgtaccaccacacctggctaatttgtaaaattttttgtggatacgtgatcttaataggttgcctaagctggtcttgaactgctgggctcaagctatcctcccggtttgacctcctaaagtgctgggattacaggcgtgagccactgtgcatgacctttaaaaaaattttttttgaaaaagtgcccggcccactttttcaagtagaattcggatatttaactttgagatgattaaaaattaaattttcatttaaatgtgcacctagaacatttagtatgaaatggagttctctctcttttttttttggaggagcctggagttttccccacctaaatatttggttggtgagaagcctgtgagcaatttctttttttttttttttttttgacacggagtctcactgtgttgcccaggctggagtgcagtggtgcagtctcggttcactgcagcctccatctcccagatcaagcagttctgccttagcctcccgagtagctgggattacagctgggattacacccaggctggttggagggcagtggcgtgatcatggctcgctgcaatctcctggactcaaataatcctcctcactttgggaggccgaggcgggcggatcacgaggtcaggagatcgagaccatcctggctaacacggtgaaaccccatctctactaaaaatacaaaaaattagccaggcatggtggcgggcgcctgtaatccagtgagccgagatcgcgccactgcactccagcaagactctcaaaaaaaaaaaaaaagaaagaaaagaaaagaaatattgtccccttggaacaagatcagcactttttctttctttcatttatttatttttatttttgagtcccgctctgtctctcaggctggagtgcagtggcgcgatctcggctcactgcaacctccgcctcctgggttcaagcgattctcctgcctcagcctcctgagtagctgggattataggcgcatgctaccacgcccagctaatttttgtatttttagtagagacaggatttcatcatgttgattaggctggtctcgaactcttgaccttgtgatctgccaccttagcctcccaaagtgttgggatcacaggcgtgagccaccgtgcccggcccactttttcaagtagaatttgggtatttaactttgagataattaaaaattaaattttcatttaaatctgcacctagaacatttagtatgaaatggagttctctctcttttttttttggaggagcctggagttt

SEQ ID NO: 315308 - DNA, 4001 bp, Homo sapiens
gatgaattaaattgaacactccttcttcgaattacacgttttcactgtttctcgttaaaagaacgtaagttatatacatgccttcacagaaaccaaatacatttcttaaaagcagacacggaggaaaatgaggggtcaactattatgaatgaccctcaagtcttagtagatactgtgaaattagaccagaatataattaaagcaaataaatcagaatctatgcacctaaaacaactctttgacttttttcttttttttttttttttttttttttgagacagggttgcactgtgtcactcagggagtgcagcgatatcggctcactgcaacctccgcctcccaggctcaagtgatcctactgattcagcctccgaagtagcttggactacaggcgtgcgtcaccgtgcccgtttattttattgtagaaacggggtttcgccatattgaccaggctggtctcgaactccagggctccaaagatcggccagcttcggcctcccaaagtgctgggattacaggcgtgagccaccacacccagcccatctttgacttacagagttgatcttactacttatatttaaaacattcaaattcagttaggagctaataatggggaagaatctctagtttcatttaaagttactttttttccaatctagacatgtattttctgttataatgtgtaagtgtagcttttcagattcattctttaaaggatagttcattctcatggcaaatatacttaaaatgttaacaatttaaaaaaaaaaacaactttgctttatcttacccttggcccaattccagactagaactatgtgaagtcaacattatttgtgtaacaaacacaagatctctttataggttaggcctcagtttcaaaagcatcaatttcactgattatttcctaagacagtgcctggcacaaggtattgtcttaataaatattttttgaatgaatgaatatcaagtaacaggtactaattattaatacttccagcatttcaaaatgaaatgttaaaaagtggaccctttcaattaaaaggttttactagagaccgtataaaaattggaagctacattacagttaagaaaacactatcacttgttctcattgaatacaatatttctaaagcagagtattatcactctcatttaatatttaagaaaggtggggccaaaatggttgagtcatgtaattattaagtagtggagccagatttcaagcccacgtcctcaaatacaactgtgtggaggtgtgacttggaatggaatgtgcggatattatgaaaactatattccatgtccccctctttttaaaagaatttccattacaaaagcttcagaggaaaaacacacaatggatagttttcaattccacacacacacacacacacacacacacacacacactttttaacaaattcaaacctatttaaaatataacaacggtaagcattgtcaatcgcaacagaaagtcgaccagacaacaaggctacatcctccaatctctccctcccgggacaccctgggaatgaaagcatcccttgcggcctgggatagactcgtccaggcgcggggaaaaggcggcgcctcgcccctggggcgcagccatctccaacccctaggacggccaggacagctggctccagcctacctgacaggctcccgccaccgcttgaaccagccgcagcaactggccatcagactgaacatcccgggtcgctcctcccaccacttcccatccgagcccggagcggacaccggcaccccgctcttccccgggggcctccggcactccgagacgcccctaaagtggataagtcgggaggaaaagccgggagggaagtgaaggcggccggcccgagcactaagccttgctaaccgcgtgggtccgcgacgactgccctcttagccaaggaacaacctgaccaaagacgcagatacaccgtagccgagttagcgggacccggctaaagaaaagccccgcgtcgacgtgctgacgttacttcgaggcgcggaaggcgttccccaggcaacgcccgtactgcgctcgcccaatcatcggttgaggtcctgaggtagaggcctctgagtggctgaagagtcctggctacccgcccctgcgcgagactaggaaaagagaaaggggagtactctataagaaggaggcggagctcgaggtagctcgttctcgtaactaggcaaccggagcgtccggagataagctggaggatccgggacaaatctccagcaaggcctatctttatacctacataaaatgtgttgccaatccacggtgctgttcctttcctttctccagtgtccccaactgagattcagagatctcaggtcttgtgcatgggtttttctttttctttctttcttttttcttgttttttgtttgtttgttttttgctcagggatggggaccctctagaattctggccgacttaggcagcatgactacaggaacaatacactggggcaattcttgtaagttaaagacaagggggaaattcgcttgctaaattttctcagtagttcagatgagagtgaagccttaatctctaaaacgtttattactgttacatatgtgaaacggaattgtatgatatttgttgtaggggggattgtgattacaaaagaaaaatgcatttcttgtagaaaatgtgaaaaatactaaaaagaaacaagatgaagaaaatgagatctcacaggagctctcaaagataaccatttggggccgggcgcggtggctcacgcctgtaatcccagcactttgtgaggccgaggcgggcggatcacgaggccaggtgatctagaccatcctggctaacatggtgaaaccccgtctctagtaaaaatacaaaaaaaaaaaaacaaaaaaaaacaaaaacgggtgtggtggcacgcgcctgtagtcccagctacgctggagactgaggcaggggaattgcttgaacccgggaggcggaggttgcagtgagccgagatcgcgccactgcactccagtctgggcaacagagcaagactccgtctcaaaaataaataaataaccattttgatgtatgtttgtttcaggatttttaggtacataaattgctggctatttggtatctgcaagatgaagattgttatctcttgactgttttgtaatagtttattttttaaagaggtatgtaatatttgcatttcttttatatactttggagaaaaagaaatgacaaggacattcctgtagggaaaaaattatgcacaatatgtagggatctgtgtgtccattcattttctacttaaataaatattttcaaatcctgatgaaaggatagaaggcactgagaatcccagtgtattcgcggggaatataatgatttgagactaagatacatataggttttaaattagtctctgtcctttactaaatcatgtaactttttttggttttgttttgttttgtttgagacagagtctccctctatcacccaggttggagtacagtggcatgatctcgattcactgcaacctccgcttcctggggtcaagtgatcctccttcctcagtctcccaagtagctgggactagagacgtgcaccatcacgcccagctgatttttgtattttttgtagagacagggtttcatcatgttgcccaggctggtctcaaactcctggcctcaaatgatccgcctgcctcggcctcccaaaagtgctgggattatagacatgagccatggcacccagcctcatgtaattttaattcaaatttatatacatctcatacagcttgctatctccaaaatactgtgccttatggggaacaaagggggtgataccttttcttctcatcataacagtcacagccaacactcatataacaaaaagaatagcaagagaaaagcataacaaatttatttaatccaagttttatgtgacatgggaaccttgcaaatggagatgcaaagatgcagggaagactacccatttttatacttgggttcg

SEQ ID NO: 315309 - DNA, 4001 bp, Homo sapiens
tatggacgcttgagctctgcttccagccccaaatgagccttgttggaagtggggtaggaggaaagtgttgtctgtttgtaccagggcttccctgggagttctgagcttctcaggggaattccatcccaatctccagcttctttgcccactcacctgccctcctgtccaatgcctctggaaagtttcctagtgatggtaacttccagtgactaacctgtacctttgtagggtcactgggagtgagggaccctctaaaataccatctcctgcatgaaacatttcttgtttccctggttaaaaagagtatctcctgcaatcgcacttagcacttattgccctactctagctactagctttatgttgtttcctgctgtgaattgtaggtctctgagagcaaagtctaggtctggttcctgtttgatcagtacaatgagctgcacatatgtttccaagcaatggctgttaagctgaattccaaggaagcaagactcggggctgtagcctagagctaagccctgagcccagatcttgccctaaactccaaggtgctaccccgatcaccagacctttaagtttatacacttctgctccctatggcagaacacaggctctgagcaattagcagcctgaagttcattgtttaagattcattggaggaagttcccagcaatagatttcaaaaagctggcaggaatccagaagaacagctttatttagggaataagaaagctttatttaatagggaatacgaatttacaagatattaacattacgctttttccactccataatttgaagttcattttttacaccacccagctgttacataggagcacggtggaaattcaatacctgttacagctggaaacaatctggaagaattctgactctattagcagacagcttactaaaactttgttctagtagtcatataaaataatttatttggtcccaagtgtcactactatattcaaagtcatccaatgtgataacaaaaattgtagaacattatacgttttcattcccagtgatcattgccacagtttgctaaagttcctggctgaaaataaatattttctagatatcattctaagttgtttaactaaatgtagatgaaataacatctcaggaaaagtttgtcaactcattaatttgatttcctcatttggcatggaaaaacaattaccctttcaacttcatcagtgtctctgtagagacttggatttttcgcagcctcagttctgcttgaagaacgccaaagtgtctcctcttgatttcatgtggctcttcacaaatccagttaatttcctgaacccctgggccagcccctcccctgtgagggcacagcagggttgcacataccagttccggtcactgcaaagcttcttcactttgaacattctggtgatgtcctcagcagtcagagctccaggcatgtcttgtttgttggctaatagaacaacaggcacatttttaatgtgttcattcttcaaaatgtgctcaaactgtctctgagactcttccagtcgctgtttgtctgtactgtccacaacatacaccagcccatcggtgttctcacagtaacagccccaaacagttctcattttttcctgtcctccaacatcccagactgtgagtgaaagattcctttccaactcgatcatttccacattgaaacctattgtagggatggtggtaatatccttagcaagctttaatttataaaggagagtagacttcccagctgagtcaagtcccaaaagaagaacttgggcttgtttggtttgcggatttttagaacccagcgaacccatttcagcctttttctctctctgtctctaaataccttttttttttttctttctttctttcttcgaatggccagagacaatgtgtcctttctggatctcacatgaaaatgttaggaagaaagaagaaagcaaattcttcatgctgtattctaagaacaagaacctagatgtgtttatgttgtagcttatcaacttgattatgggcaaacagtattttatttgcagtcccagccaatcctgagggatctgtggtatgagtaaccagccaatgccatggtgactcaaaggggaaattctctgtgaatgagtaagattaggagaggcctacctggctgatgctgcagttttgttttctttcaggtgctagaaatctagaggaacctgaaggttcagacacgcagaggagcatggtttagtagcagaataaaaacttaacttttcattttaactaacttttaacttaaatttaactaaactttttgtgtaactttttgtggaacttctctaggtattcaaccatttatcttatcccagttgtaaataaggaaccaggcttcttaagttgtgaagagagagttattctcacactctgtctgcagtatcttaaatccgccttgttcagattactcagtaggaaactttaaaccactcaaggttatctgaaccttactccctaatcacatacagaatcactttctttaaaattctaggcagagaatttacactactgcagtcacaaaaccaaatatatgagggggaatttataacacgaacagttttacattaagcagtccaattaaagatggcaaataaaaacatgcatttatttcctctccttcccaagactccacagaataatggtaaaggcattaaaagaacatataggccaggcatggtggctcacgcctgtaatcccaacactttgggaggccgaggtgggtggatcatgaggccaggagatcaagaccagcctggtcaacatggtaaaaccccatctctactaaaaatacaaaaaaattagctgggcgtggtggcccgtgcctataatctcagctacttgggaggctgagacaggagaatcgcttgaaccagggagtcggaggttgcagtgagccgagatcgcaccactgcactccagcctggtgacagtgagacactccgtctcaaaaaaaaaaaaacaaaaaaaacatataaatccataacaaaacagcaagataattcatcaaagggtcagaaattttaacaaaattctggaaaatggaaactagatggaaaaatgagtgataactgatatagcaggataaagccaaggcttggagtgctgatgcagaggagatagacaagaggtgacaggtatggcagacagaaggggtgaaataaaggactaaaaacagcagaaggtaacaagaagccaaaataaacagaacacacacacacacacacacacacacacacccctctgctgggtgtcttcagcaactagatgtttattcccaggcaaaatactgaagagttttttattaaagaaattgaatgatctcagaaaaaagatctccatgttttgacagttgggagtttctgaccataatgccaaagtcaacatgtaattaacctatagccaacctggcagttggcaaacttgctcacatacatagaattcccaatcagctttgcagtgcacagaagtttctatacttaatggatagcatgccttcaatatgaataagagagagaccaagataaaaataagaacttttaagaaagcttaaacagagctaatgaagggaacagaagaacattttcattaaattctaattactatttttatacagacttgagaagatattacatccataagacaagaaatggatggtattaaacagaccactcagagaataaaaacaaaactcctaaaaattaaaaacacaaatttcaaaaaattttaaagatcagtaatacctgtaggctggaagacaatattgaaggagtctttcagaaagtcgaagatagaaaatacagaagaaaagataagacatatagaggatgaactcagaaatcttaactcagaagtctgatttataggacttattccagagagaaaaaaaatatgcacaagaggaaattatcaagaaataatatgggaccacttcccaaagctaaagaatgaacttgccagattgaaagacttcc

SEQ ID NO: 315310 - DNA, 4001 bp, Homo sapiens
gccatgccaaaaggtgaggcctattacagaaccacgtttgtctttccccaaggatgagtttgacctcaggtacttccatttgtgccacttcaatctgcttttctccttgtatcagagattcaaatcttattcagtccatttctttaaattacagcttaaggaccagcatttgtaaaatctattttaaattaaccttctgatgtcatgaagcaattcacacataccatttgatttcaaagtaaatttgctattactcactttatttactgcataaacatattgatataaatgcttatatcttgttctccatttcataatttagaacttatgttttaaaaacgacaacttctcacattttcccccctttaagcatctactataaagcactgagtgtttaaagcctgatgcttgaatattcgtttttcacagtaccttgtattgtgactttccatcacttttccatggattatcacttgatacttgttaatgaaatattttgggacacacaatttagaagagcaggcagtttttctaaaagaggtaatcacatttattgaaattgctttataaacaactatcatagagcctttaaacttctacgtttcaagtagttataattttccttccataagttgactttctgcatgcataaataaaagataattgaagccagtcaatatttgttaatcgtgtcttaagtgtgcagcgagagacacaactgttttctgcagcttcctactctgatagccatgattctcaaccctggctgcactctgaaatcaattgctgaatccgaatttttgaaaataagatcagggcatctgtagttttaaaagctacccagtgtttctgatgtgaagttactattgagaactactggctttcagaataaagccagtagtttcaaacttccaagcacagcttttaaggttgtccacaatctggctccaatcttcctttcttgtttcttatcttactgtaaccctctctttgcacaccagccaaattctcttggttattgtctgacagactgtttcctaaaggattacatattgccagagaagtccagaagaattaggatgttatccacagttaacagcttagagggtaagctgcagagacagagtggtagcccagagaaaacaccacgaatgatacttagtaaactctgtaaagtgtttgttgattgaaatgttgcctacttttattaccccaaataaacattcttattcggctttcagttttttatgatataatttaaattacacttacacacacacacacacacacacacacacacacacacacacccccaatacacgggtctaagttgagcattgttaaaacccatcaaccaaacatacgtccaaaccagtttagtaagttttctagggcctctataactcaccttcttttctacttctcatacattagcaacaactacacgcgtggagtgaaaaacatgggaaagaccaaagaggaattctaaaactgacggggacagagggtggcgctggctttaaaaaccggcgttgaggagatacctggtttttgaggttagtccggagggcgcaggagctggcaacaggaatggacgcactcgtatcggtctccgggatggaaatctggtgcgagggtccctcagccttcttctcgatgcctacatgggaaggatgcctggtaatgagcaaagccgtctctagaagttgggaaaaccggcagcctctgcagcagtctgtgcatcagtcgctgagcaggcgccttggcaggcaccgttcccttggcaacaggagcttcttccggtcctgaagccacgcctccccgggggtcctggcgattcagccgttgtgctatagcttctgggattgaagagctccgggaaaaggtcagaggcgcgccgaggaactatacattgaagaaaaatgtgtgcacaggtggcagggtgagctgcctatttcctgcgaggagccgggcagttcccggcgtagcatcatgggagttgtaggctcgcgcacagctttctgggaagcgtttggcgttcgcgtgtgctgcgtgtttgtcgctcggccctggtcttcctggggatccaagaggctggcgctgggtgtggcgcggagagtgtcgttaccgggcaccagcgtagcgttgtggcaacgactgcaagacgatactgtcccccctggggcaagatgtgcgccggagttccccagttgcccatcgcaccgactcttctctgggttctgataggcctcccaccctgagtccctgtagaggtaaaactgttaatacaggaaggtagaggggagaactggtgtaaaaagtcaaaaggtgttattcggctaataaagtatgcctgtacccctgcttcttagttgtgtggtctcccgaagagatttctaccaggcataatctcctgtgagtagattacagtctccagaatcaaatcggcaggtggtcaggaaaggtattaatagtcaatacttaaagttgaccaccttcttaaattgcacttggattttatagtcatagtcacaaatggtcttcaaatagaaaatatttaggcatacccttccccacatcttttattactgcgttttccaacggacacattacagatgcagtcattttaaagatctagcctttcaatctgcccaactccactaacctcacccccagcgaatggcctcattcttcaaataggggtttgtatctcttcattttttttgtttgcatgggtgtaggatttccgaccccctgccccccaccgcgcgacccttttcaactagctagtgtatgtttactgcactgcctgttctttggcctgtcaattcatttggcctattaaatggactaggagggtgcaaaaagagactagaaggaattatttcaaagtaatatggtaggggggacggttgtaagcgtgtgattatggggtgatttatcttttgtcacttctccaaatttccaaatgtaattgtcatttttacagcgaaaaaacaaaagcggctctggattagtgattcttgttgaaagacaaaaacaaaacaaagaccctatggatgcatatcaacatataaatgtccttgtaaaaatggagtatggaaatacattctttcttactgtgtggtcttagcccaatttacccttctccgtgcttctatcctcaccttcaaaaatatagtatttatcttatctggtagttctgagtattaaagataacagaaatacagatgtttggcacatatttattgttcaataaataatgtcctgtcttcttttgtcttgagctttttattgtgtaaacaaaattgacccaaaccgtaactatggtggttctttaacttctgaacttctaatcgtgaatgcattgacagggaggtgttgaacacttttctgtgtgcctgggtgttgtgacttacttgtaagagatggaagctaatgtgcttgcggccaaaatataacatttttttttcttagcgatcggcagaaatgttatatttcagaaaactttcatggacagactcaatttttcctgctaaaagttgatattttctgcctctaggttgagttcatctcttttggcttaatataaaacatttggtgaaaactggaaataaaatggacatattgagcatccaacttttcaggaaaacaaggcagatagataattcttctacaaaaatgtagctagtcaaatcgttatcttagataagtatagttgatagatggcttattactagagataaatgttatgaaataaagcagtaaaataatctagaaaaaaatgttagccttgaaaatattaaacttaaaaaaacataaaggctgccaggcccggtgtctcacgcctgtaatcccagcactttgggaggctgaagcaggtggatcaccaggtcaggaattcaagaccagcctggccaacatggtgaaaccccatctccactaaagatacaaaaattagccgggtgtggtggcacgttcctggaatcccagctactcaa

SEQ ID NO: 315311 - DNA, 4001 bp, Homo sapiens
gatcacctggccaacatggtgaaaccttgtctctactaaaaatacaaaaattagctaggcatggtggtacgtgcctgtaatcccagctactctggaggctgaggcacgagaattacttgaatccgggaggcaaaggttgtagtgagacgagatcacgccactgcactccagcctgggcgacagaacgaggctcagtctcaaaaaaaaaaaaaaaaaagaaattttttagtgttccaggaaagcagcctgaagcacagagctgagggaaggttcagaaggcagctgcctcaggccttgggcctgccccaccctgccctgactaacttgtaccttggctgccacactagttccgagtccactcagagcctgtgccctctatacaccaagccattcccagaatgcaattccttaagaattccttaagcaatgcagaagaaggatctgtgcgattgtgtatagagtcccacatgtgggcttccacctctgcatgggggtgattgctgtgaaccatactcggaaactgtgaagtctccccctctcctctgtgctgtgtgtttgctcctttagcttctcaacaactgccaggagcccctgggccagaattcaagtctgattcatcttggtgtgcttggagcttggcatggggccaggcacagagaggtggctcaatgtataagccaattaactgcgagccaactgaagaagccaccctgttcaccctttcccacacccttcaagtgcaaatttctcccttttctcccaagccagcttgctgcttcttccctctacgtctgccctgaaatagaaatgtcagacatttaagtgcaagtgagtcctttataaagtctgagggtggctttttctttaaagatgtgtaggagataatcagcaagattgagaatatcaccacccatcctgcataagcgagagaagcatttcttaaagggtgaactagaaggaaaggtggtttctaggaaagcaggtgtacatgcagtctcaacacaggatactttgttaagtatcaggtattgaaaaggccttctgatacattgaaacctcaggctaggaagcgaagacagagaaagtgaccacgcctggccactgctggaagaaaatgccagaaggccatcttcccacagtcatggcagcctttaccccacaatgggagatgcgccaccaggagacacccccccttttgatcccaagctcagctttactgtacagtgtggcaggcattaggcagagaaagcagcaaagtgcgtcgccacttggttgccctttttacactagcccgggtccacaccctgccgccccagccagctccagggtagggttacaccactttcctttttcttcttatttttaaaagacgagggcgctacaaatatctttccagcaagagcccgatcctggcacgcgggcgggggcaggggggtgggggaactctcatttttcttccctgcggctggcaaattttccccgtcctctttcccctagggcccccctcaagtctcagcccttggtgcagaaaatggggccccaggttactgcggcctcgccctgcaaacaagtttccactggcttggccgcttgcagaattgccagggcaggcgctgagcgtggtcagagagcgtctctacatcccgggatcttgcaccccgaggcccctccgtgctcgccccggatcggtgtcccgggtagggggaccccacttaccccacaatggaaatcatcatggcagccaccaccaggtagttggtctggtaatagagcaggttgctcactacgcggttgttccatttggaaatgtccctgaagtccggccgggcaaagcgatcggaacccgggaagaaatcgtcccaggcgcggagtggggcgatattaacgtccatgttctcagctttgcgttcttcgcctccagaatctggcggcggcggcggcggcaaccgatcagctgagctgagttggagagttgacagcggctccgtctcggtcggctttgcggttggcagacagcagagcaaaggaaattgggagtgggcgggcgtgtttgctcctctttacttcttcattggctcttggttgggtacaggaaaacaggaacctccagacagaacaagggactgagtgcagaatagagacgaaatgacagaaagcaactagcggaaatcccctgtctgaagggaggtggcaatgccttctctagcagcagagaagctgcctccttcgaaataccttttttgaaggtttacctaggagtgtgttctctgacttagagaaaaattttggcagctgtgcagatgccaatctaagtgaaatgaaatggaaggcgactacagtgttaatggagaatgagctgcttttgaaaactaagtcttactaacctctacacatctgaatgcaattcccatgttttctctgtttcaccatgagtcactatgtgtgaaatcagattggcaaaacgggaaagaaggtcatgtagaacagaagggctggtctgtttttttcacttctcttctttgttctccacctctgttctctctaggctaaattgttggactgctatgccattctgataaagtaggcactctggccacttcagtcctgagctgggcatgttgcttacattttaaagcaaacagttgtctgcagtgaactagttgttctgcatccagcattttctgggcagaaatatgcattccacttcaaaagttttcttagttttattgcaatatttggtgacagctttcactgagggaccacaatatattcatagataacgtgatgttttgtatcccagcccaaagacctggcaaaagaagtattcgttgtcaattctcttctaagcttccaagggtcatcttttttcagttaaggggctgattggtacaatgcatgagaaaaaaagtagtttgtttaattgtataatgtaataggtagaattctaaggtgaagatttctaagataacagagtctctaagcccctaagtggcttagacaaggtgaattcactctactcagatcaccaatttttgaaaacttggaaagtaatgaaatatactaatgcaaagtctagaaaacataatttaattttccttattaattcagaagacagttaaggagcttacagcgactctaagaaattactactactactgttgtttaggaaaatttggtgattgcatggaattagtgctaagatatatcttatgtgctgctttttgaataaagtttaaaatgtgaaaatattcctgagtgctcatgttttcttgattctggaaaaatgggatggtgtgaagtcagagaaagcaaaattagagtcgcagctccttcctctctggcaggtgactttggagaaactacttaatctctcccagcctcggtgtcttcatgtgtaaagtggggataatggaacatctgccatatagacgaggctaagtgaaggaatgtataggaaatgcttagtgtataataaaggttcacagttatatgttactattattgttattagcaataggatagcccacgattcttgtttgctattaatagtgctttaatctgatttgttttctatgctttcattataaacatctactaacttttctctaccttgctccaactttattgttgtggatgtatctgggtagggggaaaaggttgagaatattcagtacaatgccagcaagtatttcgagttcttttgaggctctgtgaaagcactgtgggttttttttcttttcttttctttttttttttaaagaggagaaaaatgtaatcctgctctgccttcaaaacttctgcaatccagtggaaacactagttaaatatgagacagtaagaggagtgctaaatagagatgcactgagcctcagtgctcagttacaggaagtcagagggtgtggaggaattccccagggcttcagaatgtcaagaggcagcactgtgggcaagctgagtaaatcatcttggtcaagatgagagtgggaactccagtggggccc

SEQ ID NO: 315312 - DNA, 4001 bp, Homo sapiens
agatacacattccactcttctattcctgcggaaagatagtcattccaagcgcaaaaaatcataatattacaataggaggccaggcgcggtggctcacacctgcaatcccagcattttaagaggccgagtcgggcggatcacatgaggtcaggagttttgagactagcctgagcaacaaagcaaaacccatctctactaaaagtaattagccgggcgtggtggaggacgtctgtaatcccagctacgcaggaggtggaggcaggaaaatcgcttgaacctgggaggtggaggttgcagtgagctgagatctcgccactgcactccagcctgggggacaaagcgagactccgtctcaagaaaaaaaattaataataatactactagaaaaggagccgaacaacaagcaggtaaatcttccttatatacatcattcttcaaaggactttggggtttctgctaatctctttttctccaagacttactcattcctgttgctttattagtgcaaggactaagaatcacaagttacctattttctcaaacatgaaagctgtgtttgaatcatcttgtgtaacctaaccagtcggacagctaatcttcaggatttcaacagtcatcgaaaaggtggaagaactgctgccatctctcttcagaacagttctaaaactcccctggcgtgtacaagccactaccagctaaaactgagtcacaacaactcttgggctctaaataaagatcgaggcgaaatctttcactcctatttatttcccaaccaaccaaacaagcaaaacgaaacaatcacctttctactcaatcattgctgaacaaacaccacattctatgtaagtcctcagtgcaattttccttccacccattccctaggcctgctaagctatgttcctgcccagtaccttcttttctcttcaagtgaaaaacaccatttaaagaccaactcctctttcgcagggtagttaactttatgctaactgcagatccatcttatctagtcgcttaagacaattaactcttagcttaataaatactatgtattgtgggctagctggagctcagcaatgagcttggtctccgcgcctgggggacgggtgaaaacaagtaactgaattagatgggaccagcggcccacagaattcaggaaggcgctcacactggtctcccgctttcacaatgggtctattggtccaaagtggcaacttaagagaggctcttaatgcttacgctttctcgtacggctgacggatttgccaaatcccaccctttgggaaagtgacagactggacttaactctttggctgcccctactgggcaaacccaagggaaaccccaatccccaagcgctttaaaaatgtgacgagttcaatttaactctttccgagcccccgcggcgttgaggacacagcccttggaaaatgtctacactgacttaacccttccgctgccgatctcagtgctactccccgcgccgccaacacgcgggaaattccaaatgctggccctcgggagatgacaggcccagcttcgcacgccccccgccatcagtcccatcgcgccgaggggggccccaactcaggccttggagaagcgccgggccggactcctggctgcggagccccgggcgagtgagtgggcgggcgctcaccgcgatgacattgacgaaggtggtcttgcccgagtactgcagccccacgagcgtcagctccatctcttccttccagaagagcgaacggaaccagtccagcaggcgggagatgagcgccagcatgatggcggccgggagcgagaacggacgggaggacggacgagcggcggcgtcgacgacttccacacgagcgggcctccgcccggaccctccaacggctccttggtgccccggcgcgacacgggcggacaccggcgggcggcagcagccagacccaggaagccgagcggatcatatgactcgccctaccccccacgcccgtcccggcgccgccgtcggcacccacggcaagagcggcgcggccaatccggccaggcccgcccgccgctggcatcgccacctggtgggcatgctccgcagcacagcgtaccctcgggcccccttgaggctttctctacattcattcattgttggttcattcgtcattcatccacttatacattcgttaattcattcattcattttttgctataattgttcattaacaatctgcaggaagacttcaagactctggaagagttggcgtggaataaaaattcctgtcctacatttttggtagtagcaaaagatagtgttaacttaaaaatgacaccgtttataaatttagaaaggagagcattatttcttaagaaggggattataagctgtaggcaggacgtgcagcctcgggccaaaaaaaacaaaagtaagcactttgagagagggaagggtgcaacaagaatttatattgaggagttggccaagtaaacatatttaacttatggaaggagctattaatatgtatgaaggtggtcttacacacatagtgaacaaatctgtatgttgcatatgacctatgttcatttggggtggcgacttaacatttaaatgtattataatcaggcagggcgcggtggctcatgcctgtaatcccagcactttgggaggcaaaggtgggcagatcacctgaggtcaggagtttgagaccagcctgaccaacatggtgaagccccatctctactaaaaatacaaaattagccgaacgtggtggcatgcacctgtagcctcagctgcttgggaagccgaggtgggagaattgtgtgaacccaggaggcgaaggttgcagtgagctgagatcatgccactgcacttcagcctgggtgatagagtgagaccctcgtctcaaaaaacaacaattaaaaaataaataaagtaaaagtattataatcaggccctccacatcagaaagtgaatcagggacgggaaaggtattgaagtgcttggcctctgtaaaaccagccagaactgggctgggcgcggtggctcacagcctgtaatccaaacactttgagaggctgaggcaggtggatcaggaggtcaggagtttgagaccagcctggccaacaaggtgaaaccccgtctctactaaagatacaaaaaattagcccaggccgggtgcagtggctcatgcctgtaatcccagcactttgggaggtcaaggcgggcagatcacctcaggttgggagttcaagaccagcccgaccaacatggtgaaaccccgtctctactaaaaatacaaaaattagcgggacatggtggcacgcgcctgtaatcccagctatgctggaggctgaggcaggagaatcgcttgactccgggaggcagaggttgcagtgaccgaggtcatgccactgcacgccagcctgggtgacagagcgagacttcatctcaaaaaaaaaaaaaagaaagaaagaaaagaaaaagccagccagaaccaatgcatggatgcatggttagttgtctcttaacaggagaaagttacagaaatcagtctcttgtctaatcaaagccatagttaggcttgtggaacaggtcagttagcctgcatctggcagagagttgtaactgttttaattgtgtttatctccaggccagtgctggtttagctggtagagaaaaagagaaaccttgcacttagtcatttaactcttgcctagtatggccttaggtcctgtttataatttggtatctaattgtcacaaagagtctgttctgtcagtcttgtgatctctattttaacgttaatgttggtcgtttgttgtttctttcttttttttttttttttttttgagacggagtctcgctctgtcgcccaggctggagtgcagtgatgcgatctcggctcactgcaagctccgcctcccgggttcacaccattctcctgcctcagcctcccgagtagttgggactacaggcgtccgccaccacgcccggctaattttttgtatttttagtagagacgggg

SEQ ID NO: 315313 - DNA, 4001 bp, Homo sapiens
atcctaaatagaagtattaatagaaaatactcttcaagaagtttttgaataaaataagcagaaaatattatttaccaaggaagtgaaacaaatgaaaactttcaatcatatgcattatacaagttgacaacatccaaaaagtaaacttcaggtgaactgaaggataaatgaaatctaaatgaataattaaaggagaactgagaacagccaagacacatactatttttttttaacataatgaggtaaaagtcattggcctgcactcccacagaatattcctgggtattacagtcagtgatggagtaacaggctaatctgatctaatacttaggtaaacagtatttccttagttgcagtttaaaaataagaaaaaatgactgctaaaatggatcaggggaaaaatctgttgacagcctcacaaaattattattgtattgacaacttaagccttttcaaggttgaggtctgccacactgctctaaccctgaatcataagcaaatgtcctaggtgttttcagataggtgagtttgtttgtgggacaagtcagagaagagaaaagaaaccggttgtagttacaagactctaggaacccgacaagtcatttataatccaactaccctctcagtatcagactggcttccacaagtctaaaagatggtcaatcagtatttgcctgcttgtttccaacaatagcaaatgaaccattggtaaactgaccattctcagagtcggacagctcgaatttgttgcaaaatccttcgaagttatctcccagtaactttcattcctggtcctggttcaagagcaacatagtgaaaggtgaaagtcgtctttttctttaaaaaaactttttttaaaaaaaaaaaaaacaggttttacttcctggcatgtcaatacgttcccttctttcaacaatggggaaataaatctcacccccttttccccccttcaatgtttgactccccttaaagaaaaacggaataccaggcacagggaacatagagttcctctgactcagagccgcgacctctgagcagagcggaggaaaggggcttaaaaaaccacacacactaggaagagttgcagctgatacgaatcaccattgccaaaaagcaaactgcttcagccggtgcccaggtgctgggacgcgatagaagccgcacagacttggcctggcagctctgaggaaatgggggccaaggagcctgcacctcttcttgccaaagcccgggagagctgagtgggcgctcgttctcaggccggctgcaagcccggcgcttcacaaggcagagcgttcggcccccgggaagcggcatcgctaaaaggaaggctcagtgaaacgcttggcaaagtccaagccgcgccgcccagccagttgtctataagcccagccaccccgcctgccagacgccatcctgggaacccgcaccggcgggagctcccggagttggaaacgtctttggctcggccgcggtcccctctgcccgtctatcccgcctctccaccctcgctcactccctggcccgagactgagccggggtccaccccagggggtggtgcccaggaggcacaccacgcttgggggaatggtggagaccgggatgaggcttcctggagggcgggcgggcggccgcggcgggtcactcaccgaaaggacgctcatgcggattggggtctccaacaagcacgccatcttgagccttcccacccggctgctgcaggcgccggcgcgggggccggcactttcgacagccaactattggccaacgctaggcaccgctccctaaaggcagccagatagacgagaactggccacgctctggacaccgctcaagtaccggaaaggcccgcagaaagaagggcaaaagggaatggcgtcaggggctgtcctacgaatcgttctctcagaaacagcagctactctgagcctgggttagaggtggaagcgggcagcggtttccgcatgcgcaaagaagatctgccggccccacctgccgctcgcggtgggcggggccccagaggcggagtctcgccctgacgctacgagttttacggactgataaattgcagtttatggattccagtattcatatttggaaaaagtagtacgtggagccacatacatagtttgaagttcactttcatattcattctctctctctgcaccaaactcccggcgtcgttatctccattttataggtggggaaattgcgatcccagaacctttgccaaccgtaagagtgattgtttcacgatccgatacagatacgtgacttgccttagcgttgtgtgccggccccgtttattctggtgtagtgttaagaatagccagaatgcttgggtttcttcctagctacttgatttatcagctgctttaccctgggcaagttatctaaccttctgtttgagtttcctcatctataaaataaaggttaatgaggatagaggagtcaacaaacgtgaagctctcagaaaaaacctagaacatagaaagcgttatacaatatgtgttaacatttctccagcttctgagttaagtggggaaaatgggggcaaatatctaaatatttcgcactaaaacactctcataaccgaagctaaataaaagtatgctttcaattatacttgattaattcagctgtcctactactttgtgtgtgtgtgtgtgtgtgtgtgcaacactgcccttgacttggttggataagtttcaccttcgtactgcttgcaaccagtaaggttttcacagtatggttgcaattggcctgttaacattacttgtattccttccatttctatagccacaccctaattcaggctcttgtaacctctcccctggactacagcaatagccttccaactggtcttgtagctggtagcctctcccgcactctgctcctcactgttttcctgtcttcctcctgtacttggtttccaaatttagtgtagcatttaccacccctgcttatgggtctgtgttccttaacaaactgttgaattcctggaaggcaggaattttattttaggtagtccttctgctataatactatttctgaaacttgggtaatctgtacaccacctacacaatctttgccaatctgcacctaggtattattattcattcaatatttttatttaaagccaatttcaactcattaaaaatttttggctttatcctaaaccataatactctgtgaaatcaagtttgttgtgctccttatttttattctagtacacattaactacaaaaagtttaaatgtccatccatggaccacctaaaatcacatcatgtactgcatactgcaatggggcagaacataaccctaatacatagtatatagagtcattataactgtatttgatccacactccatccattagctcaagcaatacatcctccaggaattgtctcccccaggcatgggttagataccctttcccccatgccttcatacttcactttaattgtagggtggttttgttgttgttaattgtttccgtgtttgtctcactatacacttcaagacaggcactgggagttttatcttctaggttgtctatctcagtgcctagcacagtcacttagtaaatgtttgttgtacgaatttttggcttagtttgagcctgggacgaagatttgggtgcattttgtttatttagtaagtgctttcagggaacaaaattgataggtcagggagagtgaaaaaagaaagaataaatattcaagataattgtccattattgatgccactgtttattcctcaatcacctctgaaaacatacagaatacctctctggattgtccatcttgaagctacagcattcatccaccaataccatatgtattggttgaggatttccctagggctattaactccctgccctcctggattatatttgtgcccagaacagaacgggcttctttaacctgatacaaaaaagcagagtctgcaggtttcatcttagggtgggatataggcagcataaatctgagcttgcaca

SEQ ID NO: 315314 - DNA, 4001 bp, Homo sapiens
acggagtcttactctgttgcccagtctggtgtgcagtggcacgatctcgactcactgcaagctctgctttctgggttcacgccattctcctgcctcagcctcctgagtagctgggactacaggtgcccaccaccacgcccggctaattttttgcatttttagtagagaagaggtttcaccgtgttagccaggatggtctcgatctcctgacgtcgtgatccgcccgcctctgcctcccaaagtgctgggattacaagcgtgagccaccacgcctggcctttgtcaacagttatagaaagtaaacctaaaaagggtgactggctccgtgacgcctgtcctttcatgaataaaacagatgtagtctcatgtaatacctcaataaacttgaacttttaaaaatcaagaggcatgtgccccactagaaaaaaaaaatacagatttttagcagagacatgaggtcacaaaagtttgccaggatagggaacccaggaggaagaacaaatttagaatagaatatgagttttgaactagaggtctaatttcaaggtctcttcaagatatccaggcaaaccttgaaagagagctgagaagccagattaggagtcatcagaatgaagaaagttatcgaagccaggagactagatcggtatcaccagggaaggtgtgacgaagagggagatggtcatccaaagtcacaactcccaggaatgcccacacgtatgaaaaaggcccacatgtatgaaaaaggcccacatgtatgaaaaagggaggacttccaggaagggagggatgagcagtatcacagctaacatacactaaggctgacacagttcagttctgaccaggaagggcctgaatggaagcaacacgagagatcctccaatggggtggaagcagggctggaggtaccaagaatgggataaggaagtgtggccgcctgccttaagcaactgtagggtcaggaaggcagaagaggacaaagggcgtatgtcgtgaagttccactgtggataggcaggtggacttgcttcatgcctcagaggctaagaggccgactacgtaccctcgaaatgctccaaagagcctaggagaccccacttccgggttcctacagggctcaggaaaagcccctacctgcttcgaaggctgaccgtgaagccacaaggcccacttcataccagggagtacccccactcgccccttcctcacctcgggcccccgccccgtctctttttcccaccctcatcgtgtccccacaacccccggacatccctcggccccgcgcccctgcggcaaagccacatctcccaccgacccactgccctgaggccgaacagccgggggtccctggccgggggcccggctctctcaccatcgcgggcgctggctgggccggaaagcggaagtacggaagtggccagccccgcgatgcctgccctttcgcgagaagcgcagctacggtctccgcccggacttccggacggtaccatctatgctccgagcggggtagagagcccttacgaacgcttgggccttccggaagttttccacctagggctgtctcggtatttttaaattcttgcactcgagtcactatttaagctcctccaggaatgggtgcagcttccctttgtgccttcggccttcttgtcacctttgccacagcctcccccaggtatgcaatggtacagcccagcttcagattgggcaccaaattaggacaagccgaagcggacgagcccttcgtttcttccggttctgtacccccatcctttctctcgcccctcctacccgcagctcctggcgctcggcggggctaactgcagcgcggagatctcggccgccaagctccgcctcccgccccgggctgtgccccggggctcgcctgaggccgaccacccgcaccccacctctagcggctttgctcgaggcccaccttcttcccacccccggcaaactccagtaggctcgccctcgctgactccccgcccccgcgtcaactgcaaggggcccgcccatagccagttccggggcggttgctcacatcgaccggaactccccgccccctcccgcggcccctggggccgtaggaggccgcagcgaggaggtagagggggcgggggtcgcactagggtgtccctagagaacgaggactctgaaggcgggacatttgggcgacccccgggcggggccagccattaaacagtcccacttctgtgccagacactgaactgggctcttgacgggcatcatctcttaatcctcagaacatcccagggaggtaggtactattgttatccccatttttcagattcagacttttaatggggaaacagaccgagacttcttttgtccccattttacagatggaaaaactgagactgaaaaaggtcaaataacatgttcaggggcatataagtagagaatggtaaagcctgggcttgaacccaggtctgtctggcttaccagcccacgttctaaaccactgttagtgactagagaagggagaaaggtggaatagggtaagaaaagaggccaagagtcccagagaacatggtaagaatggggtgcttggaactcaaagtcttagcagaacccaagagaaatagaagggaaggaaagagcatcagaaaggcgaggcaaggcatagcagtatagcatggtgatcagggtgcagactcaagactagcggggttcaaattgcatcttggaagcataggcacatacccacccttacagagtctcagtttctttctctgtaaaaacgagatcacaatggtccttgttcatggtgctgagtgagaaattcagtgagataaactgataaagtgctctgcacctagcttggtacccagttaagtgccctgtgagtaggaactgtgccatcaattttgtcagtaagggactgaagctgggcttccttgaggctgtccctggaggtaagaagcccttgggcttttctcagaccactttgtctcccatcaatggccctgtcctctccagctccacaggatccccatatcctgggccatgagtgagttgaaagactgccccttgcagttccacgacttcaagtctgtggatcacctgaaggtctgtccccgctacacggcagtgctggcacgctctgaggatgatggcatcggcatcgaggagctggacaccctgcagctggagctggagaccctgctgtcttctgccagccggcgcctgcgtgtgcttgaggccgaaacccaggtgataaccccagagaggggccagcaccagagatggactgcaacaagttatgggatgggtcattgagttagccccatatgctgagacttggggtacaggggtttgtggggagagggagagagacgcaaactgggtttgcatgacacaaaaaatacacaagaatatgcatgatcctcttaaattgcaagatttctaattcagtaagcttttattggcaccccactcatcccccattgtgttctgggtcctatgctagtcattagagaaaggtaattaggacagttatggctgtcagggagcttggcaactaggaaagtgagaaagtcaagtacataccaggtgatgtgatgttgtggttagcagtcctagggaactggaatggggaaacctggatttgaatcctggcataagcgcttgctagcattgctgtttcctagctatgtgactttgagaaagttgcctcatatctctgagtgtcagtttccctatctgcaaagtggggtgaataataggacctaccttagtgcttttgtgaggattaaaagagaattttttgcaaaaactcagcccaatgccagacactaagtaagtacttcagatgttatttatttgctactctgatgactttattcactgcataaagatgccttgagccttgtgtgccaggcgctatgctgtattctgcaaaatagagatggttaaggtgggctttctggtcctcagtagcttatggtctagttgaagagacaaggtgtgatggtcatt

SEQ ID NO: 315315 - DNA, 4001 bp, Homo sapiens
agtagaattgcttgaacccaggagactgaggttgcagtgagccgagatcacgccactgtgctccagcctgggtgacagagcgagactgtgtcttaaaaaaaaagaaaaagaaaaaccacttccaacgaactgtggtccagccattcaattaactactacttggtaataaaaaaagagtaactattgatacacacaacatggttgactctcaaatgtattatggtaagaagccacacttaaaagcctgcatactaaagaattccatttacatgacaatctgaaaaaggcaaaactacaggggggaaaaatcagtagttgtctggggtgggaaggagaggactgattacaaaagggcttgagggaactttttggggtgacggaaatgttctgtattttggttgcagtagtggttacacaacttgactttttttttttaagacacgggatcttgctatattgtccaggctgaagtgcagtggctattcacaggagtgatcacagtgtactacggcctcgaacttctgggctcaagtgatcctcctgcctcagtgtcctgagcggatggtactacaggcgcatgccaccatacccagcaagtttttgcaacgcttttttttttgagacggagtcttactctgttgcccagtctggtgtgcagtggcacgatctcgactcactgcaagctctgctttctgggttcacgccattctcctgcctcagcctcctgagtagctgggactacaggtgcccaccaccacgcccggctaattttttgcatttttagtagagaagaggtttcaccgtgttagccaggatggtctcgatctcctgacgtcgtgatccgcccgcctctgcctcccaaagtgctgggattacaagcgtgagccaccacgcctggcctttgtcaacagttatagaaagtaaacctaaaaagggtgactggctccgtgacgcctgtcctttcatgaataaaacagatgtagtctcatgtaatacctcaataaacttgaacttttaaaaatcaagaggcatgtgccccactagaaaaaaaaaatacagatttttagcagagacatgaggtcacaaaagtttgccaggatagggaacccaggaggaagaacaaatttagaatagaatatgagttttgaactagaggtctaatttcaaggtctcttcaagatatccaggcaaaccttgaaagagagctgagaagccagattaggagtcatcagaatgaagaaagttatcgaagccaggagactagatcggtatcaccagggaaggtgtgacgaagagggagatggtcatccaaagtcacaactcccaggaatgcccacacgtatgaaaaaggcccacatgtatgaaaaaggcccacatgtatgaaaaagggaggacttccaggaagggagggatgagcagtatcacagctaacatacactaaggctgacacagttcagttctgaccaggaagggcctgaatggaagcaacacgagagatcctccaatggggtggaagcagggctggaggtaccaagaatgggataaggaagtgtggccgcctgccttaagcaactgtagggtcaggaaggcagaagaggacaaagggcgtatgtcgtgaagttccactgtggataggcaggtggacttgcttcatgcctcagaggctaagaggccgactacgtaccctcgaaatgctccaaagagcctaggagaccccacttccgggttcctacagggctcaggaaaagcccctacctgcttcgaaggctgaccgtgaagccacaaggcccacttcataccagggagtacccccactcgccccttcctcacctcgggcccccgccccgtctctttttcccaccctcatcgtgtccccacaacccccggacatccctcggccccgcgcccctgcggcaaagccacatctcccaccgacccactgccctgaggccgaacagccgggggtccctggccgggggcccggctctctcaccatcgcgggcgctggctgggccggaaagcggaagtacggaagtggccagccccgcgatgcctgccctttcgcgagaagcgcagctacggtctccgcccggacttccggacggtaccatctatgctccgagcggggtagagagcccttacgaacgcttgggccttccggaagttttccacctagggctgtctcggtatttttaaattcttgcactcgagtcactatttaagctcctccaggaatgggtgcagcttccctttgtgccttcggccttcttgtcacctttgccacagcctcccccaggtatgcaatggtacagcccagcttcagattgggcaccaaattaggacaagccgaagcggacgagcccttcgtttcttccggttctgtacccccatcctttctctcgcccctcctacccgcagctcctggcgctcggcggggctaactgcagcgcggagatctcggccgccaagctccgcctcccgccccgggctgtgccccggggctcgcctgaggccgaccacccgcaccccacctctagcggctttgctcgaggcccaccttcttcccacccccggcaaactccagtaggctcgccctcgctgactccccgcccccgcgtcaactgcaaggggcccgcccatagccagttccggggcggttgctcacatcgaccggaactccccgccccctcccgcggcccctggggccgtaggaggccgcagcgaggaggtagagggggcgggggtcgcactagggtgtccctagagaacgaggactctgaaggcgggacatttgggcgacccccgggcggggccagccattaaacagtcccacttctgtgccagacactgaactgggctcttgacgggcatcatctcttaatcctcagaacatcccagggaggtaggtactattgttatccccatttttcagattcagacttttaatggggaaacagaccgagacttcttttgtccccattttacagatggaaaaactgagactgaaaaaggtcaaataacatgttcaggggcatataagtagagaatggtaaagcctgggcttgaacccaggtctgtctggcttaccagcccacgttctaaaccactgttagtgactagagaagggagaaaggtggaatagggtaagaaaagaggccaagagtcccagagaacatggtaagaatggggtgcttggaactcaaagtcttagcagaacccaagagaaatagaagggaaggaaagagcatcagaaaggcgaggcaaggcatagcagtatagcatggtgatcagggtgcagactcaagactagcggggttcaaattgcatcttggaagcataggcacatacccacccttacagagtctcagtttctttctctgtaaaaacgagatcacaatggtccttgttcatggtgctgagtgagaaattcagtgagataaactgataaagtgctctgcacctagcttggtacccagttaagtgccctgtgagtaggaactgtgccatcaattttgtcagtaagggactgaagctgggcttccttgaggctgtccctggaggtaagaagcccttgggcttttctcagaccactttgtctcccatcaatggccctgtcctctccagctccacaggatccccatatcctgggccatgagtgagttgaaagactgccccttgcagttccacgacttcaagtctgtggatcacctgaaggtctgtccccgctacacggcagtgctggcacgctctgaggatgatggcatcggcatcgaggagctggacaccctgcagctggagctggagaccctgctgtcttctgccagccggcgcctgcgtgtgcttgaggccgaaacccaggtgataaccccagagaggggccagcaccagagatggactgcaacaagttatgggatgggtcattgagttagccccatatgctgagacttggggtacaggggtttgtggggagagggagagagacgcaaactgggtttgcatga

SEQ ID NO: 315316 - DNA, 4001 bp, Homo sapiens
acaggcgcatgccaccatacccagcaagtttttgcaacgcttttttttttgagacggagtcttactctgttgcccagtctggtgtgcagtggcacgatctcgactcactgcaagctctgctttctgggttcacgccattctcctgcctcagcctcctgagtagctgggactacaggtgcccaccaccacgcccggctaattttttgcatttttagtagagaagaggtttcaccgtgttagccaggatggtctcgatctcctgacgtcgtgatccgcccgcctctgcctcccaaagtgctgggattacaagcgtgagccaccacgcctggcctttgtcaacagttatagaaagtaaacctaaaaagggtgactggctccgtgacgcctgtcctttcatgaataaaacagatgtagtctcatgtaatacctcaataaacttgaacttttaaaaatcaagaggcatgtgccccactagaaaaaaaaaatacagatttttagcagagacatgaggtcacaaaagtttgccaggatagggaacccaggaggaagaacaaatttagaatagaatatgagttttgaactagaggtctaatttcaaggtctcttcaagatatccaggcaaaccttgaaagagagctgagaagccagattaggagtcatcagaatgaagaaagttatcgaagccaggagactagatcggtatcaccagggaaggtgtgacgaagagggagatggtcatccaaagtcacaactcccaggaatgcccacacgtatgaaaaaggcccacatgtatgaaaaaggcccacatgtatgaaaaagggaggacttccaggaagggagggatgagcagtatcacagctaacatacactaaggctgacacagttcagttctgaccaggaagggcctgaatggaagcaacacgagagatcctccaatggggtggaagcagggctggaggtaccaagaatgggataaggaagtgtggccgcctgccttaagcaactgtagggtcaggaaggcagaagaggacaaagggcgtatgtcgtgaagttccactgtggataggcaggtggacttgcttcatgcctcagaggctaagaggccgactacgtaccctcgaaatgctccaaagagcctaggagaccccacttccgggttcctacagggctcaggaaaagcccctacctgcttcgaaggctgaccgtgaagccacaaggcccacttcataccagggagtacccccactcgccccttcctcacctcgggcccccgccccgtctctttttcccaccctcatcgtgtccccacaacccccggacatccctcggccccgcgcccctgcggcaaagccacatctcccaccgacccactgccctgaggccgaacagccgggggtccctggccgggggcccggctctctcaccatcgcgggcgctggctgggccggaaagcggaagtacggaagtggccagccccgcgatgcctgccctttcgcgagaagcgcagctacggtctccgcccggacttccggacggtaccatctatgctccgagcggggtagagagcccttacgaacgcttgggccttccggaagttttccacctagggctgtctcggtatttttaaattcttgcactcgagtcactatttaagctcctccaggaatgggtgcagcttccctttgtgccttcggccttcttgtcacctttgccacagcctcccccaggtatgcaatggtacagcccagcttcagattgggcaccaaattaggacaagccgaagcggacgagcccttcgtttcttccggttctgtacccccatcctttctctcgcccctcctacccgcagctcctggcgctcggcggggctaactgcagcgcggagatctcggccgccaagctccgcctcccgccccgggctgtgccccggggctcgcctgaggccgaccacccgcaccccacctctagcggctttgctcgaggcccaccttcttcccacccccggcaaactccagtaggctcgccctcgctgactccccgcccccgcgtcaactgcaaggggcccgcccatagccagttccggggcggttgctcacatcgaccggaactccccgccccctcccgcggcccctggggccgtaggaggccgcagcgaggaggtagagggggcgggggtcgcactagggtgtccctagagaacgaggactctgaaggcgggacatttgggcgacccccgggcggggccagccattaaacagtcccacttctgtgccagacactgaactgggctcttgacgggcatcatctcttaatcctcagaacatcccagggaggtaggtactattgttatccccatttttcagattcagacttttaatggggaaacagaccgagacttcttttgtccccattttacagatggaaaaactgagactgaaaaaggtcaaataacatgttcaggggcatataagtagagaatggtaaagcctgggcttgaacccaggtctgtctggcttaccagcccacgttctaaaccactgttagtgactagagaagggagaaaggtggaatagggtaagaaaagaggccaagagtcccagagaacatggtaagaatggggtgcttggaactcaaagtcttagcagaacccaagagaaatagaagggaaggaaagagcatcagaaaggcgaggcaaggcatagcagtatagcatggtgatcagggtgcagactcaagactagcggggttcaaattgcatcttggaagcataggcacatacccacccttacagagtctcagtttctttctctgtaaaaacgagatcacaatggtccttgttcatggtgctgagtgagaaattcagtgagataaactgataaagtgctctgcacctagcttggtacccagttaagtgccctgtgagtaggaactgtgccatcaattttgtcagtaagggactgaagctgggcttccttgaggctgtccctggaggtaagaagcccttgggcttttctcagaccactttgtctcccatcaatggccctgtcctctccagctccacaggatccccatatcctgggccatgagtgagttgaaagactgccccttgcagttccacgacttcaagtctgtggatcacctgaaggtctgtccccgctacacggcagtgctggcacgctctgaggatgatggcatcggcatcgaggagctggacaccctgcagctggagctggagaccctgctgtcttctgccagccggcgcctgcgtgtgcttgaggccgaaacccaggtgataaccccagagaggggccagcaccagagatggactgcaacaagttatgggatgggtcattgagttagccccatatgctgagacttggggtacaggggtttgtggggagagggagagagacgcaaactgggtttgcatgacacaaaaaatacacaagaatatgcatgatcctcttaaattgcaagatttctaattcagtaagcttttattggcaccccactcatcccccattgtgttctgggtcctatgctagtcattagagaaaggtaattaggacagttatggctgtcagggagcttggcaactaggaaagtgagaaagtcaagtacataccaggtgatgtgatgttgtggttagcagtcctagggaactggaatggggaaacctggatttgaatcctggcataagcgcttgctagcattgctgtttcctagctatgtgactttgagaaagttgcctcatatctctgagtgtcagtttccctatctgcaaagtggggtgaataataggacctaccttagtgcttttgtgaggattaaaagagaattttttgcaaaaactcagcccaatgccagacactaagtaagtacttcagatgttatttatttgctactctgatgactttattcactgcataaagatgccttgagccttgtgtgccaggcgctatgctgtattctgcaaaatagagatggttaaggtgggcttt

SEQ ID NO: 315317 - DNA, 4001 bp, Homo sapiens; identical to SEQ ID NO: 315316

SEQ ID NO: 315318 - DNA, 4001 bp, Homo sapiens
ccaaatgagcaattttgagaattttatacaaaagggggaaaaaacaagatgaaatcaagtacccaaggcatgcacaagaggcagatgcagttgtcccatccacaccccctttacacacacttgtgaatacaccttgccatcaaaatgggtcgacaaatcttagagacacataactcccacacaactaccagttccccattctccactacagagtagaagaagcaacaaaagaggatatttctccaacttttgaacaaatgaccctcgacttctgactcaagatgtggcattgatgttctgcagcatctctaagatgactgaaaaattatttgcaggttccaaacatagacatgcttccctaggtataaagaatacagtagtctgcaaggtcaaaaaaaactattgaaaaggtaataattcagcataaatatggtatctaattttggcaataaacctttgagggtcaacatttccaggcttcgaactgacagctacattattaaaaacataagccctctcccaagctcccgagctcccaagctcctgtcagttgctggtgcgacaagatcctgtggaaggaagtctttggcaggcagctctagtgaagctatcccaactaaatgctacttctccaggctcacaatagtctatagacactggaaatggcttttcagagttaaaatctgttattatttttttctccctacctttataaaacccctgacacttccccttctgatgtgctgtcaaatgaggctcatgaataatttagcatttacttcctcctcacttttttaagctgtgagaaaaatagaaagaaaaaaaaagaagaaagagaaggagggaggaggaggaaggaagagggggagagagagaagaagaaagtaaaaagaaagaagaaggagaaggagaagcagagagaggcgctgtagcttagaaagttagttcttttcaaaaaaatcccaagcaataactgtcccattcccagtcattacaatggtaattattactagacaaataagagttttaatatgtttctttgggagtattcaattaccatttactaattcagtaactttatttccaactgaaaataggaagtatgagaaaaatacaaaccacagaaattttgctaaaatctaccatgacaaaacagatggtatctaatgatatctttaaaatacacaggcttattcagcaaaggattgtgggaatgcaaaaggaggttttccaaaaggatggtagtttgagtctgtaaagtgactagtaagcaatgcattcaggttttgggaggttttaggatatttcatccagtgcattctgacggatttcttatatttcagtggcactcagtatgcgtggttaacaaaataaaaagttccattttccactggcaaacagcttgtttctcagtgcattggataggggacttctgttgccctaacttgttttttagagtatttaagtaaaaaacagaacatgaccagatttaaaatggagtgaacaaattgagctctaattctccaaactacaagccaaatgagtctctgatacagatcctgtcatggttacattcagtgaactgctggatgcaagcaggcacatttatataataataaatctaaaatgcagatgagatgacagccagacaacaagacctttacctttggtgcagaattcctgctgtaggtcttggcgacttactagcggcttctgtcgttctacgccaggaaaatccacacaagtgatcagagacaactggagtcccatgtccccattaacagttcggaatgcccatctccatgcgattcccttacacagtgtgacacatcgtcaacctgaaaaaagatgaaaaataaataataataattgcaataatcatggtagggtgaaggatgaaataaataagacggggtttctaacactaatgaccagcttccagcaaatcacgttcacagcttgatccagctccacctgtctcaagctgcctgcttcttctctaatgaaggctacagccggctgttcaagtcagaacggcacccacgcaaggagctaaaattaacaattgcattatgcaccgaagattactcacttcaattttaaccttttttagtgaaatctcgcactttgtattaaaaaaaaaaaaaagcttgtgtgtttgcctcaatgaggatcaggatcacctatgagcaaaagtcttgcctctttttctaaccaaagcctttgtcttaattatagattacattatacattttaatgctgtttatgtggtttctctctttatgaaagctacctgaataaagtgtacagaaaggttttgatttaatgaaacattctctataaaagttaaaaaaaagaagaagaaaacttttataatggcatggctgagaaagctcttttctctctacttatagtttgggaagaagaattcctaatattcttgttgcagggtgaacacaatctatccatagccctccctccccatcgggattgccactgccagctgggcattctgtttgacagcaaagaaacactgacagagggattcagcagatttgcaaacttcaagcctgttgaaaacaatccacgctataatgtgcactttctctttctcacaactcctacaggagcagcggcaaagacagcttgaatgcaaacacagagacgggctcctaataatatttgcccaaatcaggctgcatctcttccttttccctataacgctattctggtgcacaacggctaaatccaacagcatgcacacctcttccaacacatacctatctatgaaaacactaaatgcatcccagttacgtagtttgagagttagaaaccctctctccctcctccttgctaccctcttctcccaagtttaaatgagcacagctggttccttacaggattttactgtggctatattaataacatattgggttacaaagccatttgttgtgcaaggggaaagcaactgttgaaaatgcaatcagtagtacagtcaatagtttctggatttattcatgttttatgaagatggatgattagactttaaactatgtttcttccatttttggaaattatatggcttttgagagctagacatgcatttaggaaaaaagtggattgctaatcaatagtaattttagtttttcaattttgatcagtttcaccatagctactataatactcaatattaaatagaaatcatcgtgtcttaaaaattagaaactatttaactaagaagcccattatctaatatgtcttagcataaatgtcagtgatggttacgaaaagcattctggattctgttgtactttttccaagttgaatgaagttctcaaggatcacagaaactcttttgatttctctttaagaccctcatatttgtacagttcactcagcaggtgaacagcaatgtaatttccaaaactaagtcttagatgcattattccagcctcagtaggaggatgcaagatataattctttccaggaagagagaaagaacaaactgatattcacataactaactcaaagcagggacagcctggatatatgtgtatgcgtaattaccaggacacgttttgaaatagcaccgagctctaaagtcagcgaggtattattcttgcatgcctgaatcataaagtcatcatctaccaagataaaagagaaaatgggcatatgggaatgagcagagaggaacatatggatcacaaatatttttgtaactgattaaaattgttctctttgctgagaaagcagtgccaggaaatcaaccctacttcagctttctgctcaccagactaaccggactcttccactgccatttcattttgatctgtttcaatttctttcatttttgtaaataacccaaactattttcaacaaatatcttttcttcaacatttggttaataaatattctggccaaatttcaactgttacagtttgaaggatggaaggagaaagaagagactatatataaatgcacaaaataaaagttactat

SEQ ID NO: 315319 - DNA, 4001 bp, Homo sapiens
gtactctaaacacattcttaggaaaatgatttctaccagccttttaagaaatataactgcccacccctataactttcaattctctccttgttttttcttttaggcttggattctgtccttaccctacatcttcaggaggtgatcaggtagcaaacctgaatagctgacagcaaccacatccacctcagctatatttctatgcataaacattgaatgagttaattcctattcctaagaaactttctaaacacctgcctaattcaactcaattctaccaccatatctacaacctgagacagaaaagagtaaattggcgattgcaatgaagcacagatttcatgcatgtaaaaataaaactgaacatcttttctattcttccccttgagccctttgggacctaggaccccaatccttccaggacaacaaacagagtataactttctacctcttcaataggtctctttcaaaaagagcattgcaaactttctaccataaagcctatacaaatcactgtagacttctctgatgaaaatcattgccaacttccagctttccatttctgtcttttctgggggaaggagcgtccatccctccttgacgaaacataaaaaacacaatacatgtataacaacatcagctttctacaaacacgaagaagaaatacagacaagaaaaaattcaaaagaaacagacagatatatggcagaaagaaagaaggaattctaaaaatccacaaaaggcgtgcaatgttcacgtcggaagaccttgattattaccttgatcgaactgtggatatcccccctgcgtcttggtgccttgattggtttgatttagttttggattttattaatattattgtttctcaatgattgatttggctggatttgtttgttttggcttttggcttggcttttgttgttgttgttgttgttgggtttgtttgtttgttttgtttttggtcgatttatttaactgctagtaaaaggagctttctgcagtgtcggctgggatcccacacagctgtggcagccagggctgcggcggcggctcggtcgcggcttgtgtccccgctgcccctgctgctgctggtctctgctccggacgcgctcagaaggtgccaccgccgccttctctggccggctggccgccgggagtgaacgcgcccccgcctcctgtctgctcttctgtccgtctgcacgtctgtcagtccgaccgtctgtgggtccgactagcagctcggcgcgggattctcgctttgctgcgctctgctctcaaagctgccactctcgcaggctgccagtctgtgcgctggtctgtccgtccgtccgaatccctccgtcccaccagcaatgcagcgtccctcttccggtcttctgtgcccacagtcctctcccactctgtgcccctggccgcttcgctcggtaagaggagggcgtgtggagggagggagcacgcgagtgttgctgtctatctttctgtgtgcctctccctgcctacttaatgctctcgctctctttgcgttctggtctccctctctcaggctgtctgactgctcccacctgtccgtagctctgccagtcccacccctagccagccagcctcggtcgatccctcggtcccgttcctccagcttggccgcctccgtcgtctgcccctccgccggtccgtgccctcccacgcggctggcactgccgccgggggcggcgcccggctcctccccgcagctccggatgcgtccggtccccgcccgggctgagggcaacgcgcgtgttgcacgtggctccacagctgctctggccggagaccccgggccccagacccgccacacccgggaggtggcggcagccggacgcctgccagtgtcgccgcctctgcgccactgggagcatccagaactggcccatccagagtgatggcacctgctgggtgcgccgggcgcccgcggtaccactcattccctgggccgttctccgccagccctaaggctggagacaaagcgcatgagccacgcgcagcagcgtgagcatcattaatcagaaagaaaactggcacgttgccccctgccccgccacaccgcctccctgctcccagcgagcaggcatgtattctctcttgtcccccgtgcccaggccctccagcgtacccgtctcgggggcgcccctggactcctggggactcttgacgaagccttgttccactccctccaccgctcactctccaggccaactctgcagagacaatcccacaataataacacctcgccccacccgaatgaatccgtagcctcagcgctcttggagattctttgctttgagcaagactgaaagtccgaacgtgcagcaccaagtgtactccctgtgggtgactgcccagaccgctgcccacctgatcgctgatttggaatcacagaggtgccacagaaacctgggcagggtaggacctggggaaggaacagagttgacacctgaagaaataaaagccttgattttaccgcttgttctagagatgcactatttttattgtctgtaattcattgttttttttcattgtctcggagcactcactaacacactacaaggaaggaaaaaaaaaaaaaaaggaaaaggcgtagtgaaggagagtgaataaatttccggaattccacctactccttctgagtgaatgtagagcctacttttccaacattataggtcaccagccaagatataccactctagctttctgctcccagctgagagcaaggcatttgattctgggcttctttgcaaggttgttattaatgtgcagcaaaattatagttgtacactcacacatggaattgccaaagctcattttgactatatccagcaattcagcttctgaaatgtagacactgaataactgtgtatctggcgaaatgaacgccccatcccacaataaactgaagaggagaaaatcaacttttaccagttgtaattagtaaccccatgaatagacaacaaacaaataactagcataaaacatgttatgaaattttccacatccttttagtttcacttattgacacccaaccataatgacagagattacaaacagatttattaacataaatgcctttgcattattatagaaatgtgatttctacagctatggctgtgttcatatacgctaagatattgattataaatctcaaataaatgatacatgtacttctagaaactactgtaaaaatggaatgaggttgtaccgacccttgatgagtaggtaattattttccaactattcgaaattgtctcccttggtgttcagctctcactagaataagaatgaatctgctgtatgaggtttcaggcaaaccaaacccaaataattcaaaactgttactttgatctacatcctgatcatttccacgtagtcatctccagaagtgcttttttacaagtattttctccttccttccaaacatataaaatttaaaggaaaattatgaaagcatttctaatttactacccttcccttcatctcaagtcattctgaaaaacctatttttctttgagggaaattgagactgcataggaagaaagttggcgtatttgatttctcttctggacagaactacatctcggcatctcctgaatggttggacaggtaatctattaacaggaaaccttagcagattgatcataacacaaagtctctacaaaaaaaaaatcagaattcactcagatagtttattttttttaaatggaacccagttctataaactggatgagaaattatacctagggagaactcagtattcttagtacatactccagtgcctatgtgaaagaacgaaacagtgatttcatagcttaactgcgtattgtcaaacttgatgacaatatttattgtattatctcatggattttaagctttatttttcaaagaaagcatcccaaagaagaataatttgcttcaactaaattttctatcttttctcataatattttgtcaacatagtgggaactgtagaaggctca

SEQ ID NO: 315320 - DNA, 4001 bp, Homo sapiens
atgttaagatattttgccctttattgtgacattacaaaagttaccagtgctgcctctgctacttatatttttaaaatatttagacttcagtaagataatctgtagggcttatcttaattctaaggagagaaaacaccccaaatattctatcaagtccaaacaaaacttcctgcttctcttagttgtgacaattctggacctagactccaagttcataaaagaaaatgaagcaattcacaaggcagagcttcaggttattgtagtatcttagaagcatattagttattttattcgcagaacgttttacaagctccaaacctttcaccgaacaatattttaggaatttgaaattatttctgtacttctcaccacccaagaatatgacagcttgtattaaaaatagtctgcatgcaggaactccctggttagtatgtccctcaagttttaaaaactcaaattattgagtcttctttctaagaactagtgaagaggtttacgaaaacacctattgaactattcatgtataattctctaacaaaaatccatatttccattcatatgatatattaggacttaattaaaattaccatatccaatggtcagcctttacctttccaaatatccttgtccagtatccataaccatgcactgctctgtcttccctcatgcttcttttattgctgagtgaggcgctcgctccttcattaaatagcattaaaaatagactgcacagaactccccagtggagcatgctctaacatggctaataccacagttctcaaggtaaccatactcaactgggatctaagagggaaagtcactgggagatcagcaatttgcaaatctaatagcacatacaattctgtcttggtctgagctaaatactgcaaaggacaaatcagcatgtagtgaaattaagtcactgaggaagtgaaagtcagtttctttagctgtataagtttatttaaatatacgtcctctaaacaaagtactctgtttaataggcactttttctaaagtaacttagttattttaattattgaatggcataaatcatgcctggagaggataaatctaaaacatgaatgcatagcaatccacgtatcttaaacatttcatttaaacaaaatcaaaatactattgataagcaagtgtagtaatcaattatgtttccatatcttttgtaatgaggaagcatattcctcaaagcatatacccaaactcactctccagaaaatttacaaatattctgtcaaagtgatgaaaagcagaatgttataacaaaggaaatataggatcaaacacaaatacataccttgaaaacccacatacacttgaaaagagtgtattcataagctctcacatgcaattcacattagaaatgcagcagaagtaattactgccaagatagtagattactcggctatttgaacaaaacatagatagagctcttggcttccaaatgactgtctttcatgaaaatgacattaactaaaatcttaagatatttaagccctgtggtaatacatacacaaaggatcaaaggagtaggtgtatttatctaaaagtgtgtcaaaggttttctgatttttaacaaatgaaaaatgatttcctgtcatctccacttctctgtttacttaaaacaatcatagcagtttttatctccaaagtagatgaggaggggttaggaatcatttgaatttattctgcatttgaatgaaatcttatacagattcatttcaactttggggaatgtccttcttgttttgagaggctgagtgtcatactggtagaaaatcaaacatcaaaaaacttaaagaaatcaaagattaaaatgaatatctgtactctaaacacattcttaggaaaatgatttctaccagccttttaagaaatataactgcccacccctataactttcaattctctccttgttttttcttttaggcttggattctgtccttaccctacatcttcaggaggtgatcaggtagcaaacctgaatagctgacagcaaccacatccacctcagctatatttctatgcataaacattgaatgagttaattcctattcctaagaaactttctaaacacctgcctaattcaactcaattctaccaccatatctacaacctgagacagaaaagagtaaattggcgattgcaatgaagcacagatttcatgcatgtaaaaataaaactgaacatcttttctattcttccccttgagccctttgggacctaggaccccaatccttccaggacaacaaacagagtataactttctacctcttcaataggtctctttcaaaaagagcattgcaaactttctaccataaagcctatacaaatcactgtagacttctctgatgaaaatcattgccaacttccagctttccatttctgtcttttctgggggaaggagcgtccatccctccttgacgaaacataaaaaacacaatacatgtataacaacatcagctttctacaaacacgaagaagaaatacagacaagaaaaaattcaaaagaaacagacagatatatggcagaaagaaagaaggaattctaaaaatccacaaaaggcgtgcaatgttcacgtcggaagaccttgattattaccttgatcgaactgtggatatcccccctgcgtcttggtgccttgattggtttgatttagttttggattttattaatattattgtttctcaatgattgatttggctggatttgtttgttttggcttttggcttggcttttgttgttgttgttgttgttgggtttgtttgtttgttttgtttttggtcgatttatttaactgctagtaaaaggagctttctgcagtgtcggctgggatcccacacagctgtggcagccagggctgcggcggcggctcggtcgcggcttgtgtccccgctgcccctgctgctgctggtctctgctccggacgcgctcagaaggtgccaccgccgccttctctggccggctggccgccgggagtgaacgcgcccccgcctcctgtctgctcttctgtccgtctgcacgtctgtcagtccgaccgtctgtgggtccgactagcagctcggcgcgggattctcgctttgctgcgctctgctctcaaagctgccactctcgcaggctgccagtctgtgcgctggtctgtccgtccgtccgaatccctccgtcccaccagcaatgcagcgtccctcttccggtcttctgtgcccacagtcctctcccactctgtgcccctggccgcttcgctcggtaagaggagggcgtgtggagggagggagcacgcgagtgttgctgtctatctttctgtgtgcctctccctgcctacttaatgctctcgctctctttgcgttctggtctccctctctcaggctgtctgactgctcccacctgtccgtagctctgccagtcccacccctagccagccagcctcggtcgatccctcggtcccgttcctccagcttggccgcctccgtcgtctgcccctccgccggtccgtgccctcccacgcggctggcactgccgccgggggcggcgcccggctcctccccgcagctccggatgcgtccggtccccgcccgggctgagggcaacgcgcgtgttgcacgtggctccacagctgctctggccggagaccccgggccccagacccgccacacccgggaggtggcggcagccggacgcctgccagtgtcgccgcctctgcgccactgggagcatccagaactggcccatccagagtgatggcacctgctgggtgcgccgggcgcccgcggtaccactcattccctgggccgttctccgccagccctaaggctggagacaaagcgcatgagccacgcgcagcagcgtgagcatcattaatcagaaagaaaactggcacgttgccccctgccccgccacaccgcctccctgctcccagcgagcaggcatgtattctctcttgtcccccgtgcccaggccctccagcgtacccgtctcgggggcg

SEQ ID NO: 315321 - DNA, 4001 bp, Homo sapiens
aatgagcaattttgagaattttatacaaaagggggaaaaaacaagatgaaatcaagtacccaaggcatgcacaagaggcagatgcagttgtcccatccacaccccctttacacacacttgtgaatacaccttgccatcaaaatgggtcgacaaatcttagagacacataactcccacacaactaccagttccccattctccactacagagtagaagaagcaacaaaagaggatatttctccaacttttgaacaaatgaccctcgacttctgactcaagatgtggcattgatgttctgcagcatctctaagatgactgaaaaattatttgcaggttccaaacatagacatgcttccctaggtataaagaatacagtagtctgcaaggtcaaaaaaaactattgaaaaggtaataattcagcataaatatggtatctaattttggcaataaacctttgagggtcaacatttccaggcttcgaactgacagctacattattaaaaacataagccctctcccaagctcccgagctcccaagctcctgtcagttgctggtgcgacaagatcctgtggaaggaagtctttggcaggcagctctagtgaagctatcccaactaaatgctacttctccaggctcacaatagtctatagacactggaaatggcttttcagagttaaaatctgttattatttttttctccctacctttataaaacccctgacacttccccttctgatgtgctgtcaaatgaggctcatgaataatttagcatttacttcctcctcacttttttaagctgtgagaaaaatagaaagaaaaaaaaagaagaaagagaaggagggaggaggaggaaggaagagggggagagagagaagaagaaagtaaaaagaaagaagaaggagaaggagaagcagagagaggcgctgtagcttagaaagttagttcttttcaaaaaaatcccaagcaataactgtcccattcccagtcattacaatggtaattattactagacaaataagagttttaatatgtttctttgggagtattcaattaccatttactaattcagtaactttatttccaactgaaaataggaagtatgagaaaaatacaaaccacagaaattttgctaaaatctaccatgacaaaacagatggtatctaatgatatctttaaaatacacaggcttattcagcaaaggattgtgggaatgcaaaaggaggttttccaaaaggatggtagtttgagtctgtaaagtgactagtaagcaatgcattcaggttttgggaggttttaggatatttcatccagtgcattctgacggatttcttatatttcagtggcactcagtatgcgtggttaacaaaataaaaagttccattttccactggcaaacagcttgtttctcagtgcattggataggggacttctgttgccctaacttgttttttagagtatttaagtaaaaaacagaacatgaccagatttaaaatggagtgaacaaattgagctctaattctccaaactacaagccaaatgagtctctgatacagatcctgtcatggttacattcagtgaactgctggatgcaagcaggcacatttatataataataaatctaaaatgcagatgagatgacagccagacaacaagacctttacctttggtgcagaattcctgctgtaggtcttggcgacttactagcggcttctgtcgttctacgccaggaaaatccacacaagtgatcagagacaactggagtcccatgtccccattaacagttcggaatgcccatctccatgcgattcccttacacagtgtgacacatcgtcaacctgaaaaaagatgaaaaataaataataataattgcaataatcatggtagggtgaaggatgaaataaataagacggggtttctaacactaatgaccagcttccagcaaatcacgttcacagcttgatccagctccacctgtctcaagctgcctgcttcttctctaatgaaggctacagccggctgttcaagtcagaacggcacccacgcaaggagctaaaattaacaattgcattatgcaccgaagattactcacttcaattttaaccttttttagtgaaatctcgcactttgtattaaaaaaaaaaaaaagcttgtgtgtttgcctcaatgaggatcaggatcacctatgagcaaaagtcttgcctctttttctaaccaaagcctttgtcttaattatagattacattatacattttaatgctgtttatgtggtttctctctttatgaaagctacctgaataaagtgtacagaaaggttttgatttaatgaaacattctctataaaagttaaaaaaaagaagaagaaaacttttataatggcatggctgagaaagctcttttctctctacttatagtttgggaagaagaattcctaatattcttgttgcagggtgaacacaatctatccatagccctccctccccatcgggattgccactgccagctgggcattctgtttgacagcaaagaaacactgacagagggattcagcagatttgcaaacttcaagcctgttgaaaacaatccacgctataatgtgcactttctctttctcacaactcctacaggagcagcggcaaagacagcttgaatgcaaacacagagacgggctcctaataatatttgcccaaatcaggctgcatctcttccttttccctataacgctattctggtgcacaacggctaaatccaacagcatgcacacctcttccaacacatacctatctatgaaaacactaaatgcatcccagttacgtagtttgagagttagaaaccctctctccctcctccttgctaccctcttctcccaagtttaaatgagcacagctggttccttacaggattttactgtggctatattaataacatattgggttacaaagccatttgttgtgcaaggggaaagcaactgttgaaaatgcaatcagtagtacagtcaatagtttctggatttattcatgttttatgaagatggatgattagactttaaactatgtttcttccatttttggaaattatatggcttttgagagctagacatgcatttaggaaaaaagtggattgctaatcaatagtaattttagtttttcaattttgatcagtttcaccatagctactataatactcaatattaaatagaaatcatcgtgtcttaaaaattagaaactatttaactaagaagcccattatctaatatgtcttagcataaatgtcagtgatggttacgaaaagcattctggattctgttgtactttttccaagttgaatgaagttctcaaggatcacagaaactcttttgatttctctttaagaccctcatatttgtacagttcactcagcaggtgaacagcaatgtaatttccaaaactaagtcttagatgcattattccagcctcagtaggaggatgcaagatataattctttccaggaagagagaaagaacaaactgatattcacataactaactcaaagcagggacagcctggatatatgtgtatgcgtaattaccaggacacgttttgaaatagcaccgagctctaaagtcagcgaggtattattcttgcatgcctgaatcataaagtcatcatctaccaagataaaagagaaaatgggcatatgggaatgagcagagaggaacatatggatcacaaatatttttgtaactgattaaaattgttctctttgctgagaaagcagtgccaggaaatcaaccctacttcagctttctgctcaccagactaaccggactcttccactgccatttcattttgatctgtttcaatttctttcatttttgtaaataacccaaactattttcaacaaatatcttttcttcaacatttggttaataaatattctggccaaatttcaactgttacagtttgaaggatggaaggagaaagaagagactatatataaatgcacaaaataaaagttactatctt

SEQ ID NO: 315322 - DNA, 4001 bp, Homo sapiens
tgctattgcctgattcaggtctccttgctcagacattctcccagatgcaaattaaaataacaagattttatgccctagaaggttaagatatcagaaaataaagtcagtgcaaggtatttactatcattctttagagatttcatttctcctttcatattcaaatccaaatgagcaattttgagaattttatacaaaagggggaaaaaacaagatgaaatcaagtacccaaggcatgcacaagaggcagatgcagttgtcccatccacaccccctttacacacacttgtgaatacaccttgccatcaaaatgggtcgacaaatcttagagacacataactcccacacaactaccagttccccattctccactacagagtagaagaagcaacaaaagaggatatttctccaacttttgaacaaatgaccctcgacttctgactcaagatgtggcattgatgttctgcagcatctctaagatgactgaaaaattatttgcaggttccaaacatagacatgcttccctaggtataaagaatacagtagtctgcaaggtcaaaaaaaactattgaaaaggtaataattcagcataaatatggtatctaattttggcaataaacctttgagggtcaacatttccaggcttcgaactgacagctacattattaaaaacataagccctctcccaagctcccgagctcccaagctcctgtcagttgctggtgcgacaagatcctgtggaaggaagtctttggcaggcagctctagtgaagctatcccaactaaatgctacttctccaggctcacaatagtctatagacactggaaatggcttttcagagttaaaatctgttattatttttttctccctacctttataaaacccctgacacttccccttctgatgtgctgtcaaatgaggctcatgaataatttagcatttacttcctcctcacttttttaagctgtgagaaaaatagaaagaaaaaaaaagaagaaagagaaggagggaggaggaggaaggaagagggggagagagagaagaagaaagtaaaaagaaagaagaaggagaaggagaagcagagagaggcgctgtagcttagaaagttagttcttttcaaaaaaatcccaagcaataactgtcccattcccagtcattacaatggtaattattactagacaaataagagttttaatatgtttctttgggagtattcaattaccatttactaattcagtaactttatttccaactgaaaataggaagtatgagaaaaatacaaaccacagaaattttgctaaaatctaccatgacaaaacagatggtatctaatgatatctttaaaatacacaggcttattcagcaaaggattgtgggaatgcaaaaggaggttttccaaaaggatggtagtttgagtctgtaaagtgactagtaagcaatgcattcaggttttgggaggttttaggatatttcatccagtgcattctgacggatttcttatatttcagtggcactcagtatgcgtggttaacaaaataaaaagttccattttccactggcaaacagcttgtttctcagtgcattggataggggacttctgttgccctaacttgttttttagagtatttaagtaaaaaacagaacatgaccagatttaaaatggagtgaacaaattgagctctaattctccaaactacaagccaaatgagtctctgatacagatcctgtcatggttacattcagtgaactgctggatgcaagcaggcacatttatataataataaatctaaaatgcagatgagatgacagccagacaacaagacctttacctttggtgcagaattcctgctgtaggtcttggcgacttactagcggcttctgtcgttctacgccaggaaaatccacacaagtgatcagagacaactggagtcccatgtccccattaacagttcggaatgcccatctccatgcgattcccttacacagtgtgacacatcgtcaacctgaaaaaagatgaaaaataaataataataattgcaataatcatggtagggtgaaggatgaaataaataagacggggtttctaacactaatgaccagcttccagcaaatcacgttcacagcttgatccagctccacctgtctcaagctgcctgcttcttctctaatgaaggctacagccggctgttcaagtcagaacggcacccacgcaaggagctaaaattaacaattgcattatgcaccgaagattactcacttcaattttaaccttttttagtgaaatctcgcactttgtattaaaaaaaaaaaaaagcttgtgtgtttgcctcaatgaggatcaggatcacctatgagcaaaagtcttgcctctttttctaaccaaagcctttgtcttaattatagattacattatacattttaatgctgtttatgtggtttctctctttatgaaagctacctgaataaagtgtacagaaaggttttgatttaatgaaacattctctataaaagttaaaaaaaagaagaagaaaacttttataatggcatggctgagaaagctcttttctctctacttatagtttgggaagaagaattcctaatattcttgttgcagggtgaacacaatctatccatagccctccctccccatcgggattgccactgccagctgggcattctgtttgacagcaaagaaacactgacagagggattcagcagatttgcaaacttcaagcctgttgaaaacaatccacgctataatgtgcactttctctttctcacaactcctacaggagcagcggcaaagacagcttgaatgcaaacacagagacgggctcctaataatatttgcccaaatcaggctgcatctcttccttttccctataacgctattctggtgcacaacggctaaatccaacagcatgcacacctcttccaacacatacctatctatgaaaacactaaatgcatcccagttacgtagtttgagagttagaaaccctctctccctcctccttgctaccctcttctcccaagtttaaatgagcacagctggttccttacaggattttactgtggctatattaataacatattgggttacaaagccatttgttgtgcaaggggaaagcaactgttgaaaatgcaatcagtagtacagtcaatagtttctggatttattcatgttttatgaagatggatgattagactttaaactatgtttcttccatttttggaaattatatggcttttgagagctagacatgcatttaggaaaaaagtggattgctaatcaatagtaattttagtttttcaattttgatcagtttcaccatagctactataatactcaatattaaatagaaatcatcgtgtcttaaaaattagaaactatttaactaagaagcccattatctaatatgtcttagcataaatgtcagtgatggttacgaaaagcattctggattctgttgtactttttccaagttgaatgaagttctcaaggatcacagaaactcttttgatttctctttaagaccctcatatttgtacagttcactcagcaggtgaacagcaatgtaatttccaaaactaagtcttagatgcattattccagcctcagtaggaggatgcaagatataattctttccaggaagagagaaagaacaaactgatattcacataactaactcaaagcagggacagcctggatatatgtgtatgcgtaattaccaggacacgttttgaaatagcaccgagctctaaagtcagcgaggtattattcttgcatgcctgaatcataaagtcatcatctaccaagataaaagagaaaatgggcatatgggaatgagcagagaggaacatatggatcacaaatatttttgtaactgattaaaattgttctctttgctgagaaagcagtgccaggaaatcaaccctacttcagctttctgctcaccagactaaccggactcttccactgccatttcattttgatctgttt

SEQ ID NO: 315323 - DNA, 4001 bp, Homo sapiens
ggttatgatataaatacaagtaacatgtacttcaatatctagggccaaaattaatccaagatgagcaaaattaattaaattataagactaaggcactacaaataatcaatttattagaacttggcataaagctacctaaaggaaactaacactcagaagcaaagacaccctaagcaaacaaatctagttacagatacatcttgttaatattttctttttccttcaacagtccttcagcatttgcttacattgctgcttgaaattcatttatcatatttaacataaaatgctagaataaaaaataaaatacaagtccacagaaatgtagagcttctagaatcataaagatcctttgtctaaagaaaggaagtatatgttttacaaatgcatcatcgctgacttaaaatatattcagaactttccaggtgatataatatatttttaaggaagtcaattctttttgtgattagagattcacaaatttctaaataggctactaccatgtgataccagttagaatgatgccagtacttaccataagaagaaatggctttcattgtcgacatcacctttaagccccacattctctcctaaccttgtcacaaagcagatctgaattaaactgacttatatacaaatgattaatttgcaatttccaaccttatggacttcaaactgtctcctcacactaatgagaattctcaatcatattcacttctggctaccttgtatattgtgtcttcagtggctgactcattctacactctacttatgtagcttatcattatcttgtccacagacaaaatagacattgaattccgatgaggattcccactgatttgagaagcttgagaaaggtatcagcattgtggtccaaaaggcatgaccactaagggaaatactttagccagtgtgaattgtcttcctcctctagaactaagtcaaaaagacaaacaaacaaaaaatcacagtaactcattgtgatgtattttccttagtagtttatttctggggattatttttcataggaattggcaaaaatccagatcaactttgcacattgttctaacagcttcatttaaaaattatatgactaacttccccatttaatagaaactgcttactttctcttatgtttattaaccttgcaactacttaagcattttgtctaattagctttactctgaacaaaagaataacctgattatagtatgttgttaatatgaaaatcaacacaagacctttctgattgaacattctcactttctacctcaagacaggtgttctgcatatatacaaatgttgcagacagatggcttcttgcattgtacacactataatgttaagatattttgccctttattgtgacattacaaaagttaccagtgctgcctctgctacttatatttttaaaatatttagacttcagtaagataatctgtagggcttatcttaattctaaggagagaaaacaccccaaatattctatcaagtccaaacaaaacttcctgcttctcttagttgtgacaattctggacctagactccaagttcataaaagaaaatgaagcaattcacaaggcagagcttcaggttattgtagtatcttagaagcatattagttattttattcgcagaacgttttacaagctccaaacctttcaccgaacaatattttaggaatttgaaattatttctgtacttctcaccacccaagaatatgacagcttgtattaaaaatagtctgcatgcaggaactccctggttagtatgtccctcaagttttaaaaactcaaattattgagtcttctttctaagaactagtgaagaggtttacgaaaacacctattgaactattcatgtataattctctaacaaaaatccatatttccattcatatgatatattaggacttaattaaaattaccatatccaatggtcagcctttacctttccaaatatccttgtccagtatccataaccatgcactgctctgtcttccctcatgcttcttttattgctgagtgaggcgctcgctccttcattaaatagcattaaaaatagactgcacagaactccccagtggagcatgctctaacatggctaataccacagttctcaaggtaaccatactcaactgggatctaagagggaaagtcactgggagatcagcaatttgcaaatctaatagcacatacaattctgtcttggtctgagctaaatactgcaaaggacaaatcagcatgtagtgaaattaagtcactgaggaagtgaaagtcagtttctttagctgtataagtttatttaaatatacgtcctctaaacaaagtactctgtttaataggcactttttctaaagtaacttagttattttaattattgaatggcataaatcatgcctggagaggataaatctaaaacatgaatgcatagcaatccacgtatcttaaacatttcatttaaacaaaatcaaaatactattgataagcaagtgtagtaatcaattatgtttccatatcttttgtaatgaggaagcatattcctcaaagcatatacccaaactcactctccagaaaatttacaaatattctgtcaaagtgatgaaaagcagaatgttataacaaaggaaatataggatcaaacacaaatacataccttgaaaacccacatacacttgaaaagagtgtattcataagctctcacatgcaattcacattagaaatgcagcagaagtaattactgccaagatagtagattactcggctatttgaacaaaacatagatagagctcttggcttccaaatgactgtctttcatgaaaatgacattaactaaaatcttaagatatttaagccctgtggtaatacatacacaaaggatcaaaggagtaggtgtatttatctaaaagtgtgtcaaaggttttctgatttttaacaaatgaaaaatgatttcctgtcatctccacttctctgtttacttaaaacaatcatagcagtttttatctccaaagtagatgaggaggggttaggaatcatttgaatttattctgcatttgaatgaaatcttatacagattcatttcaactttggggaatgtccttcttgttttgagaggctgagtgtcatactggtagaaaatcaaacatcaaaaaacttaaagaaatcaaagattaaaatgaatatctgtactctaaacacattcttaggaaaatgatttctaccagccttttaagaaatataactgcccacccctataactttcaattctctccttgttttttcttttaggcttggattctgtccttaccctacatcttcaggaggtgatcaggtagcaaacctgaatagctgacagcaaccacatccacctcagctatatttctatgcataaacattgaatgagttaattcctattcctaagaaactttctaaacacctgcctaattcaactcaattctaccaccatatctacaacctgagacagaaaagagtaaattggcgattgcaatgaagcacagatttcatgcatgtaaaaataaaactgaacatcttttctattcttccccttgagccctttgggacctaggaccccaatccttccaggacaacaaacagagtataactttctacctcttcaataggtctctttcaaaaagagcattgcaaactttctaccataaagcctatacaaatcactgtagacttctctgatgaaaatcattgccaacttccagctttccatttctgtcttttctgggggaaggagcgtccatccctccttgacgaaacataaaaaacacaatacatgtataacaacatcagctttctacaaacacgaagaagaaatacagacaagaaaaaattcaaaagaaacagacagatatatggcagaaagaaagaaggaattctaaaaatccacaaaaggcgtgcaatgttcacgtcggaagaccttgattattaccttgatcgaactgtggatatcccccctgcgtcttggtgcctt

SEQ ID NO: 315324 - DNA, 4001 bp, Homo sapiens
aatttatacccatgatatcaggtctacctagaatgttaagaaccctaccttggattttcttctttcttgattctgagcctccagccgcctctgtatgttggaaagaaaataaaacaaaataaaataaaacaaacaaaaacgaacagtaaatcaacaaccgagagagagagagaaagaaagagagaaaaatgtcactaccggctacagtagagaagtcaataataatagcaacagaacatcacaaccattagggaggactcctccttccctagctttaaaaaacttttgactaacttttagctcttttctgtttataacaactattggaaaggggacaaggaaaagccagctttgaagttttttggccatcatgcagttatctgcctttgttaactgttggtatataaagagttaacacttctgtagtttagttaaaagaaaatcaatacttacaagctatttgtaagtgcagtttgctttccttctaccgaatctctttcccttgtaaatcatgatatgtttcacagcactttttcatttcctttaatcactcccagtcttttttcctccttcaagtactctctctttggctgggaattctagggtttagcttgtttgctactaagatttgagccttagcatgcccatgaaagtcaaaggaacacctgcctttgatttttcttagtttaccatgaattgagtcttcatctttccacagaatagcaaattcatttttaaaactcagctagtctaaagctgccttgggagaagccctctatgtacaccttgaggtgttctggaaattggtaaggggatgctgtgtgcaaattcagaaaataaatactttcctatgacttttttccccacaaaacacattttagagcacggttgggttaggacaaaaagtgacaaaaattgaaaaagtaggagactagcatttcctaatgatataaccagtgaaactctttaaaaaataaatctctaaagtattctgaaaataaaagaagggagctgcacacagttgtatgagagtcagggtctcttcatgctcactcacctgcagttccagtttctcctcttcatccagactttctgatttaacaatgccgttctctggagtggccgtctcctgctcagtccctccttcctctgctattgcctgattcaggtctccttgctcagacattctcccagatgcaaattaaaataacaagattttatgccctagaaggttaagatatcagaaaataaagtcagtgcaaggtatttactatcattctttagagatttcatttctcctttcatattcaaatccaaatgagcaattttgagaattttatacaaaagggggaaaaaacaagatgaaatcaagtacccaaggcatgcacaagaggcagatgcagttgtcccatccacaccccctttacacacacttgtgaatacaccttgccatcaaaatgggtcgacaaatcttagagacacataactcccacacaactaccagttccccattctccactacagagtagaagaagcaacaaaagaggatatttctccaacttttgaacaaatgaccctcgacttctgactcaagatgtggcattgatgttctgcagcatctctaagatgactgaaaaattatttgcaggttccaaacatagacatgcttccctaggtataaagaatacagtagtctgcaaggtcaaaaaaaactattgaaaaggtaataattcagcataaatatggtatctaattttggcaataaacctttgagggtcaacatttccaggcttcgaactgacagctacattattaaaaacataagccctctcccaagctcccgagctcccaagctcctgtcagttgctggtgcgacaagatcctgtggaaggaagtctttggcaggcagctctagtgaagctatcccaactaaatgctacttctccaggctcacaatagtctatagacactggaaatggcttttcagagttaaaatctgttattatttttttctccctacctttataaaacccctgacacttccccttctgatgtgctgtcaaatgaggctcatgaataatttagcatttacttcctcctcacttttttaagctgtgagaaaaatagaaagaaaaaaaaagaagaaagagaaggagggaggaggaggaaggaagagggggagagagagaagaagaaagtaaaaagaaagaagaaggagaaggagaagcagagagaggcgctgtagcttagaaagttagttcttttcaaaaaaatcccaagcaataactgtcccattcccagtcattacaatggtaattattactagacaaataagagttttaatatgtttctttgggagtattcaattaccatttactaattcagtaactttatttccaactgaaaataggaagtatgagaaaaatacaaaccacagaaattttgctaaaatctaccatgacaaaacagatggtatctaatgatatctttaaaatacacaggcttattcagcaaaggattgtgggaatgcaaaaggaggttttccaaaaggatggtagtttgagtctgtaaagtgactagtaagcaatgcattcaggttttgggaggttttaggatatttcatccagtgcattctgacggatttcttatatttcagtggcactcagtatgcgtggttaacaaaataaaaagttccattttccactggcaaacagcttgtttctcagtgcattggataggggacttctgttgccctaacttgttttttagagtatttaagtaaaaaacagaacatgaccagatttaaaatggagtgaacaaattgagctctaattctccaaactacaagccaaatgagtctctgatacagatcctgtcatggttacattcagtgaactgctggatgcaagcaggcacatttatataataataaatctaaaatgcagatgagatgacagccagacaacaagacctttacctttggtgcagaattcctgctgtaggtcttggcgacttactagcggcttctgtcgttctacgccaggaaaatccacacaagtgatcagagacaactggagtcccatgtccccattaacagttcggaatgcccatctccatgcgattcccttacacagtgtgacacatcgtcaacctgaaaaaagatgaaaaataaataataataattgcaataatcatggtagggtgaaggatgaaataaataagacggggtttctaacactaatgaccagcttccagcaaatcacgttcacagcttgatccagctccacctgtctcaagctgcctgcttcttctctaatgaaggctacagccggctgttcaagtcagaacggcacccacgcaaggagctaaaattaacaattgcattatgcaccgaagattactcacttcaattttaaccttttttagtgaaatctcgcactttgtattaaaaaaaaaaaaaagcttgtgtgtttgcctcaatgaggatcaggatcacctatgagcaaaagtcttgcctctttttctaaccaaagcctttgtcttaattatagattacattatacattttaatgctgtttatgtggtttctctctttatgaaagctacctgaataaagtgtacagaaaggttttgatttaatgaaacattctctataaaagttaaaaaaaagaagaagaaaacttttataatggcatggctgagaaagctcttttctctctacttatagtttgggaagaagaattcctaatattcttgttgcagggtgaacacaatctatccatagccctccctccccatcgggattgccactgccagctgggcattctgtttgacagcaaagaaacactgacagagggattcagcagatttgcaaacttcaagcctgttgaaaacaatccacgctataatgtgcactttctctttctcacaactcctacaggagcagcggcaaagacagcttgaatgcaaacacagagacgggctcctaataatatttgccc

SEQ ID NO: 315325 - DNA, 4001 bp, Homo sapiens
acagtcaatttcagtttctctgaaacatttcaatactctccttagcccaactctcttatacctttcaacctaaaattgtaagttcaaagtcagttactcaattatgcaatttaaggttttaatcataaggttaatataacagataatctaataaggctaatttctttacaaaactttaaatatttaaagattattttaaaaactaatcctaaattgaacacaaaagtataggaatagtgtgtggctaagagcacagactttagaatcagactgccttgctcttcacttactagttctgtgaccttgggtaagccacttaacttttctgtgcctcactttcctcctctctaagtagggataataataggacctacctcatagagaggtaatgagaattagaatttaaaagttagtatttatgaagtgcttaaaataacatgacacatagtgatcactccatggtttgttacattttaaaaatactatataggtttgatgtacttcattgtctctatttagttatgaaatctcttggggttaaaagacatttttctagttttacatccagcaggcaaatagagattaccatcccaagtaaactgggttatcacccctgaaaaaatgatggttactgcctcaggagaccaaggttgctgattggccagcgagcgtgtgagcaggtgtgccatatccaggacgattcttcttacaccccacacagggtcccactggtcctttttcagtgttgtccaacaaaactctgaatctacactttcagaagccttgttcaagtttatgtaattcctccttttgatttgagtagatcaaagactggaccccatccccacctaccctactaaggttgaagataactaactttctatgtgtcccggttggatttatgcatttcttcaattcccaaagacaagatgtattagtttttctctagcccttcatatcctcctttctttcttctgatttccagtctgtatcacctcacccagatttgctgctaacctccttcagatatttttattgcctaattaaattctgaattatttccagattattcctgtctagttaggcataatatcttacagatatttaattgacagctccttggattctgaccctcctgtttttgtcacaacactagagttaagctaatgacaagtgtcagctgttgaatacaacacttaatactatattgccgatgagaaaaccattacctctcatccttaggtgcatgttgtgctgttcctggcttataaatatcctgcaaactctgttgaatgatgagctgggtgtcaaagtcttcatctatgtcttcatcgctggtgtaattatccatgtgaaacgtggacaggtttactttaaagtcagagtgaattaaaagtatttttccagttgtgaagagatcaactgcttaaaattacaaatgaaattcagaaatctagaaaattggtaggattaacaatgaaaaatatacaaaatttaggaaacaaaatattcactaaaaaatttctataaacttaaaaaagttttgtggactgccacagattcaacaaaaattagaagtttccatgagtagccattgacttaaagcttattcaggaaaaaccacctttcaaataagacttcggttagtgccactctaacactgacaacactctgatctgttcaacttggctgtgagtctttcacagtgattgtagcactcatccaaaataatatctttcctacacacagtgtgatgctgaaaataatattttacttaatatacattaaaaataaacatgttataggaacaaatgtattctcataattacaacatggatacagcagtagtaaaaacaaatgtatcttactaggcaatatctaaatggttttaaaagaaaaatgtcagttttagcatagaatacatttggtcacatttcaaagactttttaccttttgttttatcctctaggacagcagtgaagttttcactgttaaggactaacacatgtaagcctcagaattttcatttatatttaggctctcctctcccctgtagtgaccattccattaatagctttactataaatacttcatcataagacagtttggcacattctccttgttttttacatgtggtttagctctttttggaaacatgatctcttttcttcagtgctacattcatcaaatttaaaggattaaatattttattcctggaataaaatgcttttgcagggggttggccatgcaaagagaattcatgcacatagccactgcaaaccacaatcaatttttcacttaagagaacccaaacattttgctctgacccaattatccaaagtgactgtcccaatgtactagattcactaggtagctgtgactacattttccttgggttacagaactgtggccttcagtgtccttggaatcctaagggaagaattcactctacacaagataaaattttgatcaaaattctgttttgttgaaatatttttaaattgttaatatacactaaaaaaagcaaagggaccacttgacatttcaaattaaatatgaagcaaatgccgagaagcacactgtcactgcaggtgtagaagttcggactgccctcaagccatcctactgcctttgcaggccaacttcgcagctttgagtttcctttcctagtcacaaggatgcagtgagaaatggaaccgatgtcttagaggtaagaaataaagaggtatagttgggtaacttttaatattttccatatttataatttcttaatttatgtatttgaaatatttatgtataattactttaggtaggagagtggaaagtaaactatactgaagctgaaggaatgacttaacatttgtgaaggagataattcctgatatttgttaaatgttaccgtttaacccccaaatctatttttcacatacaatcaaacttcaaaaagttctcctcagaaaggagaacaatgcaatgagtgtttgcaaagatcatttaaaagaataacaccaaaacacttggttttataatgtatatattttaagtaggacaggtttttttttttttaaacttttggatgttttataaatttgtccaatttagtcatccaactgacaaagcaaagcaaccccgcgcttgatccagtgccgagtaggttggtctgtttttaacaacattgcaatgacaaagttagtagaatgtcccgtagtggaaagagttcctttacgttcacttgtcttgtagaggggacagacataggcatccgactttataatccgagatttttgagcttgaaaaaaaaaaagaaatatattcacttgataaagggaaaaacagccattggtacgaaaagaactatttatcttgtaataaaatggccagaactaaatctaagatcataattgtgatatatgaaggttttacagcatatatatttttttacagtacatatagtattacggttgtgaaacaaggcaagtatttcttttcttttctttttttttttttttttggagactgagtctcactctgtcacctaggctggagtacagtggcacaatctcggctcactgcaacctctgcctcccaggttcaagcgattctcttgtctcagcctcctgagtaggtgggactacaggtgcctgccaccatgccttgctaatttttgtatttttagtagagacggggtttcactatgttggccaggctggtcttgaacccctgacctcgtgatctgcccgcctcagcctcccaaagtgctgggattacaggcgtgagccactgcgcccagcccaaggcaagtatttcgtatggtgcatgattctaggtgtggaagacaggaatagactttaaagttctgaccgcttagcaggcatgagaaaactcaagaggatttgggaggggagaatgagaagggagggaagaaggaataaaatacagtataggtagtgggggagactcaaaagaagaaatacaactgcttagagctctaatccaagaaa

SEQ ID NO: 315326 - DNA, 4001 bp, Homo sapiens
tgtgagatctgaagttcttaaatctgcatgtggccaggcggggtggctcatgcctgtaatcccagcactctgggaggccgaggcaggtggatcatttgaagccaggagttcgagaccagcctggccaacatggtgaaaccccgtctctattaaaaatacaaaaattagctgggcgtggtgactgcatgcctgtaatctcagctactcgtgagactgaggcaggagaatcgcttgaacccaggaggcagaggttgcagtgagctgtgattgcaccactgcactccagcctggttgacacagactctgtctcaaaaaaaaaaaaaaaaaatctgtgtgttttagccccctcagggacagggtagaaactgaagattaccacccaaagggaaataacatgaaataaattattaatttgtcttacgtgctactttgaaagaatttgctttgaagaaggtcattttgataccctctacagacatggctcttagctttttctcatccttgtttttattgccatatgatattagcttttcattccggtgtccatggtgttgtttccatgatttaggtggattgggatgaaagtattacctatctatataataagtagttacctaacagattttgtctccttggaaaaggtaataaatacaaattaagtgtagttagtaacatttttaaagataggaatagtatttttctggtttaagtcaagcttttaaccagaagagaagggtgttctaattctaaaacaaccaaataagaatacaattagtacttttgtaaaaagtcattctatgagaaggatacttacttaagataaaatgtatttctgaccagatcccctgtttttggagcacagctttcaactttgaacagatccgaacttgatcaacataatcaagcatcactcgaacaacctttccagagagatgttgcagccatgacaaagttattacttcacagaactgagggaaacaaaatcagaattaggaaagtaaatgaaaaacacaaagtatctatggtttagcatagtagtcaaaggagatgtggtgtgatgaaagccaagagagaaaaatgtctcaaaaatgggaagggatggtagtggtcaactgtacttatcctgattctttttttcatcagaaataagatcaaaataaatcatttaatcagttgcttcgtttatgaaacttcctcacactgctaggcagagttaaatcacttttacctctgtactgtttttgttcctgttgtatctttctactattgtgtttattttatcataattattttatcatataattattatactaggatctcttcaaccaagcctctggagagagtggatgtaatctatttattgccatagttccagggccacaaataatgactgtaagggaatacagccaatactgtggacttaccttagtatctttgataactgtagatgtccagccttcaacagtataggaaggatggactttgtctccatgtgggcaatcaaaacatcgctctgtgtcatacccatagttcagcagcatcctgagcatgacttcatctttcagagtgtattgcagtgctgatgggaaatgtaaagggttaactctgcagaagtaattgacattggccccatgccttagcagcagactgatcagctcatagttgcccatcctgagggctatctggaggcagttaaccgggtcttgattaggcagagctccagcactcagaagcagcttgactgaagagaggtcactgtttgatacagcaaaatacaaagctgacttcctgtggtcatcgtagtgtttgttaattctctgatccagcatgaagttcacatcaaatccagcctggatgaggagttccaggcactgaggatgtgctcctgctgctgcacagtgaactggactgatcccactctgcttaatggcagcaagatccgtaactggaatcagtatctttagagctctgagaaagaatttcaaaatgcatttcaacattgtttttaagatgtagcactaacttgtttattattgttttatagcaatactagatagtatcagtattcagggggcatttagaacccacaaccaaaaaaaaaagcataattccttcatccagaagctcagataccaagtaaaattgaatggaattaccgtctaagctataaaattcagaattagctcagaggcctgaggcttcccatattgtctaagtacctgagaaaaaagttttatatctcttcggtggcttcagaggatgcctggttaaacagccatttctagttcttcctagttggtcaagagtttttcttttttttttttttttttttttttttttgagacggagtttcctcttgttgcccaagctggagtgcagtggcgcaatcttggctcactgcaacctctgcctcctgggttcaagcaattctcctaagagtttctcatctttaaaaggtatgtttagggctgggggtggtggctcaagcctgtaatcccagcactttgggaggccgaggagggcggatcacgaggttaagagattgagaccatcctggccaacatggtgaaaccccatctctactaaaaatacaaaaattagctggtgtggtggtgcccacctgtagtcccagctactcaggaggctgaggcaggagaattgcttgaacccgggaggcggaggttgcggtcagccgagatcatgccactgcactccagcctggctgcaggagttcagtcagcgtggtgggaaatattattaaaattatagaaagaagcacaccttcttggaaggccgggaggttttgcaaaagcttcaggaaaggatttggctgaaggcagctgaattctctcagagtaggttacaaggaagtgtaagggaattgatctagataagttagtttacttaggcctcagaactggcctttaatcatccacatgtaggactgttctggcagcgggggttgggggggaaccgtgttaattactcacacgatgtgctgactcaaagcctttgtcattaaacctgtactaaataaatgcctgaagcaccagcttgtcagggccatggctgctacaactctttctttgagcagcctggtcccctagcccactctttcactggatacctatgtctaagtactttcatctgtcacttggccagggtctatggttcagacccagcacctggcgacagagggagacagcatctcaaaaaaaaaaaaaaaaaaaaaaagtatgtttagattgtgggatcagtgattaaagattataaagttcctagaagcagcacaaaataaaaggtagctattactgtttttattatttataataatgtaattgaacttaacagtaagtggcccctgtcagctgccacatggatgggcaggtggcctgaattcttagggatgttggcatcagctccatactccagcaagagagccacagcatctggatttcctccacttgcggcttcaagtaagatggaagaagaatcagaggcctgaccatgagcattagctcctaagaggagaaagactcttgttaatgcaaaaattattttccactgtatttcttgagcaatcttaaaaatatatccccatcaccaaaaagcaattagtgagcacgcactctagcaaagcaccaagaatcaaagtaacagaatatatacctcctgctctcaagtaacttataaactagttggggaagaaaaaaatggcagtttctaaattataagtaggttagtttttgaagtaatttgatgtccatttgtttggaacttgaaaattccagtagaaatactgttataaaagttgcttttatttctagaccagcctataaaagcccacttaactcataacacacatataggatggtactaacaaatctatcaaactataataccatgccatctaatgatactgttttggtggaaaagggcatttgttctgttttagcttgttcgtaggggaccatagtaggagacactgtaactgtttttaa

SEQ ID NO: 315327 - DNA, 4001 bp, Homo sapiens
tggttagcaagtgtcataatgtcccgatctgcttctgaaaagcactggacaaaacacacccgcagcttgatcaaaacctgtatgaatacttcccggatgagtaagggacatacgtacccactcccaccaacagaaagggaatgggccatctggatcttctctctagctctatcctttaaagttgtaagctttttatctgaaatgtcacatcctccatctaatacaacatatgggcatatattacaagcaaacagtgattcaaagaatttttgtacaacatctgcaaaagaatcatagtcccctccataccggagatccaagtttgaactgaagcaaagacggtggaaaagagcataaccatcaatgacaatttttgtgtcccgcaacttcaaatcagtgaagaactcattactatgatcttccacaaaactcattagtcctcggatacccatgatgacagtctaaagaattaatcgcctgtttaaaacaacagaaaacattttcaattgatgctagttatggggcaccaagtcattgcttccagcaccattaaatcaatagcaaatgttatgaagtgctctttagatagaacatagatatcaacatcataaattcttacctagatcctcaagcaatgttagctgtgctttttcattctcctttgctttctgatacaaggcacaaattcaatggtttcatgggttgtaatctttggatggtgacagaggctgctgctaattctaaagaaaaatcagttgaagtccattactgacacaccagtatagaagttctgtgaactttgattcttaagtggtaatagtcaacatcttacagcacagagtatttgttttgtggggtcaaagtaaaaagtcctaagctaaaaaaaagatatcatattcatctcataatcacaaagcatttgggcttcagtaaagtaaggtgtgtaggacctatgataaggatcaagtttttcttttgtattgacaatcagtcacggaacttctttcaggctttggatttgtgggcccttcttaattggcatagtttttggtataaggaaaactgcttcatgcctctaggaacccctctatccagttacacccctaaccacgagctcttttcatcatcttattttgcatatctggcccagctacgcttcctcacctggctaacttaactcgcaggatcagaattgatggtttttcttttgacacctcgggcttcaatatggcacagcacggtactgttactattacttaaaatcgtgacattttgtcagtcatggattttttttgctataattttgatttttagagattgcattaaaacttaccttgattactgaattttattggcatccatttacattttacacttatctcaccctagttccagccctgtcagtatctcagaaccttatcctgtatagtacttatttctttgcaagatagttttgtaaagcgtccataagcagagactgtgtcaaggcgtcctacgcaaattacaggaccttgcacagacagttgcatagagctgcataggggaaaggcgggcaaaaggtctgacctaagtcttcaaacacaggccttcatacaccgtgccacctcggccctcacaacccgccgcccggacctgcagcagagcccacctactctgtcctcccagaggagtagctcctccatcagaagcccgctagagcccagcgaggactggctcctgcacgtgagagtccaatctcaagagcgggaatcggaagtctcccggtgtgacgtctctgggaagtacagttccgtgatgccggtggcgccagactgagccaaggagcaggtgttctcgggcccagaggcgctaagtagctaaagagggctgggacgtacgttccgaaatggctgctgtcaggctaggaaagcttggcccgccggtcctcctctgctttctccgcctacttgggtcggcgaacacttccgccttggtgccgcctcgccccgacttcccagtatgccccgcgccgtctccctggccacggttccaaacagccgtggcccgcggtgtctggcgctcggtgggtgtggttgcccctagtttgaggcctgcccgattacccgcaagacttgggcagccccgggcgccgctccgaccacgacagggaaaggtaaagcgaactgtcctccttggggctagccaggctcccctgcgagggggaaggtaatggtttcaagctgcccgggctgggttccgaatctctaggacgccatggctgcgatctcctcgctttcctggacatcttacctccggatgtactccagtctcagtgcccctcaataaacgttaacctgctttgccaaaatgtaaatgtttaaaaaggtgaagaagcaaggaattgttcgttttaccttaaggttaagatttactttaaaggtagatttgtgctgtagcagaaactggtgacaaattgccttcctcttattacctgggaagataactactggttttcaacttgtgataaatactccttccgttgtcttttgcccccagccagatctgtttcaccgagaacgggtagtttgcacaaggtagtaactttctccaagttcccatctagctttcttaactaaccttttttctctcctttgggcggcagttgatctgctggacacttacttgccttaacaaggtttgttaaacacctagtatatgccaggaggtatgccagggattggggatgcagaaataaagaagatgtgttcgcagtgcccaagttcactcaaacctcgagggggagcgtgttgtcaagtgaacagatagttctagaatctagacaatgcgacacattcttgggtaggtttatggttgcgcagaggagactaatggaatggatgacctaaaagtggactgggatgggggtggcagggctgagtctgtgagggtgggcgggagggaacctagtcccagagtcttctgcagcctggaccagactacttaagcactgctgggtttagactgtcctttaaaataagagccgctagaagtgaacttctcattctgtccgtccctaattctgtccttctctaaaaggaaccttaatctcatctttaaaataaggagaattactgagtgacctgaaggacccttttcagctggaaagtctgtaagtccatatatttatttgaacagcttagtatggccagacggcatcacttttatgacagtgaaggggaagtaaaaacaaaaggtatatttagaggcctgctctgtagttgtttttccagcagattttactaacgtgtctttggaagggaaaagaaaaagctggtaactaatctcactggtattaggtacaacttaactgattcatacattttaagaaggaaaatgttgtaaatgggcatttacttatgttctgttttgaggatttttgtggttaattgccctagtagtttttgtggttgacggacaccaccacgtaaagcccattgaccatccttaaaaactaggtttttgtctcatagctttggaattgttgaatatgaaaacctaacttcaaggtgtaggcagttttcaatttaaaatgttatttctatatagatttaaaacaaaagcacacttttcttgataactaacaaaacatttaacattctgatgaaataaaagtgattttactttgtacctactcatatgaaacagtcctgcctttcttttttttgtttttgtttttgtttttgtttttgttgagatggagtcttactctgtcgcccaggctggagtgcagtggcgagatctcactgcaagctccgcctcctgggttcacgctattctcctgcctcagcctcccgagtagctgggactgcaggcgcccgctacaatgcccggctaatttttttgtattagacggggtttcaccgtgttagccaggatggtctcgatctcctgacctcgtgatccgcccgccttggcctcccaaagtgctggtactacaggcgtgagccactgcgcccggccta

SEQ ID NO: 315328 - DNA, 4001 bp, Homo sapiens
ttctctctgtaaacaacagtttgcacaggagtatcaaggagacggtcattcattctttcctttttactaaagacatataccatacatactgacatgccaacagttccttttcagtttggtgagcaagtatgatggactcctgaaaacataattctacatcatacattttatatttcatttgggcagtctcttgctcctctctcccggaaactaaaaagttgtacaatggtgtattattaaaatactgtatacctaggtagatatgatattctgaaaagttaacataattatgtaaaagcatttgattcaaatgtgaaaattattttccaatcttagtttgactgaataatcttaaaatgactttcacagtaaacaaatgtaagcaaagcaacagttgaaattctcatttataatcgctggtttatttcttacttggccaataagttattcttttaaaaggagctttacaaaaacgtattttaaaaagtatagacctagtacttccctttgtcatggaaagggagcaaagcaaaactctccactattcttagcatattaaggtatttcacccccacactgagattggtacattctaactgaaagcttaaaaacaactagaaaaaaaaaacaaaaactaagcaagaacttcccattaatttactattcttgctcacttttcagaaagcaaaaatgaagttacaacaaaacactccaaaagagttataaaagaaaagcttgaaggcagttgtagaaatttacctttaaaaaaaaaatcagtcactactgtaacagctaatgtgtcacaattttttactttaaaaatgctgtactgttgccaatatatttttaaaaattatacagccaggaaggtcaaaccgtgccttgttatcactaataaccagctacggctatctgaaaagcttgggaaaaaggttttgctcgttagatgggttcaaggttactgaatgagataatgttgccaatttcacctccttcctctgaaatctaaacgagttgggatcgcagtcacaacttccccactacagcggactttcatgaaacttaaaggaaaagtgacctcacctcaggtctcttttgacctctgtgtgtcaaacactaaattcattttttaaagagaagcaaaatccttgcttaaaaaggctaaaagacttccagtgtttggatttaacgttcttcaatctactcagcctccgaacacccttccaacccgacgtacccgaccgcgcagagttatgacgggagaaggcaggaacacgcagagcgtcgctccaagtttacccctgaggagtcagaaagccctaacgaacagccggttaagactacgggtgggggctgcacacttccctgtgtctcgagccctactgccttcctacaccttgccccgccggagaaagcggggactcctgcggcgcctggtccctgaaaagtcgagcatgtgcctgacagctcccggcaaccctggcctggcttaccttgaggaccggggtcaggtactcagccacttccagtgcctttcccttcacagtattaatcacattctgcatcctggggccggagtagcggccggccccgcgacgggatggaaagtgcagccgtgtcaggggccagggagtcagaaaatgtcctcgctgccaccgactcgcatcagcacccggctggcagcacccgaggggacgggacgcgacgcgacgggacgggcgggacgagggggcggggcggcaggcacagcgcgcgaagacggggtgcgcgatcctcgcaccccaggcagcccgcgacggaccggacccagctgtcacccagccgcgagggagggcagcggggccgaagggagacctgaggtgagaagcggacgcacacgcacccctcgccctctgcgagctgtctgtcctcgctttgcttcactcgcgccccttccggcttcccttccttctcactctcttgccgtagctgcgccgccaccggggcctcacgtgacactagactctcccggcacgtgacgtgagaaaggggccgggctggggcgggataagccgcttctcccctccttccggaagcgtaacactgaacgtgcctgcgcaatgggtgtcgggtccgctttttcccaatccggacgtaatcgtggtttttgttctgcaataggcggcttagagggaggggctttttcgcctatacctactgtagcttctccacgtatggaccctaaaggctactgctgctactacggggctagacagttactgtctcagctctaggatgtgcgttcttccactagaagctcttctgagggaggtaaccgcgccccgcgggcaaggaattgcgcctgcgtctgaggggagggtgcgccagtgaagagccctactgcgcatgtgtgactagaagggtagtccctgactgtgaagggaaatctggccccctcctgtcggggaggcgtcctgtaggcgtgcgcccaatggggctgtcagtattggcatttctccccactccccgcaggctctatgcgctattcctacagtacgctgggaggctttgggcaagttacttacccaacctggggtttagtgtcctcagcctatcaaaagagggccttagattcattgatttctacgatctcctccatttcaaacactaactagttcagtaaaactttacagcagtgtttcagatatttccattttggtcgttattgtaatgaagtctgtcctaataagctttttcctccgagggaaaagaggaggaaaatacaattctgaaagccttatcttacagcaaaattatttactaataagagtaaaagcgaggccgggcgcggtggctcacgcctgtaatcccagcactttgggaggcagaggcgggcggatcacagtcaggagttcgagaccagcctggccaacatagtgaaaccccgtctctactaaaaatacaaaaattagccgggcgtggtggcgggcgcttgtagtcccagctattctggaggctgacgcaggagaatcgcttgagtccggtaggtaggggttgcagtgagccaagaccgcgccgttgcactccagcctgggtgacagagcgagactccgtctcaaaatacataaataaataaaatttaaaaataaaattcaaaattgctttgaagaattcttttctgctgttgcaaagtgtcatttgctcacctgctacctttgtcagcaggtctaatctggttctacgttttctgtctccagagtactccctcttatcagattttcactttccttttgtcatagtttctttatgcctcaactttcttggtgctgatatagtcatagccaaaattttttaaaaattccttttttgtcctcacgatcaatggtatttgcgtttagggtctgccaacaaggtcgttcatgaaagtgtttttctctttaaggtaattaaaaaacagtggaatggaaaaacagtgctgtagtcatcctgtaatatgctccttgtcaacaatgtatacattcctgctaggtgccatattcattgctttaagctcaagtcgcatcttactagtgaagtattctgccaatgaaggtaagttaagacttggtatatgcatggagcacttccatctaatcacacatctctctcttgcctttggttctgttatatataacatggaaataataatgccttttgcttcatgtgagtgataaagcatatttaaatttgattatttaaccttgcattcctcaacaagaaaaaatgtttgataatggatgaaatgtgagtcaatcagatacaaaaatcaaaccctttggtgaagaaccagtcgtaacatttgactgttaattcaatcaacaggtgtttctggacctatagcaaaatgtgtaattgcgccttattttgaagtagaaggatatatttgtttggtcacttggcatttgtgaggtacttactattgtaattattgtatcaatggtaaggtgtcagcattatattgtgcggtcatattgtatcaacag

SEQ ID NO: 315329 - DNA, 4001 bp, Homo sapiens
cttggcttaaaaaaaaagtaaactctttgaggacagggatgtgtatcttactcatttttgtattcccagcttgcagcgcagtgccagacacacagctgaagctcaataaatgtttattctctataatgagatgctggctgggaacgaaaaacggaacctgtggttgagtaatggaaagtccagtactcagctcttaaaggatttcaaaatcatgtcacatgagggcaggaaggagttggccaagataaatggaagaggaaggggagatgttcgaagcagcagaagcaaagggctataggtgacacacacctgcaagcagcttaacaagactggagcagcgttgggggatgggaaagcagtttagcaacatgagccattccaagactggacttttctttattcaagtgttaggtcacttcctcagggaagccatccctgactagctagcttttatgcttccccccaattactgtccatcccatgaccctgtacgtttcagaatcggaaacacctaccaacccttactgacaatgccgccaccgccaccaccaccactattattagaaggtgccatgaaacagggttctttttcttcttattttactgatagatcaccagtgcccacaataatgccaggcacataacaggcaaatatttgttttattcattcatccaacaaatatttattgagcatatataatatgctaggcattgctctatatgctggggatataacaaaacatgacaaaatttgctgtcactgttaagtttactatgagcaaatacattaaatatgcttagcctagagaagaaaaggtgagaagaggaagacaaactagcagctttcaatgatgtatagggcaattaaatgcaggggtgattccaagagcctgaaggaggaacagtgagctaagattaccgagtagctgctttcagctcaacctaagagtcagaactgggggaggaccaaacaggagcaaccagaagtagaaagctttctgtcactgaagaaatctggccagtgggcagaggtgtcagagaaaaaaatctaagtagtcaatgaaaaagggagtctgggatccagaggtcccaaactgacagccacagatatgactggttacagttgaacagggttttgtaaaaactgagttgccaatgtttttaaacgccagaattacttgccaatttttaaaaaatggcatcagtcgccagtgtttaaaaatcaggaaactgcacgcacgtgcacacacacacggtttggcttgtacttctccaacatcatgtacgttagtactgtacttataaaattagaagtttgactctatttctgacaaatgttctaacacctatatttaccttaccggattgattcttattgtgcattagtttctaaccctgtaaccaaggaatcgagaatcttctttctcagaaagtaaacttatttaacctcctcacttaaacaaatggcggattatcattcccattttgcagatggaaaagcagcttagatggggaaggaacgtgccagagacagcaaatccagacacagccaggctgggaatccaaatgtcccatctcccgtgttccaacactgaagattctgagcactgcctaccaagaggacaggaggggctgacttaggaaatcagcacgagcttccaagtcagaagaccccggactgaaccagtctgaggggacgcggctacagacgaagggcgccagccggaatcagtgagtccctggaggaggaaggaccacccagaaactggcagaggaggatcctgagacttgctgtgaccctcgccctccctggcgagctcgccccttgactccaggcctccaaaaccggcccagcaagaccccactacaccctcgcccgccgcggctcacttaccgccgctcaacttccggcaaccacagctctctctgaggcgcgcgccccgatgacgcaacgcggtcctgcccgcgcttgccactgggaagcggcgcgcgtgcgcaaaggagcagaggcatgccggggaaatgcgcccctagcaccgagctaagtgggaggaacttgagtcgtgaggagggcggggcatcagggggcggtgacgcccccgggggaagcgatggagagcgtctcccttaccagatgtcggaatgtctacattcccttcaggcttttaagaaagtgcccacgttctctcttttgatttcagaggatgacaggaatgatcaccatggtcattctccaggagaggcggcatcaaacgcagcacaggggccatcagggtggcaggtgtggagagccaggagatgagaattttagtaggaaaaggccagtgaacgtcgacagtgaccaacctgccttttctaaaccagccatcattctcacagctcctcactgtcagtgagataaagttattccctctcaatacttggttagatactctgcgcgtgcaaagcactggacaggtgttgaagatacagcagtgattatgacaagtttctctgtctggcctgtaaggcctttcacaaattaactctgatataccactctagactcataacaacaagagcgatgactgctattaattaactagccaccatgttttcagggttttacatctctaatcctcacaagagtcctgaaacatatccccaagttatatatgaaagaacagaatctaagaaaagttaggtggcttgctgaaagttaaagggcttttgggccaggaacgtaatctgaagtttgtttgattctggcaaataagaaaacaaatccagactaataaggatacttattagaaaggattactgcaggcccggcgcggtggctcacgcctgtaatcacagcactttgggaggccgaggcgggcggatcacgaggtcaggagatcgagaccatcccggctaaaacggtgaaaccccgtctctactaaaaatacaaaaaaattagccgggcgtggtggcgggcgcctgtagtcccagctacttgggaggctgaggcaggagaatggcgtgaacccgggaggcggagcttgcagtgagccgagatcccaccactgcactccagcctgggcgacagagcgagactccgtctcaaaaaaaaaaaaaaagaaaggattactgcaagaagtgagagaggtgggagagaaggaaccgtgcaatagcagagggagactattgcaatagtgagatcactctgaccaaaacatccgcagatgtttcaatggttagggaaaaagagggttcccccaccccccaccctccccaaaggcaggtaaacaaggctggaaacaaccgaatatgggaagtgggatgaaggggtggcttgatcagatagtagattagagaatgttttatcttgaggccaacctattctcagtaggggttgtgtgtgtcagtctctgagcccaagctaagccatcatatccccagtgacctgcacgtatacatccagatggcttgcagcaactgaagatccgcagaagtgaaaatagccttaactgatgacattccaccattgtgatttgtttctgccccaccctaactgatcaatgtactttgtaatctcccccacccttaagaaggttcttttatagtctcccccacccttaagaagtttctttgtaattctcaccacccttgagaatgtactttgtgagatccaccccctacccccaaaacattgcttttaactccaccgcctatcccaaaacctataagaaccaatgataatcccaccaccctttgctgactctctttttggactcagcccacctgcacccaggtgaaataaacagccttgttgctcacacaaagcctgtttggtagtctcttcacacggacacatgagacagtatgctagttcaagctgagagtaggttaaagtaaggagcctggggaaaggaaagaagcttaacccaagtttggttaataagcattttttccaactggtcaatggagacaagcagctctgtaatcatttatgaggcaaagaatgggaattcagaagg

SEQ ID NO: 315330 - DNA, 4001 bp, Homo sapiens
tttagctgggttcatttgaagccattttaaaaaacattaccaggttttctgtcttgaagatgagcatggttatacaaccaggattttattctggctaaaaaatacctaacagtgagaaaggatgtctcaatacatttttaaaaaagcttcaagagaaccactttaaaatgatcttcctaccacacaaaaacaccatcaggtaaatcagccctctatacaagaagatttggcaaatcaaaagcataagatcaaatctgtaataattaactttctgagtaaaattactgtgctacagcttactgcaacaaagccaaagtattacaagatggtattataatgacatcattagcttggtttcctaataaagcatatatctgggatatctgaatttacaatgctaaaaacagagacccaacatttgtaggagggagtggtaggcagttcttatttataatttttttttttttttgagaatgatgcccgctgcaaaacgaagtaacagaaggctggctctgaaacaccacacttcttggtcttaacgttaaaatgcttttctagagcagaagggaaaaagagttatcagtgctttcgtcccacaaaaatagttcctgtttcactaaattttaccactgcctttagaattagtaaatgaaaacgccaacttgtagaagcattaagttaatgcgatttagaaattaaatagtaaccggcctcatcacacagataaggttaggcttcttcagccaggggcaatttctgtcctaattgtcacagctgccttaatgctgtactttctgcgctgtagctgccaggaggcagataagatttttctctctgaattaattctgggaaaggtggcactttttataggccttaaatgacccttttctaagattttttgttggtggtgtccagatgttccaataatactggagagttaactattccttccaaacctgtgtcgttcaaactgccttgaggagaacgggaaaaaagtaaggttcacactcgaaaagtttcactcggggtggggtgaggacgaggtaggaaggaaacgacagtacgtatcgttcgtaactatcgtacaatacgtatcgtttccgaagctagaccggcagctggcacagtctttcccctttccaggtcctggggagaaacgtctctcgctgagggggctagacacctacgacagcctcctcctcgggaatcaacacagctctggatcgtgacacgcttccagaagtccgtgacgagtgggggcagaagacaggttcttcgcttccccttcacccaaacacgtcccaaattgttcgaggcaggaagagcacgcctctctcatctccccaagacctactctcgctcagctccctcgccctgtttcctctgggggcaccgccaccccgctcgggactcccgcctctggccacagcagccccggagcggcaagggggaagaagtaacggagaagcgccggctagaagcggccgcctccggccgctcggcgccagcctcggcggcccgggcttggaggcgagacgagcccgggagccgcacggggcttctccggctctgggccccgcgcccgtctccgctgcggcctagccgggcgcccacgccctggcctcccggctccgcgccgccggcctttccccgccaccccgggccgagaggccccgcgggggcggacgaatggaggtggaggggcgggggcacctaccagctgctgccggatccagcgccacattcccccgtcgtcgccgtccgggtcccgcggggcgcgggggccgcggggctgcaggtggaggccgacaagacagaggcgggagcgggcgagcccctcgggccgaagttccgcttaccgccgccgccgccactgcctcactccccgcgccgcgtccccatcccgcggcgtcggccccgagtcctacaggcgcggccccggcgccgcccccgcccggcgcagctgagcctgccgccgcgccgcagccaccttcattattgaccgttgtcacccaaagcacccccgcaaccccacccccgccccgccccgcccggccccccggctccacccgggaccgcccccggcgccccggcccgcccccggacgtgacgaaagggggtgcgcggaccgaggggggcctggcgcgccccgccgccgttccgagttggggggtttctgtgttgtgggtccgggaagaagcgagcgtggaaaggtgccgggttctcgaacgctgtttctgtccactgccaccctcctccccgttctgggagtgggattaagtcgtgtctgtgggtctggccatctccggagtctgcagcttggggccgattcctcggtctctacctcctgttgcaggtctttttcgggctctgtggcttctttggttcacgcgtctcccgacacgcatacgcacagtcctgaacgtatgtgactgaaagttaatccccccagaagtcccagtttgggttccatcaagctgtaagagctttcgtctcaacacaagtcaggcctcttctttagcaaatggctgagacggggctagggaaatcttgatcacacccattaagtgattcgaaagcgttgcaagtcccctgagcctggtacagcctggacccgtgtttctaggcgaatggatgagatattctgtcttgccgtgtgctaaattggacaggttcaggggaagataatttgtataaaaaggtagttctttactgctaactgccaaacttctgcaatcaaaaacacccgtagcagtaacttgacctaggttaaaaaagtgtgtggatgacaagctcagaaggaatatacaagcaactggaacaaggctttgacttaaaggtttggcgttgtttaaaagcagccccgtatacatattgtgttatgtatatgtattgaatgctgtatttttgctgaattaaagcacacttcaccgacagacgtttgtggttaaaaaaaaaaaaattaagcggccgggcgcggtggctcacgcctgtaatcccatgtaatcccagcactttgggaggccgaggcgggtggatcacgaggtcaggagatcgagaccttcctggctaacatggcgaaaccccatctctactaaaaaatacaaaacattagccgagcgtggtggcggtcgcctgtagtcccagctactcgggaggctgaggcaggagaatgacgtgaacccgggaggcagagcttgcagtgagccgagatggcgccactgcactccagcctgggcggcagaaggagactccgtctcaaaaaaaaaaaaaaaaaaaaaaaattaagcaagaacaaatctaaatgagattagcatgactaggcaggtcgttgaatatgcatcctcaatcttctagtttcagtagacatttcttactatataatgcttatccagcaccacaaatagaatctttctttggggatatttatgatctgtaaaaccaacatggaattttatattataaatcatccaacttcaaaaaatagctagatatttgaaaagtcatcttacttttattcttgtggctaaaccttactttatgaccctaaaaggaagttttgagatatatttagtgacaaaaccttactgccattcatggagcactgtgtccattcatggagcacccaggtcctgtatcaagttctttacttgtatgctgtaatttaactccaatcaatcccttgaagtaggtattattcccgttttgtatagatgcagaaatggaggctcacactaatttggcaaagctaggattcagattctggattgtcaggcaatagtgctcatgttcttaagctacgtccaaaaataaaaatatggccatgcctacttttattcatctgcaaatggtttgattacaaattaggcctggaaatttttatttatatgccgctaaaatttttcaagataacataagaaatagcgatctggagaatactttgtgtatcattatttaattgtgccccaaatttcaaaaggaagaagttgggagaaggaagg

SEQ ID NO: 315331 - DNA, 4001 bp, Homo sapiens
ttcagagaaaaaaatcaatgaaataaaaaaacagaaagaggaaacgtcactgaaaccaaaaaggctggttctttgaaatccataaaattgttaactgctacctcgactcatcaaaatgaaagaaaacggggaggagagatgcaaattaccagtatcagtaataagcagatataccacaaaagattctgcaagtatcagaagactaatcaaggaacttaataagcaacttgacactgatacaccaacttttttgtaggtttaaagttacttcaaaattaaaattttttaaattaaaaaacccatctttattgaccaggggatggccatgagtttgataactgctaaagcaaagttaaaagctgagtgaatggatacatgagagtccattatactagtctttctactttttaatgtgtagaaattgttgataatagaaaaggttttcagaaaattaaaaattaaacagctgggtgcagtggtgcatgcctatagtctcagctactcaggaggctgaaatgagagaaccacttgagcccaaaagtttgagtccagcctgggcagaacagtgagactccatcactaaaaaaataaaaataaaaaatttaaaaattaattcccacccatctgaagcttttagacagaagaaaactttcagaagacatttatttctggcacagagggccacgaatattaaggactctgcctctggggcactgactcaaaagtccactgactcaatctactatgtgccaggtattatccataaactcaattcaccaaacttctgttggtttttgaatcttactcttcttcacccttgtctttcatcaatttcccacaaacctacagacttcccactcctgtaaatccaaatttttcaatgtagaatgtatgtataaatagatgaataagcatgttttataactttagaaaggaactgccgttaaaatccaatgttttcattaagcccatgtacttttaactatttaaaactttttctccatctatagaaggagttcattcaccttagttcagcataataatatttttcacttcatcttctacagttagaccacataaagaactcttccaattaattatttttaaatgagcttattataggcagttcactgcctatagcaatctattttcatacttttcaaaatacaattttttaaccatattacaccattactctttttatgagtgtaatttctctaaaacgtagttgttttttaaagcaaattaagtcttagcaaattttaccaaagtgctaaaaataaacaattcaaataaaaagttgctctaaaaacctccaattaattattcactttgaatatattatacacctcaaaggaaattacccaagaattcacttttcacataaacttttagtcaactccaatgcgacaactccaacagctcttacatttagaacatatgtatgttaaaaacatatttaaattttaaatgtacataagtaaaagccctgattatttcaatgactgagaggataaaaaaccacataaacatatttaaaatacactgcttatcaagataaaaatacatattaaatacaattctactatatatctaatcagacatttgaagcattaataccaaattgataaacccattacttacagaaatataacttttctggactgctggagcacacgttttttaaccaagtcaaattcgatatcagagaaaacaaattgaagaaatttttcttaccagtagcactatatcatcattcttcccaattcctgatatttgcacagctttcaaaagctggcttttaataataaaaataaaactaagcataaaaatttggaattttatgccaaatatttctgtttcggttctgtctgaactgctttcaaaatgattaaggtattaaaatttagaattttgtaattcaccaatttttagtaagttttcagaagatgtgcccttctgccatctgtcactcgtagagctcctattatttgaataaatcctagctagttagctcaccgaagttccaattccacagtgcatgcctgagtcttgatgttatctaaatagcaaggagcttataggctattgtgcttaaccaaacccttccttgaatttataataaacttgatttgctgtgtgagtttaaaaaaaaaaaaaaaaaaacagtatgggacaaagtgaagctactgggaaaaaaaatctcactacattaaatatgccaatttttgaaagtttacttattttttcacattatgtaattactacaaacaattaaagtatactatttatcctataccatgctaaaagttagtcagatttcattccttaaaacaagatcagttgttttcagacacagaaatctccaaacctcaaagacatctttgcttcaaacctgagtttctcaagagttgtaacaatattataatagtgagtgtggagagtgttgaatttttttaaggatagtctatgtacgtgcctacaattccaaagtaggtaatttcacgaagtgatttaaataacgacctgtaatcaagtaaaagttcaggcaaagcaattttgaataatacatttttaatttaattttttccttcagtcagtatttgccatcttcagcagtactgaagtaaaaaactaaaattaaaaatgcattattcaccgaggcgggtggaatgcctgaggtcaggagtttgagaccagcgtggtcagcatggtgaaaccccatctctactaaaaatacaaaaatgagccaggcaaggtagcatgcgcctgtaatcctggctacttaggaggctgaggcaggagaatcgtttgaacctggaggtggaggttgcagtaagccaagactgcgccactgcactccagccagcatgacagagcaagactccatcacacacacacaccaaaaaaaaaaaagcgcatcattcaaaattcacagctgggtgcagtggctcacgcctataatcccagcactttgagaggccaaggcaggaggatcacatgaggccaggagtttgagaccagtccagccaacatagtgaaaccccatctctactaaaaatacaaaaattaggcaggtgtggtggtgcatatctgtaatcctagttactagggagaggctgaggcaggagaattgcttgaacccaggaggcggagggttgcaatgagcagagatcacaccactgcactccggcctgggaacagagtgagactctgtctcaaaaaagaaaaaaaaactcacaaaaataaataagtataaaagaaattccagtaactgaatttctcaatggtgtttaagtttataacatatataattctggagttttaaaaattaaaacttcactgagatttctgtgacaccttgtattgttgaatgagagaaggaattatcccgctttgttttgcagtcctagattttttttctgagaattacacatacctaccaatgttaaataaatatttgataaacccatctttaaagaccacacaagccaagagtgctttaatgatcttgaaatataaacagcacagctagcattctaaatattattttattctcaaacttgtaaaatttacagtaactgagaagataaccttgtccagttcaaaatcagttctactttttgctgttgaaataaaatatgccccaatacgtttaaagccttaactttagtcattgaacaatttcaattttaatacctatacaaatatatacaaaaagaatttttaaaaaatcagaatcatccaactgtaataaccaaattgtgacaattctttatgagggcaaaacttaaaacttcaagtcagctcctaaaaataagaatgacataatataatttaatgaatacatggaaattttacaaggataccagctaaattttaacaaagctctactcaatacccactttatcacttcccatcttggactttctcttataatatgcttttgtttctgtgtttaggcttaaggaagaccattgtatccaatatacaccaaacca

SEQ ID NO: 315332 - DNA, 4001 bp, Homo sapiens
aaaatcactacaaaatatgtagactatatatatagcttgataatttttaaagtttactgctctgggcaagggatggaggagtgagttaaaaaggaacacagtgtcagacacagcaacaggcaggtggccaggtttctgtaggcagaagaggatggagagctcaggagtgcatactaattgctgcacctctgctgagactactggccaaatggctgcctaccagaaaacacagtgtccctttccatattaaagggcctctcctaactgggctttcagctgcatacaaaactacgtggagttctccatgcatctgatggtgccattatgaagatgaactgttaactaaattgctttggtggaatatgtatgctagggaagaggtaacagtttccctacaaccatgaatgtcttctggaaaataaatgattcttattgagacttgaaagacaaattgtctgagagcagaaaggggtttactggaaaagagtgagtgtatttctaaatgagagagaaaaaaaatgtttcagaggaaggagcccctgccttctggtgaagagtattcaagatgaagataaacttttcaacttaatatcgagagtaatgagatattcacttcctaaagaaaactctttaaagaaacaaagatgatatccaatgtgggctagcaagccatttctggtgacatttgtggaggggctgaaggcaattcatttggcagtcaaatctgaatgaagtaaaggatatggttaagaaaggcacctgaattaatgtacattttacttctttataattttttcagctttgatagcagaagggatctactcttgaaagtccaaaaaatgttgttgctataggaacaggtaagcagattagacttgaaagaccagtttaggaacaaagaatgtaatagtcagggctaaagcaattaaccaagaaaacattttaagtaaatatctttcaggtttgttatttacatattaattccaggaagattaaatgctattatggaatgagagcgtcacattttaacattttaattacatcattactggcataaaagactatgcttacacaattagcagaaagatcttattaaacagaagtacatatttctaactctctcttgattatattgtaattgagaaatacagttttaaattcatcctgagcatgaaagtcatctttgattttcctatagttctcaagatagaagcacatctaaaatcaaagagatactgaactaccgaaagttttctgtaaccaatctctataatgaggaagccacaaaagtaaaattctagaagaaaacagaaatgtgtgtaggctgataattgttaatattgcatgtcttccctgtccaacagactcggtgaacaagacatttgagaagagaaggtcaaagacccagctgcacttctgcttcactgctgaacttctgcttcttcctatcagggaatacactgctcctcacattagggatttcctaaaattgttaggtgttttgaacagaactggctataccaatgaggctcaaacaagaatcataaagtgcatggtgcttctctccctctctgttttctttaaaaagaaaacattcttgacaagatgaatacaatattttcattctagcaaatttctgctgtcagaggttatatttacaggatagagagatttctcaaacatgaccttttctcgtgtaataccagagtgaaattttagaaaagtctgtgtgtgtgtgatgcgtgcgtgtgtgtgtgtgtgtgtgtgtgtgtgtgtgtgtctcgcaggctgagaagtgggatgggaagaagggaatgtggctagaatcttaccatctcattctcttctccttcattgagcagagcgtgctggcccttctcaaagtgtcccatgaaaaagttattccacacctcctccctgaccttgtcgtgcagacgcttccaggatgaactccaactcgccgagccaccgcagctcctcagctgactaaaagagttaatgatcctccaggttaaaactcctccttgagcacacaccttctctcaacaaatgacaatacttggcaaactgaactcctcccacgagtcgccctctgctaggaggaattgctggctgctccctgcttattgcattctctcagagcagctgtctcaaaggaggctgctcccatgccgatctttttgtgcccaacttacagggaaagaactcattgcctgcccagtgcctgccagcctcagacttctgactgcaaatccaacaggacaatacagagttggcaggacccttctcaggagtgaggagcgggtgcaagaactcccaggtcactgctttattcagaggacctaaggaattgggttgagcggaagcgcacagagctgcagattttctttgatgaatgaaagcttcaatccacaggtttctaatagtactctcattcattttgcttacaaaaggtacagattatcactaatcctcttcaaaaggtatttgtaatcacatttccttgtatatgcaaaaaaaattctatttaaagtgtatgtgaaattaagtttacttttttgaaacacatgtagaaaaagaacaaaggtatcatcaaactagtctatgtagtctcctttcactaaaatattgatggttcaacacttaaggaagtctagaaataaaatattcaaatgactatatggccagactcttttttaatttgtttacacatttattcaataaacagtgcctgagcacagggactacctaaaaaagttaagtcatatttgctaccctcgtgttgatgtaaggattcaaacatccaaacaaatatgatagaaagtggattgttattataagagatggaacagaagtctaagaaaactgtcagaagtcccaatgtggtgtagagaaacacacccctaccctagctctggcaaaatacctgtattccagctgcttgtctgcactggccttgctgtgtgatcatttaactataggaaccggctcttctcatctggtaccgcccgacaggacttttgagagaatggaatgagatcattgtgaaagtacattgtacagcactgatcaagtgctgttaggattattaaactaaatgtgcatttgaacagtaggtgttaggacatagtggctaagggcatatacactaaatttggaaggcctgagttcaaatttggactgtactaggtggtcgttgtgctaccttgggatataacaagttatacaaactccattctcctctatttcctcacatgtaacataaagatgatgataatagaacctacgtcctaaaacagacttttaagaaagagtgcctgggaaataataggtgttccacaaaagatagttatttttaccttcaccatgtccactgtctgtccctcaagctacattggcaatgatatctccaacctgacccaaataaccctaatgtgaccaagatcaatgtgtgcatgtgtgtgtgtgtatatgttgtatgtgtaaaaccttgagcaaatagtgaagtataggataaacataaaaagtaagctaagtaaacccattgtaatagtaattacaaaatatatatgtacgtgtgtgtgtatgtgtgtgtgtgtgtgtatatatatatgtagttctcttggtttcaaaaatttgctagcacaatttaaccaaataaatgaaaataaaattaacattttatcacaaggtcaaaatataaggagtaaagggtttatggggggggtaataaaaatgttctagaactactgatggcttcaaaaatttgtgaacatactaaacctcactgaactctatactttaaaagggtgaattttatgaaatgtgaattatatctcaatgaagagatataacaaatttaaaaatcatacctcaataaaaaattatacctcaaaaaaacctaactgaacatttaacagccttactaggcagtaattatatatttagtacagaaaaaaatataaaacaagcatattccaaatttcatctcaactgatgga

SEQ ID NO: 315333 - DNA, 4001 bp, Homo sapiens
gtgttgttccccatccggcttccttctaaaaggctagcaattgcaagatcagttcagcaattgcctggagctaagtcacagcttccacagttcggtcaccccagctccctcaggcctagcggagtctgtggattacctgatcaaccagaataggatttgcatctgtgctctacgccccagaattctgaaaaagaaatctagagccatctccccttccccacaatgagttaagcttacttggattcctaatagacatttctggtgagtgtctgtaaaagggtttgatcacctgcaaaaatgaagaaaactggggcacctggctcattatttaatcctatgataccaatgtcctgtttgtgagtgagagaattaaagtatcaggctataaactttacaaataaagcaactagttagagaagaataaagagcaatgtaatttttcatgcactcttatctacatgttgaaaacatcagagctaacagaattgttcagcagtgaacacaggtgaatagattttcattctttaaaagctttaattctgaagattttaaagtgctgtgctattgtcaagcttagcgtgctacaataatgcaagccacaaatatgagctgccttcttaatattaacgttcctagcagccacattaaagatgtaaagagaagcaggtgaaatttttacctaagctatctaaaatattgtcatttcaatgtgtaaacaatataaaaattattaataagatgttttacttttttttactaaattcttcaaaatctggtgcgtattttacacataaagcatattttgtgtggactagctacttttctagtgctcagaaactacacgtggcccatggctgccttattgaacaacatagatgtagatgaaatcatatgttttccttagagtagcaaacagggataggtggagggagagccggtatggatttgccccagatctcacagggaaccaggatgccagccaggaaactgacatcattctaatctacaaaccatgttctccaagttctttggggcccccaaatgtgccctcactctgacccttcccctgtctgtctctgtctcctttcttcattgtctagctggagccactgttgtatggtgaacagcacaggatgtggagaaggagtcggctggattcccagcctgtcccttgcaggctaatgaccttgggcaagttatttaacctccctggtctcagatttcttttcaattaaataggattagttctttcatcactgaggtctgaggattatataaaatcataaatataaacacctcagcaccaaataaacactatagttttcaactttttaattattatttttaaatgtgtgtgtgtgtgtgtgtgtgtgtttgatgaaaacaagagtggggaaaaaattggagacatgagaaatgtttaaaatatgtgttaaaaatcccaggccacattctactccttctttagtaattgatgcttaaaacttctctctgcgcttataaaaagcatgacttcagcccagagccccctaagcctaggttatgcatacatacccaaagcacgagaataaaaaagagttcttgttttcaatagagtttgttccatcacatagcaatccagataataagggggagacaccccactgagcaccatgcggggctctgcaaatactgtaaatgtgcgaggaaacatcacaggttcatatgaagatggcaagaattctatcatccagaggtcacaagtttctcagcccctgcaggtttccccacaataaaatggtgctttgcagcccttaaggaaccttaccagactgaaacctttcaaggtcctaaagcctgaagcataaatgctacactctattttctaattcagctgtagcccatactcaccgccttgggctctttgagaagactaataaaataaagggaagactcaccagttcatcctcctctccctggttgagcaaagcccgatggtccttcttactgttctcttccatctgaactcaaccggcgaggatctcttctggctaactccttggagaaatgtcaaaatcccttgggcttctgtgaacttggaatcgtcacaacttgtgattgctcttcccaggcgcttttaaaatctcttagtacacaccttgcctattagactaacaaaggaaagagagaaaatcttctcaggaacaggattggtctgttaatctggttattgtgggtttttttcctagtgtttgtttattgagctagatatgagtgcctcaagacctgaggaatgacgggggaagaagttggcaaactagaaggagaaatcattttgtatgcgatccataaatgtctcagccaaggaatgagaatagtcactttgctaaaaacctaagataaaaggattagccagtgagagatgtataaaaaccctgcagactttgaaaaagtaatgaacatattgggggtgacaatgagaattgaaggaagggaggtaggctcatgatagagaatgtaggaatcattttggaattagaaaaatctgagttctaatccgtgcttcactgaagaccctggacaaatcacttaaaatctggaatttcagtttctagtacataaaatgtcaataataactatacagtaatataaagatttaagatgatagtcataaaaagccaacgatagcacccaccacagtcactaagagagaaataatcatcatcataatcattacactaaccaagaagaaagaggctttaaaaagtaaactatattaataacttgattcttttcattttctctttagagtttacaaaagttttcaaatgagcaaagtatgtggagggaagagatgctagaaagtccgaggattaaggatatagcccaaatttcaacaccactgaatttgatattttgattagaaaataggtatactgtgatccattccagagtcagttaatttgtttgtgatgaaaacttttgtcattttattggctcttattgtatccttgcactttgactatggaagaaaatttgctgggaatgaaaactattagggatgatacttggctgtttctgctgactgaaatagacactgattgccttgagcaggcataagtgtccaacttggtgttcaggagagatcaacgtgctctctggccaggagaaagtggctgatgagaataaacaggaagacaactagagctcttcatgccagaggctcccgaggtacccatactgaagtataatgtgccggtgtgaatgttgccttgtaagtagtaccaatctaaggtaaaatgcatatttgaagaaaggagttctggattttagtaaaacttcattaaagacacgagtggtggctatcattcacttcttacccatccgctatttacttgtatttcttgctgaaagaaccccaactttgtgcagcatgacttcagctaaaagcaccaagatgagtcaatgatttgtctatgggtcggcgtgtggcccagttctaaacaatgaaatagaagagaaagacatggtcttgtgggaaaggttatcttgttgatgaaacagagagaagaacatttttttctgtcttcccctttctgcctttctttgaaagtgatccatgaaaatgcaatgcttggagcatggtagccatctttaggtggtgaggaggatgcaaatcaccatgaaaattacggtgagaaaaggacaaaagaagttatatgcctataacaccactgattcatggacctacctacccctaaacaccacattaaatacacaattaaacattctcataaagccactcttgcttgggttttctgttacatatagtccaaagatatacatagcactggtcttgactccattccacttttactcaacaattatgtactggaaaacagatgttccagacattgtgctaggccctcgaatacaatggtgtaaaggaaagagcccctatcctgagagagtttatagttacttgggaatgacagataactaagcagcctcttaattgggaa

SEQ ID NO: 315334 - DNA, 4001 bp, Homo sapiens
ttgactcaataaaataaaatctctaccctaggtcatacaatacaaaggttgaagagcactatctgcagtaagaaatgtcattctaacacaaagtggagttactccgttctggaaatgaggaagcactggggaagggagaaagggaggaaggtagcctatcaaaattaatctctctccaccactcaaaaatttcttcagcaaaaagttagtacactctagaaacaagcaattaagctttataaatgttcatcttttgttcccatgtaagtctggatgcaagatttatttcttcatcacactagtgggttcccaaaagaaaacagcaatttaaataaaaatcatgagtgattaccatgcagttaggcaaggcatctgtaaaataatacaaccgctggactaggattaaaggagaactgggttcttttcttggctttgtggcatatgtaattttacacaaggcaaaaatcacaacctctctgggtctcatttttctcatctctaaagtgggggttgggctaaaaatcctccaaggcccctttcagcttgtgataagacttcaagtcgccttttcaccctgaaggagtccatttcagtctgcaccaacagtttattttctgagtcacagcttatttctccatgcttatcctaaaaatgttgtgcccaaatagttctaagctctcgagatttattcccactcagaaagaaatggtctttcaagacccactaacaaaatgtttcaaaaggatttaaaaaggtaaaattagtttacttaagtataaaggcaaaaaaaaaaaaaagctctagcctgcattcagagattgatacaattttaggaaaaaaaggcatcctaaagctactctacacggtagatggtttaaatatattaaaacaaagagctcacgcatagaaaaaatctgctaacatacaaccatcactctcctgttttgaagacacgggaaaaaaaaaaaaaacctgtgttgttcagacaggatttactttccccaaagaagcaaatttgtaaggaagaaaacctctgtaattaaaaaggaatccgggaggaaccaacctttttaagggccttttcactgtccaaattcaagtgcattttcttgtacaatgtacttctgtgattaactcaccgctacacgtttaagcaacccacacccacacttaacactcagtcgcactcttccgaccggtcggggtggcagcgtggacgagtcacaagatagcggcgggagtggaaatttcctctcccctggagtggggcagggtctggcttctccgaaccgctcagcgggccgggcgcctccgccagggcctctcgggccggagcgctccgtacaaaggaggcccgggggctcggctcctgcactctcggggcccggcttcgggcaggggtccccggcttccggcgccgcgccgggcgggaggcccgggcagcacgtgcgccccgctcccagcagggagggaggaaccagcgcggcccggccgggctgcccgcgggccccgctgcttcgggagcgagctgcggccagtccggccggcccggggagcaatgaatggggccgcactgcgccgccgccgcccgggttagggtcgggcggtcgggagccccggcgctgggagccgcctcccgcctttccgttcccaccagaccgcgcccggcgcccccgggaccgaggccggccccggacgcccagctgctgcccgctcaccccagctcttggcggtgcgccccaggaattctccggtggtcgggttgtagatgaagagcttccactcggccaggctctggttgagggacttcttctcgttcttcgtcatggtgtgcgcgcggacggcgagaggagctgcggccgcggggatggaggcggcgagggctgcggaggcgcgtcccggctccggcggcgcagcccggagacggcagtgaagggtgggacggccgagaacacctcctcgttacggggagtactcgagccgactgcgccgcgccgcgccgggcggccgcttgggccgcgggagcctgacgtctccgcccgccgcagccaatccccgcgccgctcggcccgcgccgctgccgcctcccgccagcggccggggcgctgcctgaggcggcgagggcgccccaccccgccccggccccgccccgcagtagcctcgggggctccctcagcctgggtcagaggaagcgagaagaaagtctaaaaatccgaaggtttagtcgcacgcacgtttataataatagcaaaaggcgggcgtccccgcgccgcaggttgcttaggaggaggactgggtttcctgggcgttcctgggcgccggggcgctgagaagatgctacccgcggcgggcgggtgcggagagcacgaaaacgactccagtcggcccgcggcttcctctctgagggaacttaatcgtcccctccccgaactgcctccccgaccgtccccaggcgttctctgggctctgtgacgttcctacaggacgctctctgggctctgtgacgttcctacaggacgctctctgggctctgtgacgttcctacaggacgctctctgggctctgtgacgttcctacaggacgctctgcgggggatcgcgcggggctcccacaatgtacacggtgcactgctgttctgagaacgtcctcgcttggctcccttgaagggttcaaccgggagcctcgggtcaatgggaattccgttctaaatatgccagtgaatggagtataatttttctcgggattcagttgaatttatcaatgaaatctaaatacgtgctttcccaagggtcctggcaactgaaagctcccagcttttgcccagacgctcctactcttaacccacaggaaaggaacactcgttggagggtccacgcctgtgtagtgtcgccggcttttcatctcccctgtagagatcgcggcccttgggcggagctgagggtgccggtagcgttttcctccgcgagatggagctgacgagtacgggagggggggtgccctcagactcagcgacaggataaaagactttataggaatttgcacagaaggtgcggggtgggggaggttgttgttgttgttgtttatttatttatttttagaaaaaagctctgcctccgttttattagcaaataaaaattatggagaaatgtaatagccatcttattgtttggagtgatgaattataatctgtctggaagtttaaacagcctgcaaatggatgaattttcctttttcctcacttttcttaccaaagcaagaaataatgaattatacctcccacaaatggaaaagtggtaaaatatattcctataaagtgcttttttcacgcttaaaaaagctaaatttataattatgacattgaaaataaccaaaatccatttacgttttgagctaatgacaccaaaagatttgtagaagcatgttggagagtttggcatgaaatgagtattagaaatagcaaagcaccatgcaagcagactggaatgcacttctttaaatcataggcaagattgaaagaactaaagaatgttacctgccgggcgcggtggctcacgcctataatcccagcactttgggaggccgaggcaggcggatcaggaggtcaggatcgagaccatcctggctaacgcggtgaaaccccgtctctactaaaaatacaaaaaaattagccgggcgtggtagcgggcgcctgtagtcccggctgctcgggaggctgaggcaggagaatggggtgaacccaggaagcggagcttgcagtgagccgagatcccgccactgtactccagcctgggcgacagagcaagactccgtctcaaaaaaaaaaaaaaaaaaaaaaaaaaaaaaaaaaaagaatggaagtagttaactattttcaactcattacaaatataactacaggttagaggaaacctaaaatactggtagagttgataacaggctttttcatttaggtaagaaagaaagatatttagaatgaaacaaaacctgtccgcttcatttac

SEQ ID NO: 315335 - DNA, 4001 bp, Homo sapiens
ctgagggggcgggtgtgtgcacgcagcatccgcagaggtgctgcatctgtgtgcctgtggccgtcttcttatgtgtgcaactgacattcacctgtgggcacattccagcatgccatgtgcctgccaatgcacgggcaggcacgcagatggcattcagagccccacatgtgtgtgcctgttgttttcacacctgagccagccctcaggtgggtacacacatttctggctgttgcagggcactgtgtgcagcctactgctttcccgtgttagtgctacatgcatgtgtgggcaagctgcatgcacaggtgtgtatgtgtgtactgcattcgtgtgtgtgctgtgttttgcacgtgagcatgtggtgttcaggaacgtgggttgtatttacaggtgctggggtgtgggcatgggcattccatatgtgtatatatgatttggacatatatgacgcactacttatgggtactatatttgtatctgtgcatatgtgtgaatttgtgggcatgcatatgccctgatgtgaatgggactagggtgtgaaggtggctaaataatggtggccatcagcatctttcctggacccccaaccccccacaggactccccagagctgcagccccttctttgccactgctccttcaacgaagttaacaggcggaggcccccaaggcctgcgctccaagccccctcctactgcacacgtcaaaggagaatttctccggatggcgcccgctgatcctggaaataccccaaacgtcagctctgcctcctcccagcgattcggagagcaatgcaggagaggagggagccccttccacgctgggctcagggcatgcagcgtcgcactaagaccctctgccggctggtcgggcttgcctgctcacttacccttctgaaggtcgagccaggctgggcctctgcatggagggcccgagacccccagggcccttgcctgattggggcaggccagtccagagcacccccccaacccccaacccccaacctgggtgagcagaggacagccgtggtgtggaatagctacttggctagaaaggggttgctgctgtccgcaacccaccctcagggagtcctgaggccccctgctgcattttcccatcctgaccctgcagggggcagggaggagcctcaggtgccctatccctcagctggagaccactgaggctggcctaggaagtgggcttctgggcagagggtgccgactccaccacccagcatgactgctgcaaaatggcctggccacccgttcctgccaccctcctggccatggaggggacccaggaacacgtccctgccaccacatgacccggctggcctgacccaatgagtcccagcacacagctgcccaccccaccaaagggacgcttcacaggggcctcctcctgcctctttcctgggactctgaccagggtgggcaacgggcaccctccagtcctcttggtctccctgggaccggctcagagagaagagaaccttgtcccctgccaccagcttgctggcccttgcataacatccttagggggcatttgcagtccagaggctgccggaatctacctgagaccctgggcatccgcttgtccgaggcccccctgtcctagtccccagcatccagccgtcccccacaacacgcggaccctcacactagtgtctccctcagcggcggctcccagtgcagcctcggctgctgccagataaacaagccctgctcccaccccccctccacgctgccaccgccaccaccatcagcactgagaaaaatcaaatgaaatgaaacaaaataaaatgggtgagggaggaaggggagagtggagtggggcgctttttattttttattttctcatgctgggggatgccggtacttacttggctatgaaaatcaccaccaatcctgcacggtttcccggcgggcagccccgtaatcgcggtgcggcagctggtgccgcggctgagcccagccagcgtgcccgggcccctctgcagactgtaccatcctgcccgagcgggtggggggcggggggcggaggcgccggcgccggttctaggagagcatctcgccggcaaaatgcaatctcgggggaggcagaggccgcccctgccgctgccggaggctgggggatgggggcgggaggagggagggagggagggacacagggagggccggttctggagggggcacgggggaggagagtggggggcggggggggtgtgtggaccgaaccaccacgctgttgtttgcggttttaattcctcccgtgggatcatgaggaaccgaagctggcagagtcccaggaatatgcccgctccccagaagcaggagggaatgtcaagggcacggagagggtagggctgggctgtgctggagggaagggggtcctgagagtggtggtggggagaacgggagcagagaggggaggattttgctcaaatggccccaagtcgtcccttgctttctgggggacttatttggtcaggggctctggcccccctctttgcagtcaaggcacccccagacctggggggcaaaggggcaaaggtcgcaaatggggagaagtcgactcaacacattttaaacacatctgtgtttccagggccagtggagctgagcccgcagcagctctctgctgccctgaagcgctacccctgcgacccgccctgcctgtgtgcgaccccacctgccctcgggggggtgtggtggtgggggctggcttggcagaagggcctgcctcaagaaggtgcccaccagcaggggtgtctgcatgtctgtacacccacctaatcttcaggacatctatgatgagttgcaggccgactgtgggctgactgacacttccacgggaacccagggaccccgggtgaggagtcggtagggttggaagcccctagccagctgctcacctcttcctgcctaatctctgccagacttgctgctctttcaactccagatgggtgggaggagagccctaagagcaaggttaggaggtcaccgggggcgaggggcttctctagaattctgaagccttggcctccactgccctgccccctccaggaggggtaccctgcttggagggagggcactgaaggtggaaggaccttcaggaccagtgtctcagggcacctgtcagggtggaggggtgcatgggggacaggggcagggctggaggcggccccgggaggcagttccaggcagaagctgcctctttcccctgcccccacctcctgcccacctctgagctgcccgcccgagcgtcccgagctgccgctccatccctgggctggcacagaataccaatttgtctcgttaagctgaaagtctgcactgcaccaaaatcagaacccggccgtgcagaggggccacgggagggagacagttgggagcgcctgaggtgggtctcccaccagtaggccatgctgagacctccttgctcctcagcccccagccccatggaagggtgcccacctgccccttagcccgcagggtggcctcaacgcagggaggatgctgcgaagctacgatgtcaagggccgggtggtcattcaaggccttggcctccactggggcaagggtgtgagtcagaggccaggcaaggctccctgctggggttctgacagagcagcccaggacacccctcagggaggctctcgaccccacaccaatagcccaagactgggggcttccaaagcagcctcatctctgcttcatcttgcgggtgcagatgggaactctacccctcttaggggtgtagttggggggattccactggccacccctctaggtggtcttctaagtcagcagtccctagtcagctccaccccagggaccagggccaagcatctgcccttccccaaggcccacaggctctccgttccccaaaacaggcccgtgtaaagctgttccgagatgttggagcgagggtgggcaaagacgggcagaggcggaaaggcccattgcacctcccatctgttgccagcctacatgtctgtgcc

SEQ ID NO: 315336 - DNA, 4001 bp, Homo sapiens
aggctcagaaaagtgactttccttatcaccaaaaacatcactgctttcaaatgtttctcaagacccaattagacagtataactcctctgcagttatacactttagtatttcagaaaatgtcttccgccaattatccatccagagtaaaatttgtcaatataatcatgcctctcatcatattccctacatagcccagaggtctcagagagcaaaacacattactgcatctataagaaacacccatttcaaaattactagtcctagtcagacaatcaagcttacattctcaacaatggaaaaacaaattagaagcagccagcaagactgcagctcctttataccagacacatattttttaaaacaaattataccagaggaaaaaactgtcatttgttaagtatcttttatagtattttgcagcccggttaaaggcagaagaaaaaaaaatgatcacgcacaagtcagaagtcagtccaaagaataagtgttgtttcaggagggggaaaaaaaatcacttattcacagttgttcaacaattttaaaaataatcagtgctgtgtaggaaaagcattaaatattttaacgaggccaaagggatcatgtaacatgtgaatgacgatctaatgtgtccaaagtgtacagtgaacaaacaggttccgctgtcagcctcctaaatgatgttttgaaatagggtggaactttaagaaaagcactcatctcataacatttcattaaattcactgggttttttttgtgaattgaaaaataatgagttttttccccaatgctagacataataaaacatggcttgctttcttataaatgaatcctgccacacaccacatcgaggcttgaaacgccaatatacagagatgcagccccatccccttgtcccccatttccacttcccctcgagtaattcctttcaaatagctatttaaacatgcacagacgctatctgaaatgaaaacttccctctcattccctaagctgaagagagcaggaattcctcaagaaagctgaatcaagctcagtcacccacagaacctcaatctctcaaatgccccatgttaccaaaataaaagctggataccctaagtaagcaaatccttggacacttcacatacacagtaaataaataagctcacgaaaataaaaaggtggaaaaacaaagacaacttaaaagcaaaccaccacaccctcaactccgcgttgcaaccggtcggccaggggcctttaccttcattttccatcgaaactgcactcgggttgatggctacaaagtctttagtgtcagccacggccacactgggaatagagaggagaggaggaggacaaggaagagaagcccccggaatcccaggctgtcacccccgctcccggccacgcgtcccacggctgctcccaccacccctagcagcagcatctgcaagagaaaccaggagaagcggcgctgacgagaggctgaggaaggagttccccgcccagccactatctcgggagcccccctccccaagatcccgcacccgccccgtcgtgtgcccgcaacgtccccagctcacgccagcggggcggcgccctagagatgcccccccatccaggggatacccgaacctccccttccttcagaacctggaagtttctagaaatgggggcaggaggtaatactggtacccacccaaagccccggacagccctcctccaggctgcggggtctcagccgcggggctcgcgggggcgccccgcgcgcctcgggagaagaggagctgctcgcggggcagcggtgcgaggcgggagcctgctcccggcgtgagaagaagcgagcgggagggaggaagggagggagagagggcgggcggggaggggagagaagaggaggtgaggggacccgtcacggtccgccgggccggctccgcgaggccgtgctggtctgctcccgcctccgactcctgcgctccgcccctccccgccgccggccgcccagtcgcgccccgcactcctgggccagccgcgaacccagctttgtcactattacttccgctgagagaggtgcgcgcaggcgcattcgtgttcacgggctgggaaggcggaagtgaagtgaaggccgagacttcggcccggaatggacaatgtttgggtttggatccgtccggtaggaggtcgctcggggttggtggcccgccttgttcttgctggcgcctcccttaccccagggacggtgtccgcccgtttatatgcaccccctgaacgcgagggtcggagattcgcccacgccccgtgtcggccacgcattcccgtggggcggccgcggggtcggcccaagctgagagtcatggccgctgtccccgaggcgtttaagcgctctctacaaagtctgtaggggaagctgctcccgtcggggtggcagtcacaatctcagcaggcaacgttgaggcccacggaaggaaggggcgaggtgtccatgctcctgccagggactggagcaccgtgagcagcctcccgagtctcgcactctcacttgcaaaaccctgcactgactgcttggttcttgggggagccggtaatcgcggggcgacttcccaaaattctttaaggggtgtgcttagttaccatgtgtaatgagagagcaaggttcagcctcagagagctccagggagagctaatctttttcattcgtttgtggtatatggaactggggagaggctggaacagcaattagaaaccagtcgtacagctgtcgaagccaatgaacgagcacttcttttagcagctgtacctttgtccagtgtcaatgccttttcacacgtaaacatttcacttgctcggcatcttacccagacccctaataagtgctttttaatgaacgattggttttaataaaccgtggtgagccagacatataatgttgaacagaagtcctctcacacccataaccactagagggcagggcttcacctactgagttggtgatcatcctacagagaactcaaaagaaaatttccgtatatgctagatgtgtttttctccatcaacacttagacactttacaaatttgctttttatctcaggtcctgtaacatatcgcagtgtgctctctaaccacacgttcaacatcagaattaacggacggggttgcctgtgtttctatatttgttcccaagtaagtggtactagactaggattgaaaattctggacagctttctagatttacctttcttttaagaaatattgaacttttattcagcgaggtcacttttaaagatgaacccataaaaatcactatcaagtagatttctagtcttaacgagttaactatgatccacctctggcatgcatggtcagtgatttttgtctgcacaatgacggagccaaattaacggacggggttgcctgtgcttctatatttgttcccaagtaagtggtactagactaggatcgaaaattctggacggtttttagatttacctttcttttaagaaatattgaacttttattcagcgaggtcacttttaaagatgaacccataaaaatatcaagtagatttctagtcttaggagttactatttatgatccacctctggcatgcatggtcagtgatttttgtctacacaatgacatagcctgtgatttgtacaatgattgtgatctctcgtaatcaatttgtaacagttattactgtacatattcgaccttgaaacagcattatattaaaaacaaaagcacctaaggtaggaaattacacaatataaatactttgatattaacatatgcatttacaaaatagagggtaactgtacagaatttggtattgggtcactttagctgaaacatttttctaaagcaacttttcagaactatctgttgtattaatatactgcaatactctagcattaacactgaatctataactcctccaaaagatttatagctccatggtttattcctaaaatgacttaaactgaaattttacttttggtcccctaaattatgaaaatcattg

SEQ ID NO: 315337 - DNA, 4001 bp, Homo sapiens
acaataaaaaggcacaggtatcaatctatgtagtttaatatggtcagtcacttttgaaaatttctaggctatatacaggctcttcttcaaactgtttatatataaaaaaaaatgtgacgatagggagaaactgacaaaaatggtctcttgatggtcaagaataacgggacagaaaaccccacacgtttttaagaactgtataatcttttactatgaaaccacaaaattcatatttggccacaaaatacagagacagacacaagtaggcaccattctcctatctcacaaccaccccctcccacctcagtagataatgagaatcggctttattactcatgctcttcctcctgagagatcaagaaacaaaagcaacatgaaagaatccacctactttaggctaccctcttaaatctggtaccattctgaaaacaagctcataaacatacattaaatgttagaagttatttaagatgtttctaccaagaaacaagtatatgaatgcatttaacattctttgtctcatgtgcagaatggatttgcctttcttaaatcaataaacttaaaagagaggaaaaaggctcagaaaagtgactttccttatcaccaaaaacatcactgctttcaaatgtttctcaagacccaattagacagtataactcctctgcagttatacactttagtatttcagaaaatgtcttccgccaattatccatccagagtaaaatttgtcaatataatcatgcctctcatcatattccctacatagcccagaggtctcagagagcaaaacacattactgcatctataagaaacacccatttcaaaattactagtcctagtcagacaatcaagcttacattctcaacaatggaaaaacaaattagaagcagccagcaagactgcagctcctttataccagacacatattttttaaaacaaattataccagaggaaaaaactgtcatttgttaagtatcttttatagtattttgcagcccggttaaaggcagaagaaaaaaaaatgatcacgcacaagtcagaagtcagtccaaagaataagtgttgtttcaggagggggaaaaaaaatcacttattcacagttgttcaacaattttaaaaataatcagtgctgtgtaggaaaagcattaaatattttaacgaggccaaagggatcatgtaacatgtgaatgacgatctaatgtgtccaaagtgtacagtgaacaaacaggttccgctgtcagcctcctaaatgatgttttgaaatagggtggaactttaagaaaagcactcatctcataacatttcattaaattcactgggttttttttgtgaattgaaaaataatgagttttttccccaatgctagacataataaaacatggcttgctttcttataaatgaatcctgccacacaccacatcgaggcttgaaacgccaatatacagagatgcagccccatccccttgtcccccatttccacttcccctcgagtaattcctttcaaatagctatttaaacatgcacagacgctatctgaaatgaaaacttccctctcattccctaagctgaagagagcaggaattcctcaagaaagctgaatcaagctcagtcacccacagaacctcaatctctcaaatgccccatgttaccaaaataaaagctggataccctaagtaagcaaatccttggacacttcacatacacagtaaataaataagctcacgaaaataaaaaggtggaaaaacaaagacaacttaaaagcaaaccaccacaccctcaactccgcgttgcaaccggtcggccaggggcctttaccttcattttccatcgaaactgcactcgggttgatggctacaaagtctttagtgtcagccacggccacactgggaatagagaggagaggaggaggacaaggaagagaagcccccggaatcccaggctgtcacccccgctcccggccacgcgtcccacggctgctcccaccacccctagcagcagcatctgcaagagaaaccaggagaagcggcgctgacgagaggctgaggaaggagttccccgcccagccactatctcgggagcccccctccccaagatcccgcacccgccccgtcgtgtgcccgcaacgtccccagctcacgccagcggggcggcgccctagagatgcccccccatccaggggatacccgaacctccccttccttcagaacctggaagtttctagaaatgggggcaggaggtaatactggtacccacccaaagccccggacagccctcctccaggctgcggggtctcagccgcggggctcgcgggggcgccccgcgcgcctcgggagaagaggagctgctcgcggggcagcggtgcgaggcgggagcctgctcccggcgtgagaagaagcgagcgggagggaggaagggagggagagagggcgggcggggaggggagagaagaggaggtgaggggacccgtcacggtccgccgggccggctccgcgaggccgtgctggtctgctcccgcctccgactcctgcgctccgcccctccccgccgccggccgcccagtcgcgccccgcactcctgggccagccgcgaacccagctttgtcactattacttccgctgagagaggtgcgcgcaggcgcattcgtgttcacgggctgggaaggcggaagtgaagtgaaggccgagacttcggcccggaatggacaatgtttgggtttggatccgtccggtaggaggtcgctcggggttggtggcccgccttgttcttgctggcgcctcccttaccccagggacggtgtccgcccgtttatatgcaccccctgaacgcgagggtcggagattcgcccacgccccgtgtcggccacgcattcccgtggggcggccgcggggtcggcccaagctgagagtcatggccgctgtccccgaggcgtttaagcgctctctacaaagtctgtaggggaagctgctcccgtcggggtggcagtcacaatctcagcaggcaacgttgaggcccacggaaggaaggggcgaggtgtccatgctcctgccagggactggagcaccgtgagcagcctcccgagtctcgcactctcacttgcaaaaccctgcactgactgcttggttcttgggggagccggtaatcgcggggcgacttcccaaaattctttaaggggtgtgcttagttaccatgtgtaatgagagagcaaggttcagcctcagagagctccagggagagctaatctttttcattcgtttgtggtatatggaactggggagaggctggaacagcaattagaaaccagtcgtacagctgtcgaagccaatgaacgagcacttcttttagcagctgtacctttgtccagtgtcaatgccttttcacacgtaaacatttcacttgctcggcatcttacccagacccctaataagtgctttttaatgaacgattggttttaataaaccgtggtgagccagacatataatgttgaacagaagtcctctcacacccataaccactagagggcagggcttcacctactgagttggtgatcatcctacagagaactcaaaagaaaatttccgtatatgctagatgtgtttttctccatcaacacttagacactttacaaatttgctttttatctcaggtcctgtaacatatcgcagtgtgctctctaaccacacgttcaacatcagaattaacggacggggttgcctgtgtttctatatttgttcccaagtaagtggtactagactaggattgaaaattctggacagctttctagatttacctttcttttaagaaatattgaacttttattcagcgaggtcacttttaaagatgaacccataaaaatcactatcaagtagatttctagtcttaacgagttaactatgatccacctctggcatgcatggtcagtgatttttgtctgcacaatgacggagccaaattaacggacggggttgcctgtgcttctatatttgttcccaagtaagtggtac

SEQ ID NO: 315338 - DNA, 4001 bp, Homo sapiens
atcaccaaaaacatcactgctttcaaatgtttctcaagacccaattagacagtataactcctctgcagttatacactttagtatttcagaaaatgtcttccgccaattatccatccagagtaaaatttgtcaatataatcatgcctctcatcatattccctacatagcccagaggtctcagagagcaaaacacattactgcatctataagaaacacccatttcaaaattactagtcctagtcagacaatcaagcttacattctcaacaatggaaaaacaaattagaagcagccagcaagactgcagctcctttataccagacacatattttttaaaacaaattataccagaggaaaaaactgtcatttgttaagtatcttttatagtattttgcagcccggttaaaggcagaagaaaaaaaaatgatcacgcacaagtcagaagtcagtccaaagaataagtgttgtttcaggagggggaaaaaaaatcacttattcacagttgttcaacaattttaaaaataatcagtgctgtgtaggaaaagcattaaatattttaacgaggccaaagggatcatgtaacatgtgaatgacgatctaatgtgtccaaagtgtacagtgaacaaacaggttccgctgtcagcctcctaaatgatgttttgaaatagggtggaactttaagaaaagcactcatctcataacatttcattaaattcactgggttttttttgtgaattgaaaaataatgagttttttccccaatgctagacataataaaacatggcttgctttcttataaatgaatcctgccacacaccacatcgaggcttgaaacgccaatatacagagatgcagccccatccccttgtcccccatttccacttcccctcgagtaattcctttcaaatagctatttaaacatgcacagacgctatctgaaatgaaaacttccctctcattccctaagctgaagagagcaggaattcctcaagaaagctgaatcaagctcagtcacccacagaacctcaatctctcaaatgccccatgttaccaaaataaaagctggataccctaagtaagcaaatccttggacacttcacatacacagtaaataaataagctcacgaaaataaaaaggtggaaaaacaaagacaacttaaaagcaaaccaccacaccctcaactccgcgttgcaaccggtcggccaggggcctttaccttcattttccatcgaaactgcactcgggttgatggctacaaagtctttagtgtcagccacggccacactgggaatagagaggagaggaggaggacaaggaagagaagcccccggaatcccaggctgtcacccccgctcccggccacgcgtcccacggctgctcccaccacccctagcagcagcatctgcaagagaaaccaggagaagcggcgctgacgagaggctgaggaaggagttccccgcccagccactatctcgggagcccccctccccaagatcccgcacccgccccgtcgtgtgcccgcaacgtccccagctcacgccagcggggcggcgccctagagatgcccccccatccaggggatacccgaacctccccttccttcagaacctggaagtttctagaaatgggggcaggaggtaatactggtacccacccaaagccccggacagccctcctccaggctgcggggtctcagccgcggggctcgcgggggcgccccgcgcgcctcgggagaagaggagctgctcgcggggcagcggtgcgaggcgggagcctgctcccggcgtgagaagaagcgagcgggagggaggaagggagggagagagggcgggcggggaggggagagaagaggaggtgaggggacccgtcacggtccgccgggccggctccgcgaggccgtgctggtctgctcccgcctccgactcctgcgctccgcccctccccgccgccggccgcccagtcgcgccccgcactcctgggccagccgcgaacccagctttgtcactattacttccgctgagagaggtgcgcgcaggcgcattcgtgttcacgggctgggaaggcggaagtgaagtgaaggccgagacttcggcccggaatggacaatgtttgggtttggatccgtccggtaggaggtcgctcggggttggtggcccgccttgttcttgctggcgcctcccttaccccagggacggtgtccgcccgtttatatgcaccccctgaacgcgagggtcggagattcgcccacgccccgtgtcggccacgcattcccgtggggcggccgcggggtcggcccaagctgagagtcatggccgctgtccccgaggcgtttaagcgctctctacaaagtctgtaggggaagctgctcccgtcggggtggcagtcacaatctcagcaggcaacgttgaggcccacggaaggaaggggcgaggtgtccatgctcctgccagggactggagcaccgtgagcagcctcccgagtctcgcactctcacttgcaaaaccctgcactgactgcttggttcttgggggagccggtaatcgcggggcgacttcccaaaattctttaaggggtgtgcttagttaccatgtgtaatgagagagcaaggttcagcctcagagagctccagggagagctaatctttttcattcgtttgtggtatatggaactggggagaggctggaacagcaattagaaaccagtcgtacagctgtcgaagccaatgaacgagcacttcttttagcagctgtacctttgtccagtgtcaatgccttttcacacgtaaacatttcacttgctcggcatcttacccagacccctaataagtgctttttaatgaacgattggttttaataaaccgtggtgagccagacatataatgttgaacagaagtcctctcacacccataaccactagagggcagggcttcacctactgagttggtgatcatcctacagagaactcaaaagaaaatttccgtatatgctagatgtgtttttctccatcaacacttagacactttacaaatttgctttttatctcaggtcctgtaacatatcgcagtgtgctctctaaccacacgttcaacatcagaattaacggacggggttgcctgtgtttctatatttgttcccaagtaagtggtactagactaggattgaaaattctggacagctttctagatttacctttcttttaagaaatattgaacttttattcagcgaggtcacttttaaagatgaacccataaaaatcactatcaagtagatttctagtcttaacgagttaactatgatccacctctggcatgcatggtcagtgatttttgtctgcacaatgacggagccaaattaacggacggggttgcctgtgcttctatatttgttcccaagtaagtggtactagactaggatcgaaaattctggacggtttttagatttacctttcttttaagaaatattgaacttttattcagcgaggtcacttttaaagatgaacccataaaaatatcaagtagatttctagtcttaggagttactatttatgatccacctctggcatgcatggtcagtgatttttgtctacacaatgacatagcctgtgatttgtacaatgattgtgatctctcgtaatcaatttgtaacagttattactgtacatattcgaccttgaaacagcattatattaaaaacaaaagcacctaaggtaggaaattacacaatataaatactttgatattaacatatgcatttacaaaatagagggtaactgtacagaatttggtattgggtcactttagctgaaacatttttctaaagcaacttttcagaactatctgttgtattaatatactgcaatactctagcattaacactgaatctataactcctccaaaagatttatagctccatggtttattcctaaaatgacttaaactgaaattttacttttggtcccctaaattatgaaaatcattgttcctattactaagccaaaaaaga

SEQ ID NO: 315339 - DNA, 4001 bp, Homo sapiens
ccaaatggttgtacactggggaagggactacccaccctgtccaagtcagaggttttatgttaaattctaatggtcttctgaatgcattttgtaatacttcttcaataaactaaaaacaaagaaccatagaactacacaagcaatatagccacatctctgaaaacttacaatactgagaaaaaaaaaatcactcaattcacattccacagttgtgttcccatcctttcagccacctctcttccttccataataaatgaggcctgaagaagcccgtgaacattaaaagattggcaaacaaaaacttatacagccctaccacttggttctctagctttctacatcaaaagcaagtgcaggctgaaacttggaaaccaaaagttggtcttttaatggtgacaccttgcctaagtaagataaactggaccagcctagctcccttagtgaacagagtctgtttgaatttctggcccttgtaaaattattaaagcagggcatacaagcagtttcctctcaaacagtagcaatgatttttattttccaaattatgcattgcctttttgggaaacctgtcatgagaggattttctgtctgctaaacctatcttgcatttcctggaagtgttttattaagtgggtcatctcatatcacaaaggagaaaaaaatacaggacactggtgatatctcctgcatagttttgcagttctagttacaagcacaatgcacaagcaatttatgactgctgggtctttggtatggctatacatttgtccttcacatttgtataccaccgccacacttcttcctaaatgaatcactagatttaaatggatcagatattgctacttcttctaacaatttggtaaaattcataaaaatcatttttagaaatgtcttttttggagatcaaagaaatggaatgatataaatctcacaccataaaaatgactgcatgattttaaatgagatgtgatcagacattttaacagttttaaaaatgcttatattcccaagtgatagtgtctcctgctggaaatcatagcttttgattggctaaaaagactgaatatggcagtgctctacctcctaccttttacacacacaaaaatgaccaactgcttctgaatgatctttatagcttgttaatgatctgtttaaggttattatagtttataaaatgttttttgttttgcaaattctggctatgtaaacataaccataaatacaagaagacaagtgtacttctagggtctgatactttctttgttgagatattaatagtgtcaaattttgtatctgaggcattggaaaatgatcaaagaattcaaaatttaactttgatagagtagctctttagaagaaagaaagcatgtggcttcattacagaactccgcttaatctcaggatctgaatgttccaagtttaaataaattctcacaagcctgcttgctttctgattgccaagtctgaacagccacaagcaggatctgacctgtacctataaacatgtaaaccagcacaaatgaaatcactaagcgacgtaaaagcaacaaggaacaagcacccgttcattttaaagataatataaacaaaatgatacctgttcttcggctctttggtttctcagcgtcgataaatatctcctaattgcatggagaggatattttttgaaataagagaatctagatggaggcaacagactatccatagtgaggaaagcaagagggtccttgtctgcacctccttgtcagcaaccatatgaaattagaaacttagcaattcctcagatgcctaaagatttgtttgtagctcgacaacttccctcctacaaacaaagcaaatgttctccttgctgtttcctcttttgggtagagttcctggtgaaaccagacagccaagtatgaacactgtctagaagcgtccagaaatgcaatgcccaaagggcaataggaattcaggggctggtccacagaatgcaaattgcttagtggtagtgatgcgactgtcctatttctagcaacagtgttctgttgcaagctatgttaatattagctagctggtgactttccatacccacagactctcgtgaggcttaattttaattcttctgacactttttctagttcttaaacagggcatgagatgtggttttcccagtttccttctagatttcttatcatcatgcgcacacacagacacacagctcagttgcggtctgagctggaaagtgttgattcattcagtcttgagaagactgttataggggacttccaaaaaaatttaacaaattacctcactcttcattgttatcaaggagctcgttgtcagcactgaaaacgtttggcttgcactgtgatgcattatgcaacatgcccagtaaccagatactttacattaattgaacaatagctgcaaacagattctgttctgagttaaaagccttctctccttgaatccttatctcaaatccacaggctgaattcagaaacattaactttccctaggcttttaaaaactatgaatgtaagtgagagaaaatgttttatgtttactttctaactcttattaaaaaaaagattcatgcttaaaaaaaaaagaacaaaagaaaaataatgccaagaggtctgtggtcttagaggacatgaaatcataaaatttgaaagttcaatattttcttaatactttatagagatcacagggtttttctaaactagggccccaaatagacattactattttattatccttttaaactttacagtagctggttcctttgatggaaacatttggtcacttctgtgaggggctgtcatgtagaaaacagactggacatcaacaaaaattatgtgacccagagttttctttaagggtgaaagcaagccctggtttttccctcttcctagagagcactgcaagttgcggggaagaggaggtaggcagagctggggaaattacattgcagccttagttgtccccctggacagcctccctgacactcctggatgggtcacctgccttcagggaacacacttgatggcctaaacctggttgtgctgcaagcagcccaggccatctgtcaggttggcattgggcccactagcaaggtgatcttccagactcaccaggaccagcctggcaattccaagaagtcatttacatattgctactggagctggctcctaggaggaggccctgcccttctgtcacctctccaggtgcaccatgctacatgcatacagaggctctgcacgtccttctctgtatgctggagacagctgactctaatgagggcaagagagaagcagtgtgcttgtgaaacacctgaatgctaagggcacagtgctgcatgctccctgccagttcatgacccagaaaaacaagaagtatagaaagccagataccctgggccaacttgaagccctggaaagagaggcagccctagggattgtgggggcagggaaatgtgtcgttcatacgaacccttgagatccactaactgcccttttgcttctctttttaaaaatatcagaaccttcagagatgcctctttattgtgggcagaagccagcagcctgctaaacacccacagcatgactggtgatccaatcttttcccaacagacgaacacaaagcagacttcatttccacagttgtttcaggatcactttttctggggctgaggtgagtgatgaaaagaaatggggagggagaaatgcagcatccccaaacaaaaactgttctattagattaagcacaaaaaagaaaaatgggtgaaacaaattcaattaaaattcctttaggaatttaattgataacgaatataaatcgtatctaatactaattgggccctttggccaggtgatgtgctaaagtctttacatgtattatcacatgtaatcctacagtaacatatgggtaaactaaagctcagagaaggtaacaatttgctgaggtcgcacagctgcaaaaacagaggcgaaggggattctaaccaggtaaacctg

SEQ ID NO: 315340 - DNA, 4001 bp, Homo sapiens
aatggatttgcctttcttaaatcaataaacttaaaagagaggaaaaaggctcagaaaagtgactttccttatcaccaaaaacatcactgctttcaaatgtttctcaagacccaattagacagtataactcctctgcagttatacactttagtatttcagaaaatgtcttccgccaattatccatccagagtaaaatttgtcaatataatcatgcctctcatcatattccctacatagcccagaggtctcagagagcaaaacacattactgcatctataagaaacacccatttcaaaattactagtcctagtcagacaatcaagcttacattctcaacaatggaaaaacaaattagaagcagccagcaagactgcagctcctttataccagacacatattttttaaaacaaattataccagaggaaaaaactgtcatttgttaagtatcttttatagtattttgcagcccggttaaaggcagaagaaaaaaaaatgatcacgcacaagtcagaagtcagtccaaagaataagtgttgtttcaggagggggaaaaaaaatcacttattcacagttgttcaacaattttaaaaataatcagtgctgtgtaggaaaagcattaaatattttaacgaggccaaagggatcatgtaacatgtgaatgacgatctaatgtgtccaaagtgtacagtgaacaaacaggttccgctgtcagcctcctaaatgatgttttgaaatagggtggaactttaagaaaagcactcatctcataacatttcattaaattcactgggttttttttgtgaattgaaaaataatgagttttttccccaatgctagacataataaaacatggcttgctttcttataaatgaatcctgccacacaccacatcgaggcttgaaacgccaatatacagagatgcagccccatccccttgtcccccatttccacttcccctcgagtaattcctttcaaatagctatttaaacatgcacagacgctatctgaaatgaaaacttccctctcattccctaagctgaagagagcaggaattcctcaagaaagctgaatcaagctcagtcacccacagaacctcaatctctcaaatgccccatgttaccaaaataaaagctggataccctaagtaagcaaatccttggacacttcacatacacagtaaataaataagctcacgaaaataaaaaggtggaaaaacaaagacaacttaaaagcaaaccaccacaccctcaactccgcgttgcaaccggtcggccaggggcctttaccttcattttccatcgaaactgcactcgggttgatggctacaaagtctttagtgtcagccacggccacactgggaatagagaggagaggaggaggacaaggaagagaagcccccggaatcccaggctgtcacccccgctcccggccacgcgtcccacggctgctcccaccacccctagcagcagcatctgcaagagaaaccaggagaagcggcgctgacgagaggctgaggaaggagttccccgcccagccactatctcgggagcccccctccccaagatcccgcacccgccccgtcgtgtgcccgcaacgtccccagctcacgccagcggggcggcgccctagagatgcccccccatccaggggatacccgaacctccccttccttcagaacctggaagtttctagaaatgggggcaggaggtaatactggtacccacccaaagccccggacagccctcctccaggctgcggggtctcagccgcggggctcgcgggggcgccccgcgcgcctcgggagaagaggagctgctcgcggggcagcggtgcgaggcgggagcctgctcccggcgtgagaagaagcgagcgggagggaggaagggagggagagagggcgggcggggaggggagagaagaggaggtgaggggacccgtcacggtccgccgggccggctccgcgaggccgtgctggtctgctcccgcctccgactcctgcgctccgcccctccccgccgccggccgcccagtcgcgccccgcactcctgggccagccgcgaacccagctttgtcactattacttccgctgagagaggtgcgcgcaggcgcattcgtgttcacgggctgggaaggcggaagtgaagtgaaggccgagacttcggcccggaatggacaatgtttgggtttggatccgtccggtaggaggtcgctcggggttggtggcccgccttgttcttgctggcgcctcccttaccccagggacggtgtccgcccgtttatatgcaccccctgaacgcgagggtcggagattcgcccacgccccgtgtcggccacgcattcccgtggggcggccgcggggtcggcccaagctgagagtcatggccgctgtccccgaggcgtttaagcgctctctacaaagtctgtaggggaagctgctcccgtcggggtggcagtcacaatctcagcaggcaacgttgaggcccacggaaggaaggggcgaggtgtccatgctcctgccagggactggagcaccgtgagcagcctcccgagtctcgcactctcacttgcaaaaccctgcactgactgcttggttcttgggggagccggtaatcgcggggcgacttcccaaaattctttaaggggtgtgcttagttaccatgtgtaatgagagagcaaggttcagcctcagagagctccagggagagctaatctttttcattcgtttgtggtatatggaactggggagaggctggaacagcaattagaaaccagtcgtacagctgtcgaagccaatgaacgagcacttcttttagcagctgtacctttgtccagtgtcaatgccttttcacacgtaaacatttcacttgctcggcatcttacccagacccctaataagtgctttttaatgaacgattggttttaataaaccgtggtgagccagacatataatgttgaacagaagtcctctcacacccataaccactagagggcagggcttcacctactgagttggtgatcatcctacagagaactcaaaagaaaatttccgtatatgctagatgtgtttttctccatcaacacttagacactttacaaatttgctttttatctcaggtcctgtaacatatcgcagtgtgctctctaaccacacgttcaacatcagaattaacggacggggttgcctgtgtttctatatttgttcccaagtaagtggtactagactaggattgaaaattctggacagctttctagatttacctttcttttaagaaatattgaacttttattcagcgaggtcacttttaaagatgaacccataaaaatcactatcaagtagatttctagtcttaacgagttaactatgatccacctctggcatgcatggtcagtgatttttgtctgcacaatgacggagccaaattaacggacggggttgcctgtgcttctatatttgttcccaagtaagtggtactagactaggatcgaaaattctggacggtttttagatttacctttcttttaagaaatattgaacttttattcagcgaggtcacttttaaagatgaacccataaaaatatcaagtagatttctagtcttaggagttactatttatgatccacctctggcatgcatggtcagtgatttttgtctacacaatgacatagcctgtgatttgtacaatgattgtgatctctcgtaatcaatttgtaacagttattactgtacatattcgaccttgaaacagcattatattaaaaacaaaagcacctaaggtaggaaattacacaatataaatactttgatattaacatatgcatttacaaaatagagggtaactgtacagaatttggtattgggtcactttagctgaaacatttttctaaagcaacttttcagaactatctgttgtattaatatactgcaatactctagcattaacactgaatctataactcctccaaaagatttatagctccatggtttattcctaaaatgact

SEQ ID NO: 315341 - DNA, 4001 bp, Homo sapiens
gtctcttgatggtcaagaataacgggacagaaaaccccacacgtttttaagaactgtataatcttttactatgaaaccacaaaattcatatttggccacaaaatacagagacagacacaagtaggcaccattctcctatctcacaaccaccccctcccacctcagtagataatgagaatcggctttattactcatgctcttcctcctgagagatcaagaaacaaaagcaacatgaaagaatccacctactttaggctaccctcttaaatctggtaccattctgaaaacaagctcataaacatacattaaatgttagaagttatttaagatgtttctaccaagaaacaagtatatgaatgcatttaacattctttgtctcatgtgcagaatggatttgcctttcttaaatcaataaacttaaaagagaggaaaaaggctcagaaaagtgactttccttatcaccaaaaacatcactgctttcaaatgtttctcaagacccaattagacagtataactcctctgcagttatacactttagtatttcagaaaatgtcttccgccaattatccatccagagtaaaatttgtcaatataatcatgcctctcatcatattccctacatagcccagaggtctcagagagcaaaacacattactgcatctataagaaacacccatttcaaaattactagtcctagtcagacaatcaagcttacattctcaacaatggaaaaacaaattagaagcagccagcaagactgcagctcctttataccagacacatattttttaaaacaaattataccagaggaaaaaactgtcatttgttaagtatcttttatagtattttgcagcccggttaaaggcagaagaaaaaaaaatgatcacgcacaagtcagaagtcagtccaaagaataagtgttgtttcaggagggggaaaaaaaatcacttattcacagttgttcaacaattttaaaaataatcagtgctgtgtaggaaaagcattaaatattttaacgaggccaaagggatcatgtaacatgtgaatgacgatctaatgtgtccaaagtgtacagtgaacaaacaggttccgctgtcagcctcctaaatgatgttttgaaatagggtggaactttaagaaaagcactcatctcataacatttcattaaattcactgggttttttttgtgaattgaaaaataatgagttttttccccaatgctagacataataaaacatggcttgctttcttataaatgaatcctgccacacaccacatcgaggcttgaaacgccaatatacagagatgcagccccatccccttgtcccccatttccacttcccctcgagtaattcctttcaaatagctatttaaacatgcacagacgctatctgaaatgaaaacttccctctcattccctaagctgaagagagcaggaattcctcaagaaagctgaatcaagctcagtcacccacagaacctcaatctctcaaatgccccatgttaccaaaataaaagctggataccctaagtaagcaaatccttggacacttcacatacacagtaaataaataagctcacgaaaataaaaaggtggaaaaacaaagacaacttaaaagcaaaccaccacaccctcaactccgcgttgcaaccggtcggccaggggcctttaccttcattttccatcgaaactgcactcgggttgatggctacaaagtctttagtgtcagccacggccacactgggaatagagaggagaggaggaggacaaggaagagaagcccccggaatcccaggctgtcacccccgctcccggccacgcgtcccacggctgctcccaccacccctagcagcagcatctgcaagagaaaccaggagaagcggcgctgacgagaggctgaggaaggagttccccgcccagccactatctcgggagcccccctccccaagatcccgcacccgccccgtcgtgtgcccgcaacgtccccagctcacgccagcggggcggcgccctagagatgcccccccatccaggggatacccgaacctccccttccttcagaacctggaagtttctagaaatgggggcaggaggtaatactggtacccacccaaagccccggacagccctcctccaggctgcggggtctcagccgcggggctcgcgggggcgccccgcgcgcctcgggagaagaggagctgctcgcggggcagcggtgcgaggcgggagcctgctcccggcgtgagaagaagcgagcgggagggaggaagggagggagagagggcgggcggggaggggagagaagaggaggtgaggggacccgtcacggtccgccgggccggctccgcgaggccgtgctggtctgctcccgcctccgactcctgcgctccgcccctccccgccgccggccgcccagtcgcgccccgcactcctgggccagccgcgaacccagctttgtcactattacttccgctgagagaggtgcgcgcaggcgcattcgtgttcacgggctgggaaggcggaagtgaagtgaaggccgagacttcggcccggaatggacaatgtttgggtttggatccgtccggtaggaggtcgctcggggttggtggcccgccttgttcttgctggcgcctcccttaccccagggacggtgtccgcccgtttatatgcaccccctgaacgcgagggtcggagattcgcccacgccccgtgtcggccacgcattcccgtggggcggccgcggggtcggcccaagctgagagtcatggccgctgtccccgaggcgtttaagcgctctctacaaagtctgtaggggaagctgctcccgtcggggtggcagtcacaatctcagcaggcaacgttgaggcccacggaaggaaggggcgaggtgtccatgctcctgccagggactggagcaccgtgagcagcctcccgagtctcgcactctcacttgcaaaaccctgcactgactgcttggttcttgggggagccggtaatcgcggggcgacttcccaaaattctttaaggggtgtgcttagttaccatgtgtaatgagagagcaaggttcagcctcagagagctccagggagagctaatctttttcattcgtttgtggtatatggaactggggagaggctggaacagcaattagaaaccagtcgtacagctgtcgaagccaatgaacgagcacttcttttagcagctgtacctttgtccagtgtcaatgccttttcacacgtaaacatttcacttgctcggcatcttacccagacccctaataagtgctttttaatgaacgattggttttaataaaccgtggtgagccagacatataatgttgaacagaagtcctctcacacccataaccactagagggcagggcttcacctactgagttggtgatcatcctacagagaactcaaaagaaaatttccgtatatgctagatgtgtttttctccatcaacacttagacactttacaaatttgctttttatctcaggtcctgtaacatatcgcagtgtgctctctaaccacacgttcaacatcagaattaacggacggggttgcctgtgtttctatatttgttcccaagtaagtggtactagactaggattgaaaattctggacagctttctagatttacctttcttttaagaaatattgaacttttattcagcgaggtcacttttaaagatgaacccataaaaatcactatcaagtagatttctagtcttaacgagttaactatgatccacctctggcatgcatggtcagtgatttttgtctgcacaatgacggagccaaattaacggacggggttgcctgtgcttctatatttgttcccaagtaagtggtactagactaggatcgaaaattctggacggtttttagatttacctttcttttaagaaatattgaacttttattcagcgaggtcacttttaaagatgaacccataaaaatatcaagtagatttctagtcttaggagttactattta

SEQ ID NO: 315342 - DNA, 4001 bp, Homo sapiens
aggactagttaggacttccagaccacataaggaattctccttacgtggtgcaatgtcacctggtcactgaagtaacacttcctttttttcttcccctctcctctagagatcaaggaaccttattatggagaaaattaatggataaaactacatatatatatctacagcaggcatgatgacataaatatatcaatacattagtctattgtccagtatgggtcgtaagtacgaaatgctaaaatggtaaatccacaagagatagtagtaatcttcattacttggggaaagcaacatctccgaggttatgttttctactaaggagcatcaataagctaggttatgtattttgcacttactataaaaatactttgttaaactgctgctattgtagaattttaactttttattctccttaacaaaataagaccgtttattgtatagaatttggaagacacagaaaaacaaaaataaatcagtcacatccaccaaagatgattccatcttcctcattttccagcagtcttctttaattaccttagttagaaaactacaagatttaactgagcatataatttttcatattaagaaaggtgtaatttaaattttaaaaatcaaatttgtaatattcgtaagaccttcaattgaaaagcagcatggaattttctgagtttgcagtataaataaaagagtttaaccacaaactgaaaaacattcttccctaaagcacattgtttgggatcaaaacattggtaataatacattatggacggaatgggagtacttgggttggacaacacctgtattttcaattggacaacaatttctgtattttcacaaaatactattcatcaaaatctgaagagggcaccgggagttttacaaatggggaaagctaaagagggatacaaatgctacttaacctaaatttaccacaaagccgatcaaggaatagattgggagtgccaattcagtagtattttaggggaaaatgacaaaaagggaaggattgacggcagaaaacatgtgcagacagcaacatctcgacttgattctacctttaagcatatggccaaatcaatttggtttaactatttccaacccaatcagtttcttatttcggtttcagggaaccctactcactcttccctaaaccagcctgggcctcctgcacaccacaacaccacaataccatctttcaacgcctcctcattcaatcgagactgtcgcattactaacacctcctgttttgaagacagtattccttcaactgtcctctctgcagagaagaaaaagtaaaagcccttcttttacttttctagtcccatccgaagcacgtgaacatctacggaaccttccctgcaggtatgtcagataaaatccttagaatcactgagaaagcacattcggagggaagcttcacagtgactctgcagtgagggccgtatcagtgacagtccctcccaagcctgtctcaccggagacgcctctgcctccagggtttttgctacctccccgctcctcagccctgagctgagggtaaggacagtgaggacctttgccaaagaatgggctttaaggaatgggacctaatgtctactgcagaccctgtgaaatggctgaaacaatctgctacccgaagccccaaaggctctgagtagggaaccataatggccgcactcacttccaaccctgggaaaggtggacatctgaatccccaagtagcgggaacgaccacacttgggggagcgggggttaaggagaaatgagctccttgccggtgcagggtgacagcggggaggaagcctcaggcagaaaagtcgccgttcacactctcccttctctccttcctctgcctccttccaccccctctatccccaccactcgccagttaccggtcgccgctcacctgctggggcgcgaggtgcagagactgtaccgaccgaggacccagaggctgtcaccacggaggggaagtcctcagctgcacaggttgggggggggggggggggcgggcccaaccagtcacatgacgtcgagctccgccctgcctcctccatcccagcgctctacatctcggggggcctgaatttttacggatcccttgaatattaattttcttggattaaagaaataaaagataaattttcacaaagagtatgttataaagtacaatgtggaaaatgtggacagcaagagttaaagcgcattgctaaggaagtgacgttcacgccacaatcgagggacaggaaatggcggtggcgttccgtccctctggagtccgccggtaaaattccaggctctgaggtttgggccaatcacgtgatcttaaaacttgaggcgtgctggagggtagccaatctatctggccgattgttaactacgtttgttttaaaacacctaacttaaacttgagctttccacagatttctttacatttagaagaactaactttataaaaccctactaggaggcaacagcgtttgaaggtcactctggagaccacaaactgggaagaacggggctgagaaaaactatcttgcggatatgggacaagagagggaggggtggaaaaatctggattttaccgccagggcctaccgagccagccccacaagcagtgtcgtaagcgggtgggagggaggagcatgaccccagaaggcccagtccaggagaaagatggaggttccggagtggagggggcagggtgcgcggaggcgagcagtgcggctgcgcgtgaggcggcggcgcgccggcgcgcgaggggcggggtgaaaggtcacagcgcggcagcgggtctggctggcggcagcggcgggagggagccgagagacccgagtgcacgtgtggagaagcggcggcacaagcgcggcggcgggagacactcccgcccccaccagactcaagccctcactcgactctcgcggccttcgttgctcgcacagctccctgcccaggctaggaggccggcttgcggggttgagtggcccgagctaagggtgcggagacctaagggcggcgactacgacggcgttgatatcggtggtaacgacggcctcagcaggcggggaagatgaaagggtgaggaagggcagccgggcagggcccggccggtggggtagaagggtccgggcccatgtagagggggagagccgcaaaggcgaggagagattcagggcgaagacgggcggagggagatttctctgcttctcagttccctcggctcccggagggggcggaggcgaggctcgggctgttggcgggctgaagggccagcggaggcaagacccggggggcttcagggtttcggttcggagacgagtgtgggttgttgagtggggagaagcgaccgagtggggcaacatggaaaggctattgtgaagcgcccggggcctccttcccgggagcggaccgctgagccacgccggcccgcagctccaggtggagtggtttggttgtcttccacctccagactcaactctggaactgcggtgtttgacacctttcagtttaattcacgcttgggagctgtgcagaaccttctggaggaagaagaaattggaataaagagcacggggatgagtattaagagctagtgactcaactagatttgggttgggtcacagcgagtggaggagggggagagagcgcgatcactgtagacttggggtgccaacatatttaaggaagtatagggtggatcagtaggtggagctgttgcttcagtagttcactattgcccctgagtgctgaggcggtcctgggtagttctaccacgctgctcctttcaggtgattggcaaagttaatgttcggtctttcaccgtttgcctcttacgtaaaattaggaattattttggatcgactggttaagtttttatgaaatgtctccttaccattaagttgtatagttttaatgtattaattacgtaacatttttccgaagcattgtctcaagccgttttggagcttgtctttaccctcaaagagatgaagctcataaac

SEQ ID NO: 315343 - DNA, 4001 bp, Homo sapiens
aatagcaaaaaaacaataggacaaaatttatctgagggactgaggaagagcagcccataaattagaacactaatatctttttttttcagtagtctaattgccatagtcaattaagaggaaacattttggaagaaaaggccttgaaagcttgaatctgaaacctagctctgttatctgctagctgtgcctttggttcttcaacttctctgtccctttttcttaaacagtggtaacacttgtttcattctatgtcatggatatactatgaaaattgattagcttttttgattcaagtagttgtaatgaaaaagccatgacaattaaaaactattagacaactctctgtgggtcagtttttctattctttctcttggaatagctacaaataaatgaaaggtaacataaactctactgatgaaaccgactatatataatccaagaaccaattatttttattaacaggactcacggaggaagacagaagagggaagagaagtattaaccagttaattctactttaaagcaaagtggcaaaaatatactcagcttcacaatgagcctgaaagatgaaatttgtaaaccaacttcctacaatgatcacttttcttcctcttcttttagagaggtagaggttattttataaactaaacacaaagtatacttgccacagataagtggaaaaaattcacacactcaaaaatagtgatgcagttacgacaagaatggtcccttcatttatccttttattcatatattgagactagattatttggatggccaaccagtggaaatgaacacaactgcgctgcaaaaagaaagagaagtagctatcccattggcttaatgtcagctttgactttgtgtggaaagttttcaaacagtttaagaaattgggaagcagttattccaaatgataatttaactgcggtagcagcacaagcttatttatttcttgttcgcagtagtgtagaattaaaacaaacaaagcaaaacaagctctaccgagtctttaggcctggttcagggaagcctgcctgtgtattgaagaggtgtgagagccatcaacacctctccctccttgtggtaagatactggttttcatgaggtttacagacaacatgcatttgcaaatgaaatattaaattgtctccaaattttggcaacactctgtgcacgctgagattttgtggacccaggggtctatctctccaatttctgactaaaataacggatcgggaactggacgatcaatacgagggaggtcacatcttcagtatgtactatgacttcacttcaaagaaaaaaactgccttttccagcaagtgatgtcacttgcagaaaatgagaagcggtgattttctttcaagggcagtttggggacaaaatgtaaggctaaaaaccaattcctccacgagtgatcacaaagaacagaaactgatgggtcaagtccctcgtctaaggaaaaagattttcgagaagaaaatgagtgtagaaaagtgaccagaaagcgatcagcagggactcttcctccagctgcaggaagcaaactctcgatcggggtgagtggtaaaccagggccggcagacgcctctctcccccacggaccggcttcccgcaggtttgtggcgactgccccatgtgctatcaacgggcactctgagggagaagcgcccaaatcagccacggagcatctccacaagggccgcagcgggggcttaggggatcccagccatagcgcagcaggggaggggagagcacgtgaaacccaagccggaatcagcggaggaggatgcaggacccaggctgggcctagccctacctgcccagctcccgcagggcggggatcatggaagccagctccaggccatgttcccccatgctgaggctgcgaggcactagtcaaccacgccaacgcgggttcccggcgtctccaaagctaccgctgccggaagagcgcggcgcccgacggagccgtgtggaggccaaaactcctcccggaagccgctactggccccgcttgccaggcccagcgtcttttctgcataggacccgggggaagccgggaagccgttagggggcggggcaagcgggcgggcgtgcgtcggtcaagtttcccgggtcgcgtcaggcttctttctcagcaccgagcgagcgacgttcgtgaagctttcgttttgagcggccagactctgctgttctcaagcctgggaggcacagagaagcaagacttccgcatcgggggaggatagggcttgagggccgccagcccagactcgcttcacaaatgtgagaactatgacagtccagcgagtaaaggccaagagtaaactccaggtttccccagagtaacgctctcacattttaaaagttcctcacgttcccaccgctcttgtccctctttctgagagatacaggccaaaaggtgggctctccctgtttttttccttttaagcattttttttcaacttgaagtcactgttaggtttcgttgaggaccctaccaacttttaatatttgaaaatggggttggaatatatttgtgtctcatcaaatcagcaacagtactgtgtgtggaaatgccaccattacgggcatccgcaacctgtgatttaatttttaaagtaaatcaatggattttggcaatacacattttctagctcaactcaatttattggaaagatgaccaccataagagattgttgacatgtcaaagttatgtagttaatcactcaaagtcatgcagtatgtttacatttgttctttggtacatgaggatagttaaccgatacagtatcttaaagaaaaaagtgatggaatgacagccaaatatgctcttgcctcaagaactttgcatttgctgtactctctgccttgaacaccactctgtcattgccctttttccttcaggtgtttgccaaattaacaccaaagagcctcatatagactaacatatatacacattctgtctcaccctcttttttttgttagatacattgtcttactctgttgttcaggttctagtgcaatgaatgttgcaatcatagctcactgcagcctcaatctcccaggctcaagcgatcctctcacctcagcctgggctcaattgatcctcctgcctcagcctcctgagtagctgggactacagacatgccaccacgcctggctaattattttttgtagagacaaggtcttgctatgttgcccaggctggtctcaaactcttggcctcacacgctcctcccacctcagccttccaaagtactagaattagaggtgagagccaccacacccggacatactatattattgtctctctccagttagagtgtaagctcttggagagcaaggtcttgtctattttgttcactctcagatacccaggacctaaaactgtgcctggcacataggtggtgttcagtaaacatttgttgaatgaatcactgaatgttttaggagaaaggacatgggattgggagttacaggccctacacaagttctcattccatctgctagaaactatatgacctcagtaaagttacttaatctcttaatacttccattttttcatttataaaatgggattaataatgtctacctcacaagattacagcaaagattaaataagagggggtaaagtcataaagtggaatataatttcatagttaaaatgaatgaattatactacctataccaacgatgaatcctgaaaactacattgattgaaaaagcaaattcaaaggtatacataatagtgtcatatcatttatatacaatcttaaaaccacaaaacaatgcgttgtgtgagttatgtatacaaatatgtttgataaaagtatgaaaacatgtttggcaaagatagatatcaactccaggatagttgcacctgtggaagggagagaagggaatgaaatgatgaagcttcaatgtatccctaagggttttcttttagtaggatttgaattaattattatttaatcaaaatttaatgttatatttgggtg

SEQ ID NO: 315344 - DNA, 4001 bp, Homo sapiens
agtggaaatgaatgaatgaaaagtatactcaatgtacaaagaaagaacaatgtataaagttcctgtattgtaaagaagcagagagaattcaaagaatgttagtgcagccaggacccagagagtgagaaagggccaaaccaggctgggcctttcaggccatgttaaggattctggtcttcacactagaagaaataagaaattattaaagggctttcattaggggtgttcatggctgggtgcggatggctcatacctgtaatctcagcactttgggagaccaaggcgggtggatcacctgaggtcagcagtttgagaccagcctggccaacatggcgaaaccccgtctctactaaaaatacaaaaattagccaggcatggtggcgggcacaagtaatcccagctacttgggaggctgaggctactcgggaggttgaggcaagagaatctcttgaacctgggaggtagaggctgtggtgagccaagatggcatcactgcacttcagcctgggtgacagagtgagactccgtcaaaaaaaaaaaaaaaaaaaagggtgttcacgtatatctgtgtaagacacagccagatttgagttttgaaaagatcactcagaatgtgatgtgaagcctcacttgtagggagtcaagactggaaatgggaaaccaatttagcagaccattgttcaagagaggactcatggtaacacagatcaggcagctggtagaagcaatgtgaataggatagactccagagaaggattaagaaggtaagcttgacatgctttccaaataaattagatgtagagtcaaggaaaggggaagagtcgctttgtgccactggatggagagtcgtgctagttacttccttgtggaacatctggtcatcattctctgaatgtctgctttgccggcaccatgctagaagtgctggaggaggactgggtttccaggaaatgatcgtgttgagtttaaggtgccttgagacacccaagtacagatgcaaggtgcactcaaaacatttctctttctgggagtcctcaagacttcactcactcctcaactagaatgtaagctccatgaaggacagtttttgtattttgttcattgtaaggtcagctgcagttcctcacgtttgggcacctagcacagtttactggttgtataaaagaataaatttatttcatctcttgcctgtgtctggctcctcccatgctcacactgcccaagggagacagtgggcttcataagatctaaagccgctcaaacttgtcacaagaatgggtccccatgcatgggtagtgatggttctgatggtggtggtaggtgtgttccaaggatctctgcttagaaccaagaaccaagtggcctaaactttagaaaataacgtaaaatgtcaacttagccttctgtgtttcaaatcggctgtttgacctggctaatgcatttccccctaaaatcaaaggaccttctggaagacaaccgctgcttaaatcagggtgttcccatattttaaaaaggcgaaaaggcagtgctggccgcgaggttccgaagccacagccatcaaggggatctggcgcggttgacaactccctccgagcaaaaggccgcgaggagcactcactggacacgtcccgagccgcggccggacattggctcagggcctgtgacgcgagggtgtcaagctcctccaggtcgtcggcagtgaagtccccatgcgcgccgaacgggtcgtcagggtccggggcagcggctgcggagaagccccgggcccgcttgctcggggggtgcccggtgcccggcggcgggccggggcgaggcgccgggggctcgctccgcctcttgctgcctggcgcggaggtccccgccatgctttccgctcaccccaagtatccgacagcgccgagctagacttgcctgccgccaggccggagaactggaccaaccgtccgcgcgccgccgcttgcctccgccgcgagtgccccgcccctggcccaggggccaatcagctggcaggcggagggcgcggaggaatgacgaacgtccgagcgcgccgccacacccggccccgcccggtgtttagaggtccacgggcgggattcggcaggtttgctgcaaggactcagtgcggcgcgacccgttaccggagaggcgggccggaggcgcaccagctccgccgcgctggtggctttgcgctccctccctggcattccgtggaggagggccgcgcaggagcagcctgccctagcattcacgcgtgttgcgtttgagtcgagccaggcatcattcagggatgtggtctccgtgacctcgctttccttctgccgccagacccacctcccacaaacccctaggctttcttgaggagagtggaatttgttgggtgaggagtatgaatagagctgtcgtgtgcagacatcttcgggtttagtgaatgtttcacatgtgtacatttgaggtaggcccagggaggaggaaagtccaaggaggaatgatgtttggagctgttcttgtgtgggagggggtgggagctgctcaggctgttaacatccattcctctgagtgctggactgtttttttttcctaagctctggttgtatagaatagggctcaggaggtcaaggaagtccccctgtaaatggcacctgcgctgtcctacaagttgagtcaagttagcaggatagaggggtaggaggctggcacataagactaacacgagaattctacattgaaagggaggccacacaaaggccaggtaagagttaccggtggcgaacagaggtaaagcttcacaaaggagcagcaatttgaggtgggcttgcgtgcctgacagattttattgggcagctgtggtgtgcagaagttagccgcaatagagaatttggcaatggagagtaacaggagcaagactctttcagccttacctgctcagtgccaaacttcacctgtgagtgtcctaggaatatttgtgaaagcattaaatgaaaagagtaaatgaaaaagagagtgctatcagggcctataatgtctaaggagtttaaaattttttggagcaactggtagtctccgtcagatagcttcccaagtgttgcatgcttaattgctgcaggactctggtcctggaaagagacaggactgttcatttgttaaagagggataggttccaccaagtaacttgctttcaggaacagtgtgaatcactggtgctcaggtttgttttagcagcatacggctgggtgccagctagcaaggccccacagggaatgcctgaagcctactgaagggtgctactggctgtgcaactttctggagaggaccaacacaggcttccccctgccccctctcccgcgttaatatctagtacattaatcatgaaagttttcaatattctaaaacctagttttgatttagcagtctcataatggttccagagcgctcttcgacaatattctcagagaaagctgagcattattaacataattgtattaagggcctgggagggaaatccaaatacttgtgcttctgaattaattttttttttttaaatacagggtcttgttctgtctcccaggctggagtgcagtggtgtgatcttggctcactgcagcctcgaactcctgggctcaagtgatcctcccacctcagcctcccaaatggctgggactacagaagtgcaccaccacacccagctaagcattttaaaacatattcagcacacattatggatggtctctgtctttgcatttattgaggggcaagcggtaggtatgcctgggactccagtcctgggcagcaggaggtagagtgagcccccattttgcctcacccccaaccccttgcctggcactggcaccccctccatccaccagcaagtgggctggggcttcccgcagctgctgccctggacctgtttggtgcgcatggggacttcactgctagcaacttgaaggatcatgtaatttgccctgccctgcctcttccacagtagagaagttccttgacaacag

SEQ ID NO: 315345 - DNA, 4001 bp, Homo sapiens
ttattctttccctatccttcatccaattccaagagtctcatctaaagcctgaggagatctcattggccagaactcaatgatctacttattattcagtaatagttactgaccacatgcaatatgccaggcatgttaggctctacaggtacaatagtgagcaaaattgatacttccttacactcacagagcttaaaagacattcaacaaataatcacacagataaatgtaaaattacaactgtgattaagaactgcagaagagaacaaatataggaaagcctataatatgacagcaatctgacttaagtgggatgattggaacatttccctagggaagacttgaaggagctgagagctgaaggacaagtaggaattaaccagatgagtggaaatgaatgaatgaaaagtatactcaatgtacaaagaaagaacaatgtataaagttcctgtattgtaaagaagcagagagaattcaaagaatgttagtgcagccaggacccagagagtgagaaagggccaaaccaggctgggcctttcaggccatgttaaggattctggtcttcacactagaagaaataagaaattattaaagggctttcattaggggtgttcatggctgggtgcggatggctcatacctgtaatctcagcactttgggagaccaaggcgggtggatcacctgaggtcagcagtttgagaccagcctggccaacatggcgaaaccccgtctctactaaaaatacaaaaattagccaggcatggtggcgggcacaagtaatcccagctacttgggaggctgaggctactcgggaggttgaggcaagagaatctcttgaacctgggaggtagaggctgtggtgagccaagatggcatcactgcacttcagcctgggtgacagagtgagactccgtcaaaaaaaaaaaaaaaaaaaagggtgttcacgtatatctgtgtaagacacagccagatttgagttttgaaaagatcactcagaatgtgatgtgaagcctcacttgtagggagtcaagactggaaatgggaaaccaatttagcagaccattgttcaagagaggactcatggtaacacagatcaggcagctggtagaagcaatgtgaataggatagactccagagaaggattaagaaggtaagcttgacatgctttccaaataaattagatgtagagtcaaggaaaggggaagagtcgctttgtgccactggatggagagtcgtgctagttacttccttgtggaacatctggtcatcattctctgaatgtctgctttgccggcaccatgctagaagtgctggaggaggactgggtttccaggaaatgatcgtgttgagtttaaggtgccttgagacacccaagtacagatgcaaggtgcactcaaaacatttctctttctgggagtcctcaagacttcactcactcctcaactagaatgtaagctccatgaaggacagtttttgtattttgttcattgtaaggtcagctgcagttcctcacgtttgggcacctagcacagtttactggttgtataaaagaataaatttatttcatctcttgcctgtgtctggctcctcccatgctcacactgcccaagggagacagtgggcttcataagatctaaagccgctcaaacttgtcacaagaatgggtccccatgcatgggtagtgatggttctgatggtggtggtaggtgtgttccaaggatctctgcttagaaccaagaaccaagtggcctaaactttagaaaataacgtaaaatgtcaacttagccttctgtgtttcaaatcggctgtttgacctggctaatgcatttccccctaaaatcaaaggaccttctggaagacaaccgctgcttaaatcagggtgttcccatattttaaaaaggcgaaaaggcagtgctggccgcgaggttccgaagccacagccatcaaggggatctggcgcggttgacaactccctccgagcaaaaggccgcgaggagcactcactggacacgtcccgagccgcggccggacattggctcagggcctgtgacgcgagggtgtcaagctcctccaggtcgtcggcagtgaagtccccatgcgcgccgaacgggtcgtcagggtccggggcagcggctgcggagaagccccgggcccgcttgctcggggggtgcccggtgcccggcggcgggccggggcgaggcgccgggggctcgctccgcctcttgctgcctggcgcggaggtccccgccatgctttccgctcaccccaagtatccgacagcgccgagctagacttgcctgccgccaggccggagaactggaccaaccgtccgcgcgccgccgcttgcctccgccgcgagtgccccgcccctggcccaggggccaatcagctggcaggcggagggcgcggaggaatgacgaacgtccgagcgcgccgccacacccggccccgcccggtgtttagaggtccacgggcgggattcggcaggtttgctgcaaggactcagtgcggcgcgacccgttaccggagaggcgggccggaggcgcaccagctccgccgcgctggtggctttgcgctccctccctggcattccgtggaggagggccgcgcaggagcagcctgccctagcattcacgcgtgttgcgtttgagtcgagccaggcatcattcagggatgtggtctccgtgacctcgctttccttctgccgccagacccacctcccacaaacccctaggctttcttgaggagagtggaatttgttgggtgaggagtatgaatagagctgtcgtgtgcagacatcttcgggtttagtgaatgtttcacatgtgtacatttgaggtaggcccagggaggaggaaagtccaaggaggaatgatgtttggagctgttcttgtgtgggagggggtgggagctgctcaggctgttaacatccattcctctgagtgctggactgtttttttttcctaagctctggttgtatagaatagggctcaggaggtcaaggaagtccccctgtaaatggcacctgcgctgtcctacaagttgagtcaagttagcaggatagaggggtaggaggctggcacataagactaacacgagaattctacattgaaagggaggccacacaaaggccaggtaagagttaccggtggcgaacagaggtaaagcttcacaaaggagcagcaatttgaggtgggcttgcgtgcctgacagattttattgggcagctgtggtgtgcagaagttagccgcaatagagaatttggcaatggagagtaacaggagcaagactctttcagccttacctgctcagtgccaaacttcacctgtgagtgtcctaggaatatttgtgaaagcattaaatgaaaagagtaaatgaaaaagagagtgctatcagggcctataatgtctaaggagtttaaaattttttggagcaactggtagtctccgtcagatagcttcccaagtgttgcatgcttaattgctgcaggactctggtcctggaaagagacaggactgttcatttgttaaagagggataggttccaccaagtaacttgctttcaggaacagtgtgaatcactggtgctcaggtttgttttagcagcatacggctgggtgccagctagcaaggccccacagggaatgcctgaagcctactgaagggtgctactggctgtgcaactttctggagaggaccaacacaggcttccccctgccccctctcccgcgttaatatctagtacattaatcatgaaagttttcaatattctaaaacctagttttgatttagcagtctcataatggttccagagcgctcttcgacaatattctcagagaaagctgagcattattaacataattgtattaagggcctgggagggaaatccaaatacttgtgcttctgaattaattttttttttttaaatacagggtcttgttctgtctcccaggctggagtgcagtggtgtgatcttggctcactgcagcctcgaactcctgggct

SEQ ID NO: 315346 - DNA, 4001 bp, Homo sapiens
caggctggacacagtggctcaaacccataatcccagcactttgggaggctgaggcgggaggatcgcttgagcccagcagtttgagaccagcctgggcaacatagtgagatcatgtctctacaaaaataaaaataaaaaacttagccaggcatcatggaacatgccggtagtcccaactagttggtaggctgagatgggaggatcacttgagcccaggagttccaggctgcagtgagccctgatgatcgtgccactgcactccagcctaggcaacagaggaaggtcctgtctcaaaaaaaaataaaataactttcaggaatgtttattttcaggtacagctcaaactttaaagtctttcaaattcctcttggtcttattactccagaaaatttctagcatcatccaacaaaattataggttatcaaattaacttatagaaatgtttgaacagcactccatttatgaataactcagagagtatctcacgaaaatttaagttacagggggcagtgatactttcccatgaaaatattacagattattttaaatcactgacactgtttcaaaatcagtattatgataagattaagaaacacttaaaaaaaacttttcaccacatgacaattactttctttttttttttttttttttttttttttttttgagatggagtctcgctctgtcgcccaggctggagtgcagtggcgggatctgggctcactgcaagctccgcctcccgggttcacgccattctcctgcctcagcctcccaagtagctgggactacaggcgcccgccactacgcccggctaattttttgtatttttttttagtagagacggggtttcaccgttttagccgggatggtctcgatctcttgacctcgtgatcctcccgcctcggcctcccaaagtgctgggattacaggcgtgagccaccgcgcccggccgacaattactttctaaacaataactatccccaccaaaatgcaacttggtattgtgaaccccaatcaattgacaatttcagtttacaatctgtagtacttaagatttaaaacaattcttctcttagagtgccctgtctcctaaaaccaaggaaatgaacagggtctgatgatgcccacctacagccagcgtttaggtcagtattttttcaaagtcggaaacttcataccttaggggagagcaagtcacatctcagaatcttcatgtaaagtaatttttgtctttgtgacaaaagtcaagttcttgagcactaattcttgagagcactgtaatggtattattgaagtcactggtctcacataatatgactaaaattgtacatatttcttgctagaggttaaacacacttcactttaatacatttgcatctgcaacttctcctctttgaaagaactgggggaaaacagggagaatgtacctaaatttagtaaggaaagtgaaacaaccaagtttatcctacacaacttcttcatcccggatatgaagatgcaagatctacttgggggacaggaaaattggaaaacaacggtatggctgaataaaataacaaacctgggttcaaaatgagacacgatcctggtgctaatcgtatctatcccactggaggtcaaatcagctgcactggtgcctgtttcctcatccacctctcaccacctaaacgtgccatttacgagaaagctatcgaagttgaatcaaagtgacttttggaaagagatgccaatataatttgcagtgtgctccaaacaactacacacaaggcaacgtttctcattgagcacccccgcccccactttcaacttccccttaagatagggacagtcacatagacattttttgaaaatcaaagagaaaaataaaagcaccccatcacgatcaccgacgaaatcccgactctgtggtggaattgggtgccgggtgaggacgatggcaacacgctcctggtcgcttcgcgaactcctccgggaggtcgccaagtttctctttcaccctttttcccgcacccgccgagcccaggaaggaagggggcggccgcaggggccggaaccgcgcgacctggaacccggggccttttttgattgccggccgcgccccgcgcaagtgccggcgttcgagacccgccccagcgcgcgtgggcgccaacttcgcggggacccccagcgacgcgcccccctcggtacccctagtcccgcctctcctgggctcagccggatccgggcgtccccgtcaccctccccaccccccagggaaacgagcccacccctagcagcgtcaccctggatggggcggcggggccgcagtcaccttcccggggaagaagccgggaccccgactgcgggcggcccgcagctcccgccgcacccccgcagccctggcggcgtccgggcgagctcacctggcggctggctgcggcctccggggcggcctctgggcgtgggccgggcgggggctgcaaggggggcggcgggagcccgggctgcagccggggccgccgccggccgccaagcctcgccccaactcgcgccggccgcggccgcccccggggagtaccgggagcgcggggagcgcgggtcccgcggcggcggcggcggcggcggcggcgcggcgcggcgcggctcaggcgtcggagcaggcggccgcgggcgccgccgcctcctcctccatggctgtttacccggctgcattgtgggagtttgacctccgccgccgccaaccgccgcctcagcttgcgccgccgccgccgccgccgccgccgcgcacgccatgggagccgtgactgacggtgaggccccgctcgccgccacacgcgcccgctgcacggcccgctgggcctcccctgagacccctggcctcccggcccgcttccgggaacccctcggcctccccggcctcttcgccagagcgcttcggccttcccgacctctccccggagccccgggcctccccggctgcttccctgagtccttcctcctctcgccagagcccgagcgcccctcggagaccctcggctttccccgtccgctctcccggaggcagcgcggggctatagggtgtgccgggagcgtggtcggtgggctgggaacacacgtgggtggccgagacggctagaagcggtgcaagggcgggtgggaccagagggagtccgggtttgtctaggggcgcggtgaggacccaggagccgcgaagggtggacagtggtgccgggcttagggctgggggcctggaaggtttgtggaggtctgggagggagtgggagctccagggacggggcgggaatttcgggactcgtctacaaggggtgtcaggatacagagcgtgacaccaggaggggtcctggggcatattgggaagcactcacagacagtggagtcgatggcaatgaggccttgaactgcgagtggattgtgggtgagaaggaggagcagggaattatttataaaaggaatagatagggatgaggtatccggagggtgatcaggaagtgtacctgggagatttacgggggtaaggaggagccagtatagtgatgagaccgtctagggtagatcaggacgataaaagatgtatgtgtgtgtgttaggaagggtggttgtcagctgggatgaatttagaggggcaaaggctgggtttgtggacagtctaagggagatggtctatggactgagagcggaaataaggtgacactttgggggaaggggcatgattggcaactggagggagaacctacaaggtatctggttagggaggaaggaggtcctttgatatctgggaaggggatatctagggctcttgggtgtttttcaggagatggtgaccggtaactgtaaatgcctgtggagaggccacttcttaagagttgaagaccaccagggtctccacattaaagggcctggccatgggaagaacagtgataggcccaaatttccagactgataaagagtagtggaggtgggaggctactaaagacccaggaacttcatgtggaatttcagctttg

SEQ ID NO: 315347 - DNA, 4001 bp, Homo sapiens
tctgtagttcaagcatcaaacatactcagtctttacacaagtatctctatagtctcaatttggtctaggtcactgttttcccaaatgaaacatatgggctattaccaaaatgctaaaagacaattaaaaaaacaaaacaaaactatgccgttaaccactccaatccaatttttacaaaaacataaaaagagagagaataaaaggaacctggtaaaactcaatttagaggagctgccttgtttttgtttggttgtttctgttttgtcttttaaaatagaaatttctgtgtaggaatcccaacagggagcatcatcttcccacagtccaacaaacaagagcaactctgcaaggtacaacgaaatgacaaaactatctgctgaaaagtgctacactgagccagtcacaatccttattgccattttccactggttttatatcctttttatatcaccttattctgggtgggggagggcagaatacctgaagaccagaacatggaaataagaaaaacctcacattttgaacacagccttacagattccttcattatacattcttttaataaggaatgagtgattaattacccaggaatgccaatgttttcaatgagtctgcaacacacatttattttttctgaagagagaaacagtatctgctccacctgcatgccagggctgtcaactaataaaacatcagaagtgacatgcaaaaacgaaagcagaaacagtgaacctaaaactgtctgacaagagttttcagaaaaatcaattatagagaatcaacagcaatttgattaaaggtttaagatcttttcatatttaaagtcctacaactggggagctcaatttcaacctcaattaaaaccttccggtcaagctcattattacacaaggcatgaaatctgaatcccctgaaaactgaagaactcaattgacacctcacttcccgcatgaagacagaaggtctgagacaggtaaggtaatattgagaccagcctccacacatccacccaagaatcagcttagctctgctggctaccttaataacacaactaaaaaaaatcatcttttctggcagtcagtccataattaaatttttatacactcaatttaagttactgaatgacttcccagggttactgtttgtattttgaagttgttcttcctcttgacgcagtgttctgtttgaaactttgctgtggaattgaagtatctgacaaaacagctttcaaacacattctacaggaaacactgcaaactgcctgtcatgaaacctcacttaccacaagtaagataaaaaacaaacagttaaagcgtgttacaacgttcctccatttttagagagagatgtaaccaatactctctctgttttgagatatgggaactgtttggtgcaaacctcagcattttgttggagttaataacaaactcggctcccgtctgcatctgaactttggccagatcactcaaatgacatttcagaatggcttctgtggacagcttgcagcagctaatccctgtggctgcgattacccacgctgatcccctagctctgcaggctccctccctccactacttgagcagcagaaccctcctggcctgctggcaaggcaagacaaatgccaggaggaaaaaggcctgcataaactcttcccaaatctgcttggttctatgtaaggttagcaaagacctaccccaccgtccacaggctcatccagagctgggccctgagccaagcccagactctgaaaactgcctcagaaaacttacccagtggagctttcagctcctgcgcagaagggctgctttggagaggcgtcttgctaccttccattcacagaatttggttgtgcttcattgcacacttgctactgcaggcttgcatcatgatttgggtctgcccaccaactccaaatatgctccatgtttgggcttatgtaacatttgctactactgtaaaaagcacttgaattacaaaggtcctggcagatcaacagaaaacagggggtggagtctaatttcatctaatatggtcatacaaggcgtcctggctggtgtaaattaatctttctattggaaaggcaacttgtcaaaactggggaagatggaatttataagtttaacctgctaaaatgcaaattacttatattttgtgaattttttttctgaatacctttaaactgacaaagctactaccaggtatattacaaaacttacatgatttatttaaaaacctacattttaagtctcggtagacctaaaggtcttaaagttaaacatttctataaaatacctgcagcatttttccaggttttatttcccctatactatctacagttgctaagcttttcaaaaaaagtttattattcctaagcatacttttccttcctaaatctagtaacaaaatatctgaacccactttctgtgcatatttgtaaaatatgtataatttcatatccacatttgtccagtttgttgttcaatcactagaggactgactaaagctttcatacttttaaatccaagaatttctctcactgagtgcccccttgaaaacagtgtcttcctggcctgtttccctatcatccctatcacactccctctctctggccaatcaacaaatctactgtcaaatgacacagaatggggtgtaatggctcacacctgtaatcccaactacctgggagggtgaggcaagagtccaggagtttgaggctgcagtaagctatgactgtgccaccgcactccagcccaggtgacagagttctaataaaaacaaaacaacaacaaaaaatccccacaagtgacatggaaaaaactgccaagtgatctgagttttatgataataatgacttagatacctgatagttcaaaatgaactcttttaaatgtcaaaagaagcagcaaaagattcttctacagaatcctatcaccccatacagaatatttggcaaaagtcatgaattacatatgtggaaatgatttagcctgaaaggtgcggggaagagttctgagagaggcatgaaaacggcttctattagaccaaattctaaattgactctaaaacagaagaacagtagctgcactgccctattttcacaaggattcagatcccaacccatgtcaacaatactaagacccagggggttttctgaaacccactttttttcccccagattccttacagtaacgttcatacaatccaaaactatggaagcccttagaagacactagaagaacgcaagggaagagccatcagcaagccttagaagcacaggatgaggatacatctcccaaatctttttaaaagctcataagcgaaaataagaattttaagttaattcactgaagcttttcttaagctagaaaaaaaaaattccatggctgtaaaacctgattgccacaggtcttagtattgttcaccctacttcacctgccctccctgcaggggtagccaaggaatctccttaatgccatcaatagcagaaaagaacagggtaggaggatctttctggagctaaatctcacttccctatcactgtacttgtatgacagaacaccagagtccttgctggccttcctagcacaaatgcttgcctttctaatattccctttcgtacacagtgattgtacgaaatacagtggggaaaaatatcgttatgagagtcagccaatccaagacagttctaagaatcaagtcgttctgcaaccctgtaaaaaaccagggtgaattttagcaaatgttcttaaatgctacaaacaaacgtctatatttaagttcacaaataaacaagagaaaaacgaattttaacttatttttaagacctacatcagaaaagggatgaatggtcgtgtatgccaggaaaatattaattttgtacacatacacagaaattgagaacaaagctcagattaaaattttaaacactcacatgtgcccccttaatgccctgaataaaatgtttaagcaaatactgctttgttctgcttgtaaagcattat

SEQ ID NO: 315348 - DNA, 4001 bp, Homo sapiens
acatctcaacagtactaaaacactttttgtgaagttgtttcagattggtaatggtaaaaatattatcttttacgtgttgtctgaaatgctaccatttttgctacagttgcctaaaacctgattgtggcatcacatttgttgcctaagtatgtaagatagttgattccagaggctgaaactcctttcgtcttccttgtttcgattctgttgtttcagtctttaatgactcatcttaaactgcaccttaacttaaaggttatctcattcctttcagaagtaggagaataattttgttgttgttgttgttgcttgttttttaacatggggtcttgctgccgctggggctggtgtgcagcagcatcatcatggctaactgccgcctcaagctcttgagctcaaaccatcctcctgctgcagcctcctgagtagctgggactatacacatgcaccactgtgcttgactaattttttaaattttttttaggccgggcgcagtggctcacgcgtgtaatcccagcactttgggaggccgaggagggcagatcgcgaagtcaggagatcgagaccatcttggctaacacggcgaaaccccgtgtctactaaaaatacaaaaacaaaattagccgggcgtggcggcaggcgcctgtagtcccagctagtcgggaggctgaggcggcagaattgcgtgaacccaggaggcggagcttgcagtgagccgagatggcgccactgcactccagcctgggcgacagagcaagaaaaggtctcaaaaaaaagaaaaaaaaaatttctagagttgggggtgtagctatgttggccagactggtctcaaactccagagctcaagcaatccttccacctcagcctcccaaagtactgggattacaggtgtgagccactgtactcagccctttttgtttttttaaatcaaaattcctccaggaatttcctgcttcatattatgtgaaacttcaccactatcctcccaaaacagtaaatgtacaatggtggacatgcagtgagaaacaacattaatgtgccaggcgttggtggctcatgcctgaaatcccaccactttgggaggtcaaggcgggtggatcacttgaggtcaggggttcgagaccagtctggccaacatagcaaaactccatctctactaaaatacaaaaattagccaggtgtagtggtgcacacctgtagtcccaactactcaggaggctgaggcacaaaaatcacttgaacctaggaggtggaggttgcagtgagccacgatcatgccactacactccagcctgggtaacagagtgagactctgtctcaaaaaaagaaaaaaaaaaagacactccattaatgatggctgctatttttgtaatgatcagagactactcattaccacagagctgtctgtcagcctgggcaaaggcaatgggcccagaaagtgttcctgaagaacgcttgcctgttttacagtcttgctgatgatcttccctgccctaagcagctgggtctacattacatggaaagacaagaaaacaggagctgggggaatggtgctggaaagaaacaagagcacacttttggataacttccagaaaaaagtgggtatagactgggaaagaaggaggattctataactaaagtcttcctgcaattttaacaaatttggaggggatgttatttagtagtttttgtgttgagaaacaaatacctaataatatcatactcctaaactcattgtcattttatttttctaagatcatattcaggattacatttaacatttgagatcttacacagatgccttaaaataaactatcatcctttggtaaaactcaaactctattataactggaagcattatatttattcaactgtgtttgcgatatcagaacagccagttaccttttctttggagggtaggccaaaaatcctgatcaatttaccaatggatcttcatctgctgcaattgtgaaagctcgttcgtcttaattctgttcagatctgcaaaaacagaaaaaaggcaaatggatgaaacagtggatggacaaagctaatcagaaacatacaatctcattggttgccagatattccaaaattatatgtgctttgagatgtcaaactgttaaatttcaagacattttaccaattttactacaaatgtgatttttttttttttttacaatgaacttaattggctatagttacaataaaccaagaacaaatgactattcaatatgtacacagagttagcctcctggggcttaaaatcattgtatataatttgcactaatgagtttccacttaatttttaaaatggcgattcagaaagcctgctcctatgaaacttgtcaaatcacagattttaaaaacacagattgaatgagattattatctggagagctcaagctgtcgttctttatcatttcagcagtttataaaagcaatttttaatacttcaacaggtaacaattcaattaaaccatcttattaaaaagcacaaggaaactatgtgctccattatcttcatagttgtgtgcatatatttcaggtaaaatgtggtaactttttaattaatttgtggaggagcaatgagttaaggagtcaataaattacagattaacaaaccaaagttagaaaataagctggtcttcaaatctcacatgcagcagaagagaaaaagcgacaaatatgggcaatgacacagctatcgggcagatgttgtcaaggtataaagcacaagacaggctgagctcacatgaaaaattcactactcatatacttctctccctataattctcactggctataaagcaagatgtggaggaggtaatagtgctttgctcaacttttatttattttcatgtactctaagatggtaaccaaatattcctatggcctgagatcctaagatacaaataaagcatctctgaaaatcagtggctgaaattatatgccatgttttgaacatttactcataattatctttattaggttttaagttattcccaggtcatactgcttccctctccctttttaaaagtgtcaattttattcactcaaaatgctattcagtaatgcttaaaatcattctcacaatctttataaaccagatgtttctcttcagatttctaattccttcccagtctcctttcttttaaaaaatttctctgatttccattttagtgctccttttctgccttacttccaataaaagctgttttcttgttcaacatgtctgtcctgagccaaaatgcatttctttgaatcctaaatactttatagctgtgcaaaaatcattcaaagctaattacaaattgtcatgatagagacagtcaataaagatgttatgttcatgataagcattcaccaccctgatggtgattccttcagagtagacagaaggtgaaggcagaacaacaccagcatcagattagactctgcacttgatcttatttcactaggtcaagccatttttcaattttccatctggacactgctgctatttctccaaagtatccaaggaagtcatcagattcagaatactatgaaatctccttcaggatagttttggttttaaaagaattcatcacttactagtcacatactgtaaaaatgctttataggaaatccaattcttagagaaaaatgatagttgcagttactaaaaataaacatttaaaaacagaaacttctctacttagaataggggtcaagagcctttctttagtatgggaaaaaacctattacatgcttgtatgttttctctcatttgatcttccaataaccctgtgttcaaaagagctgttactatgatctccattttactactgaagaaacagattgaggaaggtcataatttgctcaagattacctagccaacaagtggtgtgaaactgtaactagaatccgggcctttggtgatatttagttccctttccagtacaccaaactgcctcaatggcaacttaattttgttttgcaaagagaaatagttaaaaaga

SEQ ID NO: 315349 - DNA, 4001 bp, Homo sapiens
ttattttctaacagtgataaggcaactatacttgcactctgaatataagtgccataaaaaagaaaaagattggttctattacttcatggattataaaaaaaacttcagcattttacttaataataatgacaaggttctgcattggtaattaatagtagccaagcgtttatggtataccaagcagtgtgcttcaccttttggagaaactatctcatttgttcttcataagcattcagtaaatctatgtaatacctctgaggttgtaaagaatctcctcagattacaggtggagaaattgagacatgaaaacattagaaagtaggggagccagaaatgaaaatcaggcagctgactccagagccagcataactcttagaaactatgctttggtgccttagagtatgtattacacccatttcagagataaggaaaatgaagaaaaagtttagcctcttacccattgtcaagtaaatggaaaaatcagcattcagatactggtgttctgacctaatccagtgtcatttcccattatgttatgctgtctctttaatattaaaaccttctacttgcgtaagatgtctggcttacaaacaatatcacattaaaatttggaaatatcctgtaaaggatgcactgttctcaatttacagatgatgaaatgatcacaagattgggcaatgagatatggcgtttttagagaaatgaaattctgccttgagatcttgctcaatccaatttgaaattccaatctaaaaaccaaaatgtcttctacacataaggcgcaagggtcaattttaattctggtacgtctgtctttgatcaccttagcaaatttccatcacctcttggagcaactgatggtttgatttgtactagagttttcgtgggtattttatctcgctttcgagtattggggtttcttttgtgtagagggtgtcagcctaccttgcacgtagtagtagttactcaacaaacagccgaaggctggaatgaataccgtatacaggttagacattggagaaacgacgaatacctgttagccctcgatcaagtgcagggggtcgatattcaccactcagatgccccagggagtaccgtcctagccaatgtccctcttttctttccgataatttgtatcggaaagaagcatttagcagtctcaatgaatgaaaaaaaactgaaggcgccccagtaagagtacgaaaagaaaaggagtaattagagaagtgaatgaccaagaagggcctggacagctgggggtgagggtgacaggggaaagggtgtggacagctgggtgtgggggtgactggggaaagggatgcccaggagtgggccgctccctagtcaaaggagggggcgcgggagggagtgagaaaaaaatgacgtgtctttttggaccggcaacagctacggaggttggccgcggcattgcccgcatccctatcctccacccgtccctggcgagtcactcacccagaagccaggctacgtagggccgcccccaaggccgccgagtttcgattccttagtgtttggaaacggaccgaaaacaaaccgggtcgccaggggtcaccacgggcttccggtttcttcgaagacaccgccgcttccacagcgaagggagctgctccgggcacgtcgcggagggagtcccatttcttctgactcggcaggagcccgggacgttctggaaggagggacgagccgaggcaggaggggccgggccgacgcgagagaaggcccgttacccagcaatacgcgcgcgagacccaggcccgccgtcgggaccagcacgggccggagggaggggaagcactccggaaagtgattggaagtgtggatgagctctcagccggaaaaggggctgccgctgtccgcgggctcggcgccagggacgcgcgaggaaaccggaagtcaggcccgagggagctgggagggcgttagcgaagccaggttcggtcgtgggggtggggaagtgcaggagtggcgcgcggcgtactacatgtcccgtgagcctccgcggcgggacggggcggggccgcgggacgccaggaggcggaggcggagtggagttaggtaagagcgttaccagccgtcttgtctgttgggccgaggtcccccttcaggggcgccctctggtgcgtctttttcactcagtgtccttttggggggtccccgggccgtgtggtgcgtgctggctcggctcagtagcgctgttacaggcttacgagctgacgtggctgggaactgggaagtctgttagaagccgttcctctgtagcctctgttttctaaactacttgcaagccctcaggcgatcacttgaggcacaagctcgacgaattgcgtaggggtctgtaattattcacaaacgacaccacgacttctagcacactgctcaatttatggaatgagagacagggagaagatgccagagtactggagttgcgcccggcttccctggagttgccaccaccttggttatttctagatgatagaccgtccctagctgtggagtcacaagtagttgaattaattagtcattgaaggtcgcagccaggtggaacccctgtaactctaaggtattattggttaaataaacaaataaacaaggaacaataattatagaaaatttaacgtcactaaccgccgattagcaatacggacattactcaccacccccttaaagtagtattttgtcatctgtccgcttaactatcagcccaactgtcagcccaataggatggatttcactcaagggtttatatgaaaattcgtttttattgttgttggtttttttattgtcttttttggtttagatttaagtgaaaatttatagctgttaggaacaaagaccacaagttgaagttttatgacatttctaaaaatacttagaaatctgtgttaatgttatcgttgagaaaggaaacgatttgcttcaatttactgggctggagaatggaagagagcagtgtttttaatattttgagcaagtatcagtccttaaatttttttattgcttccatgatgcattttgagaattttcaatttaaaacaaccattaggtgtatgtttttacaagtagagttttgaagaatgctagcaaaattggttgaggcatcacaagttattagaaataaagtggtaacctggtttttaatttgaaggtgtagaaatatttttgaatcttcgttcacaatttaaaataatttaagaattgttgaaaaggcaggggacatcatttttatcttttctttctgagtaagtaaagataaaatgtcataaatcagtattttgaagtttatctggtgagagagtcaatttttgtttcacagtgcacactacacagtgggtttattaacatataatgggtttattaagaaatgtatttgcttaaccaggatgtacaaattttattattttagtcaagtaaaacatcttagtttttctttttgggttgtagaacccctgctagattatgacaaaatataatccgtatagtcattggatttagctgcaaatggtcactttccaccctgtatctgcttcaattaactttctcaaataaaataaattgttagagaaaacttgttacacagttcatatataatcatgtattaaaggtttattatcagggaaagacctctgataagttaattaaaagatacagtcttgataaggacattttataggaaaagagaatggttagataattgttaagctctaagaaagaaaagaatttaggggtcctgaatgataatcttaactgatagccaactagttcagtgagtggttggttttccagagcatcttgattccattgaaatttattggaactttgcttagggatttttttcaggaattttcatattttcccaagagggagttgtgaattacatcatctaaaaagctgtgtccaaggccaagtttgggacagtttcttttcttttaaaccattacattttttgtagctacaaatttaatctgaaattttcaaaacaa

SEQ ID NO: 315350 - DNA, 4001 bp, Homo sapiens
tgggcatttttaaccaattaggataatttataagttaaaagtagatgaacttacctgtggaattccagatgaaattaaagcttaagttttttgttgttttctgtattccatgcttaattaaaacactcagatctgttgtgaactactgaacagaagaacagaaaaaaatatatatgagtcataacattaggaattatgacatctaaaatcaatgttgtatacttagcaagttgtttttggagccatttattacatatcaacacttttttcatttttggaaaagccttgatcctctcttctcgctttcaaatcacctcatgctctaatctgaaattatacttggacactgtttttttgttttttgtttgttttggagatggagtctcactctgttgcccaggctggagtgcaatggcacaatctcggctcactgcaacctctgcctcccgggttcgagcaattctcctgcctcagccccccgaggaactgggatttcaggtgtgtgccaccacacccagctaattttgtatatttagtagagacggggtttcaccacgttggccaagccgatctcgaactcccgacctgaggtgatctgcccgcctcggcctcccaaagtgctggaattactggcgtgagccaccgcgcccggcctggatgctgttttgacaacagtgtttattttcaggtctggagttatccaatggccattcatttgaacgaacattttagtctatgaggggaaaaaagtcatagtctcttatctgttagtaataaacgattctgttctccagactgatacgcgttcagtaatttgtgcttttatcaggcatcgacacatgcatactaagagcacaaattcagcgcccttcttttgcttaagcctcctgggagaagctaaaaaacttgttcccagttgaacactgcaaacccaaattttccttacctctgaaaacagaaaaaaagacatggtttggcaatttcttccttgatagcttttcccacaacgcagccacctcctaaacgcaggcaatctgtgcaaaacgcagaggaaacaaaatcatgaaagccctgcaaatctccctcctaaatccaacattaagaaggcgaacggatactgaattcaaagactacccgtacttgaggatggcatcattccttactgcttggaaaagtgagactccgttgcacctctaggaatctttttaaaacgccctgtatgttccttaacactgcctgtaggaatcctgtagccctagccccgtgggatttccttctctctccgcccgttctccacattccccacttagtttcacattccttcccaatccctccgacatccctgcgccggggcccttccctagcgctccgggaaagcgttcgccgcaggcctgttaggggcccaccaataccgtaacaccgttcccgtcctcttcctcggcaccgctgcaaacgccccgggtcgctacccggatttgacggtggctggagcggcacgggcgacgcaaggcaggtattgcaccctggggcaaggcaaggtggacaaccagcggatgcggcgcggccgcggcctgggcctgggccctccgcgtcgcccactgccccactgggccccttctcccgcgctcaccggaggcgggcagctgctcgtcaccgagacccgagacccacggtgcggcggctcaacctgggccacgctccgctctagaggagtgggcggtgcctcccggcctagctgccggggtctaggcgtttccgaggacggcgcgttccgggaaaggcgggtccggtggctataccctccacccagtggcaggactcaaccgcctcggagaccctgcagggccgcccttctcactcacctcctgtgctcggcgcgcacccagctcggaagcgggaaggtggccggcgttctctccctgcgcacacacgcagcctccccgcatccgcacgcacggccgggcgcgcgcagaccacgcgccagggccgcggccggaagcccctggctgcacgcgcgggcccaggcggcccccagccctgtgagctcgcatggcgcgccctctgggtcctcgcggtcaccttgcattccgagcacggccgtgttatgtatgcctttagttgatgctggccaaaattagacaacttagtggcagacgtcgagctagaatttttgtttgagatcctttttccctggtcgtctttccaaactgcgtgagtgcatggcctcgaggcggccctggagggattttcttgttaaacttcatacagaactaattaggaaagaggaaatcttaggaggagttctttgctgtctcagaagaaatgccagttcttcttccggaatcgatggggaatggaatgggggtaagagagacacgtcaggtttcaatggcctgtgtatggatgggagtcccagggagttgcttttgtacacctgagcatagctgacctaaactcccagatccatctcctcaaactccttttaccaagatgtgcagtattgattgtactggtcctttcctcaaaatcaagtgggtctggatcatgtatttaaccactaccaagctcagccatgagcaccacccctgattgtaacccacacatttgcatcaagactaaacgtggcccaccatttctttttgtttactgactctttggcctgactgcttcttccttatagcctttttctgcaaaattacttaggatagtttgaaggttctctgaaaataataggggtgaatatagagatcaaaatggatatacaacaaaagtaagtttagatagtagcagtgtaagtcaaggacttagttgacactgcataaataatcagatctaaattataataatcagatctaaattatggttgagattgttttcctggttccagccttggcaggtagctgtgtcctttgcagagggtaaagtgattgctgccctgctgcacgcctttatcacagccattcttcaccctacctgggctgacagttcacctcactaagtcaaggaggtccattaataacaaaaccagacaggtttcactgcagatagattaatatgctgaaaaaatagacctcttatttggaagaatgctttagggcattaatactatattttacaaattccgtttcttaaaattttagaaaagttgtatttcaatactcatttttaaaatgttttgaatgtcctttgagtaaccagcaggtatatgtgctcatagctgccaaaacttccctggaatgcaaagcagagccatggacaacagattggggtaagaaattctcctaaatgaagtaagtgagacaaaaaggcccaaaacctttatgagattatttcctttgaagcagtctcctttttctttgtgtagcatttatcagcttgtgattgagtcatctattgctgcagatcgaactctcccaaaatatagttgcttgcaaaaatgtcaatttaatatttctcataattctgaaggttggttatgtggttcctctctggttttgatttggctcactcgtatagatacattcagctgtagcaggggttggccaagttttctgtaaaacaggatcagatagtaaatattttagactttgtctctgtcacatattcttttttatttaatttttataaactattaaaaacccaaagctattcatagctcaagggccatacagaagcaggctatggcctacaggctgtagtttgctgatccctgaactggagaatcagctaagctgaaagtccaaggtggcctcactcatgtgtctgctgttggctccatgtggcctcttatcctgcagtaggctatgtttttggtctgtgggcaacatccagaagagagcaggcagaagctgtaaaatttcttaaggcctagacttgggagtcacacaagatcatatatgccaaattctacaaatcaaagcaaattgtgaggcctctccaaatccaaggggcaggcaaatagtctctgcctcttgatggaaggagctgcagataatgtggcc

SEQ ID NO: 315351 - DNA, 4001 bp, Homo sapiens
agaagagacatcatccatccaaaggggaaagagaaaaagtactcaatggagcattttcttaggcataaagggaattgagtcagaacttgaagttgaatatgacccaccaaattaactttttatagttattgggttttcctgaagaaccatggtattttaataattcaattttttagaaaatatatatattattagagccgggtgaggtggcacacacctgaagtcctcgctactctgcaggcttaggtaggaggatcatttgagcccaggggttccagtccagcctgggaaacataaagtggccttgtctctatttttcaagcaagaaaaaagaaaaaaatatattatccaaaatggcttagtagagcttcactcttgaatttcttcaaatcctctgatgaaagaatcgtactagaatatacaacaaacttcgtggctgcatcaacgatacttaaaaccttgtaaagggcattattatgggcatttttaaccaattaggataatttataagttaaaagtagatgaacttacctgtggaattccagatgaaattaaagcttaagttttttgttgttttctgtattccatgcttaattaaaacactcagatctgttgtgaactactgaacagaagaacagaaaaaaatatatatgagtcataacattaggaattatgacatctaaaatcaatgttgtatacttagcaagttgtttttggagccatttattacatatcaacacttttttcatttttggaaaagccttgatcctctcttctcgctttcaaatcacctcatgctctaatctgaaattatacttggacactgtttttttgttttttgtttgttttggagatggagtctcactctgttgcccaggctggagtgcaatggcacaatctcggctcactgcaacctctgcctcccgggttcgagcaattctcctgcctcagccccccgaggaactgggatttcaggtgtgtgccaccacacccagctaattttgtatatttagtagagacggggtttcaccacgttggccaagccgatctcgaactcccgacctgaggtgatctgcccgcctcggcctcccaaagtgctggaattactggcgtgagccaccgcgcccggcctggatgctgttttgacaacagtgtttattttcaggtctggagttatccaatggccattcatttgaacgaacattttagtctatgaggggaaaaaagtcatagtctcttatctgttagtaataaacgattctgttctccagactgatacgcgttcagtaatttgtgcttttatcaggcatcgacacatgcatactaagagcacaaattcagcgcccttcttttgcttaagcctcctgggagaagctaaaaaacttgttcccagttgaacactgcaaacccaaattttccttacctctgaaaacagaaaaaaagacatggtttggcaatttcttccttgatagcttttcccacaacgcagccacctcctaaacgcaggcaatctgtgcaaaacgcagaggaaacaaaatcatgaaagccctgcaaatctccctcctaaatccaacattaagaaggcgaacggatactgaattcaaagactacccgtacttgaggatggcatcattccttactgcttggaaaagtgagactccgttgcacctctaggaatctttttaaaacgccctgtatgttccttaacactgcctgtaggaatcctgtagccctagccccgtgggatttccttctctctccgcccgttctccacattccccacttagtttcacattccttcccaatccctccgacatccctgcgccggggcccttccctagcgctccgggaaagcgttcgccgcaggcctgttaggggcccaccaataccgtaacaccgttcccgtcctcttcctcggcaccgctgcaaacgccccgggtcgctacccggatttgacggtggctggagcggcacgggcgacgcaaggcaggtattgcaccctggggcaaggcaaggtggacaaccagcggatgcggcgcggccgcggcctgggcctgggccctccgcgtcgcccactgccccactgggccccttctcccgcgctcaccggaggcgggcagctgctcgtcaccgagacccgagacccacggtgcggcggctcaacctgggccacgctccgctctagaggagtgggcggtgcctcccggcctagctgccggggtctaggcgtttccgaggacggcgcgttccgggaaaggcgggtccggtggctataccctccacccagtggcaggactcaaccgcctcggagaccctgcagggccgcccttctcactcacctcctgtgctcggcgcgcacccagctcggaagcgggaaggtggccggcgttctctccctgcgcacacacgcagcctccccgcatccgcacgcacggccgggcgcgcgcagaccacgcgccagggccgcggccggaagcccctggctgcacgcgcgggcccaggcggcccccagccctgtgagctcgcatggcgcgccctctgggtcctcgcggtcaccttgcattccgagcacggccgtgttatgtatgcctttagttgatgctggccaaaattagacaacttagtggcagacgtcgagctagaatttttgtttgagatcctttttccctggtcgtctttccaaactgcgtgagtgcatggcctcgaggcggccctggagggattttcttgttaaacttcatacagaactaattaggaaagaggaaatcttaggaggagttctttgctgtctcagaagaaatgccagttcttcttccggaatcgatggggaatggaatgggggtaagagagacacgtcaggtttcaatggcctgtgtatggatgggagtcccagggagttgcttttgtacacctgagcatagctgacctaaactcccagatccatctcctcaaactccttttaccaagatgtgcagtattgattgtactggtcctttcctcaaaatcaagtgggtctggatcatgtatttaaccactaccaagctcagccatgagcaccacccctgattgtaacccacacatttgcatcaagactaaacgtggcccaccatttctttttgtttactgactctttggcctgactgcttcttccttatagcctttttctgcaaaattacttaggatagtttgaaggttctctgaaaataataggggtgaatatagagatcaaaatggatatacaacaaaagtaagtttagatagtagcagtgtaagtcaaggacttagttgacactgcataaataatcagatctaaattataataatcagatctaaattatggttgagattgttttcctggttccagccttggcaggtagctgtgtcctttgcagagggtaaagtgattgctgccctgctgcacgcctttatcacagccattcttcaccctacctgggctgacagttcacctcactaagtcaaggaggtccattaataacaaaaccagacaggtttcactgcagatagattaatatgctgaaaaaatagacctcttatttggaagaatgctttagggcattaatactatattttacaaattccgtttcttaaaattttagaaaagttgtatttcaatactcatttttaaaatgttttgaatgtcctttgagtaaccagcaggtatatgtgctcatagctgccaaaacttccctggaatgcaaagcagagccatggacaacagattggggtaagaaattctcctaaatgaagtaagtgagacaaaaaggcccaaaacctttatgagattatttcctttgaagcagtctcctttttctttgtgtagcatttatcagcttgtgattgagtcatctattgctgcagatcgaactctcccaaaatatagttgcttgcaaaaatgtcaatttaatatttctcataattctgaaggttggttatgtggttcctctctggttttgatttggctcactcgtatagatacattc

SEQ ID NO: 315352 - DNA, 4001 bp, Homo sapiens
ggtgccaccacttaatacaactaccttcaatcatccttttctgggtcaacttcggcttttcacattcctctcccatcccccacagggaacaggcaaggtttcccaaaataaaggcacagacgcacaaatccaattctgatggatgtactttcatcagataattaccataaatatgagcctcaggccaccatcggccactgtgcggttaccacatcggtgtacctttaacatgatccataacctaagaaaaccaacaccggccaagaatgtacagggtgtagtcaagagtcgagttgaaaactgttacttttacctatatggtatccaagcaagcaattgcctctgtcacatcaggattcaaaatgaaatgaggcagagtcaaaggaaagagtggccacgacctccccgccagggagatctgcggctgcagtctccccgcctgcccacttccctgtccccatttcccccgccagtaactcgccgaaagcgttctcaggttggcggtttcttctttccagcccgacacgggctttcgactcgaattcagccctccagccggaggcgggtggccgcaagcctggggcccccggccggcaaccgaattggtgggcgcggcgttcgcctcgcggctcccgcgcacgggcctgtcccgccaccgaggagccggagctcctcagggacggggacccgcaggccccgggaagccgccccaaccggagctgcccggcccccgagcctacctgccgcacctgggcggcggcccggcctgggtcccagccgctggccacccgcgcgggcaggccggagggaacaaaggcgttccggggaggggacgagcctccttctccgccgcgctttcagagggcgggctgccggggcccgcggtgggagaggcctccccggcttcccgacttcccggcgctgggccgtgcgcggtccgggccagggcggcgggccccgatccggtgtccacgccagccacgcgcccccggcccaagcgcgcgttcccacctgaagtcctggcgccacccgccgggcgagggccggcgtgccctcacctcctcgccactcttctcctccagagacctcgctcggcccggagtgggcagactcggagcctcccgcgccggagaccgcgagccgctcggccgaggaggcgcggcggggcgggggcggggcggaggggccggcccgcagcccccaatgccgggagcccgcgctggagacccagggagcccagctcggggccgcggcacggagaacgaaccatccgtggcctggagacgtatcccgccgagcggccagaactttccccatttagcgatccggaaaggaagccaacactcccacccagagaggcctcggccgcggaaagatgcggccgcggcacagccgtgttttcaccacgtaactgaccacagactaactccgcgcggaaccaccggcccagggcgctccgccaagaggcggactgtgctggcctcgcgggccctacgcccagggaacgccgcggttcctcccacacgggacaccggttccgcagcgccgcggattaggatggtcttttactttccgagcgggagctctaacgcaggctcaggcgggtcttgttaaaaggtttctggtcacaccacttatgcgtggagctctgggggcctcagtaacaaagtaaggaaacttacagcaaactagggctgcactgccgctgtccgtttctaaaatacgagaagagggggaaaccccgccccaggccagcttcccagtgactttacctccaagtccagcttcatttcaagggcagtttagagcgaaactcacgaagttcaagcccagctctttaaatgtccaaatcggaggtcggctttccttcccgcatcggagctaaagtcgctggtctcaagaacaaaacttgcgggctttaaatcttgggcgaggactggacgggcagcgctggactgggctcgcttccccggcgggatgcgggctgtatgcgggcgggatgggggcgggcccgggcgggggcgcgaggctcccagccgcgcgccccgcactctcggcgtcacggcccgagcccggccccgcccgccagccgccaccctcccggcgcgtaggtgaaggtgatgggccccgccccagtttgttcttgtctgtagatgagaattccaggaagtgtttccctgccgctcgtcagttaattgcgatcacttactcaaatggccaactggaagccagagtgcacatgaatgtcctctttgagctattttcctcctttagaatacttcatgcaggtaaccagacaatatcgagagatgcggacttctactcaacgagagagattataaatgaatcctggatgcgcttgatttcttgtttcccgcatgttgttagacctctccctaaagccacaaaacatttaacggagataatattttgagcgattctgttattgtacatatttcagaacatgacagaaaagcaaaagattaacccaaatactttagtaaaataaaagctttgagtttgtcgtaaaaggaacaagacaggtaatgagttaaatgtatgattgtcgaatcagggtttaaaacagtggggccagcagacacggtggctcacacctgtaatcccatcactttgggaggctgagccgcaggaggattgcttgatcccaggagttagagaccagcgtggccaacatagcaagaccccatctctaaaagaaaaaacacacacacaaaatgaaaactgttgttcattcaaactagatttttaggaagtttttaaattgctttccttaagctggtcagcatcttttaaatcatgcagttcttttcatatgctgcctacacagggcatggctcagcatctcccagactgtggcactgcatgttcatcagaccacagacagaaatatttacatgtgtgatttgcaaaggagtcattgacagtgacccacaaataagctgattcattgttaatacagcactaatgacataccttctctaataaaatgctgactgaaatcccacatgcatttcccccagccatcacatgtgtatgttgtatatctgtgcaaatattcaattacaattatattcctttcagatcatttggagctaggtccatgtgtcagtatacatatgttccacatacatgagcacatagaactgtacccacgagaaatacaaactgaccaaaacagtggtagacacacatacaaatcacatattcacatcatactagatacagataaacacaccagatagataaatggtttcaaaagtatgtctggagattggaaatacgatgcaagttttttggtggtaggagggagagatgagagggtgtgaaggagagataggcaaggtcaagtagtccagaatgcccactctgggatccacacaagctcagatcacacatgcgagaggacaggcaagtcccctttgcttgttagggaagatttcctagagcagcctggcttcctgtcccacccagagagaggggaagagaatgacagatttgatggtattgatggtgctatgctcagttacttttatcaagagggagtgcatgaagatattgagatgtgttagaaataaacttaggtaataataatgatgctgacttggccagcatgaagaaggaggaccgtgttggcatgctttccttatccaagtagcagctggtaagcagagagccctgtgattagatctatacatgactttggaatgaccaaaatctgcatgttagactcggcagggatagataaggcacagaaagagcagaggagtagcagatttaggagagatgatcagagagtaaggcacatgcatcattagtagtggggaggggagactaaaccctgagtacaagagaacctgggagatggtgggagcaacaggggcccaaggaagaggcctgtgttactaaaatcatgaaaggagaagcaggtctgataaccgagtggcttaacacagctgaagtgtagcagcagtatcaggctt

SEQ ID NO: 315353 - DNA, 4001 bp, Homo sapiens
tctcaaagaaaaacttcagaggctgttagtaatcttcagtgccagagaacactgtggtctgtgtttgaaatgcctattcccaggctccagccccagagatttttatttcaaaggcctgaagtggagtcaagaaattgatatttttgcctgggcccatggtacacatctgtaatcccagcactttgggaggcaaatggatcacttggggtcaggagttccagaccagcctggacaacatggtgaaaccccatcactactaaaaatacaaaaattagccgggagtagtggcctgggcctgtagtcccagctactcgggaggctgaggtaggagaattgcttgaacctgagaggtgtaggttgcagtgagccaagattgtgccactgcactccagcctgggccacagagccagattccatctcaaaaaaaaaaaaaaaaattatatttttatcgagaacctaggtaactctgagtcacacagccaggttttagaaaccactgttcactgatggcttaaaacaaagaatagaaaaccatcactgatttgctttggatgtttccactgaataaaagatcttcaaagagaaggttagttcccaaaacatttgcatgcatctctggaaaaggcaggcattactattagctcggcttaaagtagatactaaatacttattatattaagtggcatataaactacaaccacagagctgattttattgccctctctatccacttccccttagattatgtagtcaaacagttcaatccaggtcagtactttttcacaacgtatgttttcaatctgatcaaagctataggtagacgaaagttattgcaatttcatggggtttacaatttccataaagaacaaacctgctctagaagacaaaattccaaaaacttctgaactatatccaatcaagcattatctcctctcccaagagagaccttccagcactccccgcctgggtctcgggaatagccctcccttctgaatcccagtttctcaatccggaccctgaatcctattcatcctgatctctccttgattttcttgcatcttaaaggtgttattttcctttctttaaaaatttaaaaaaaaaaaaaaaagccacaactcgcctccacgctcagattaccattttctttttcctccttttcatcaccaaacggctgaggaggtctaccagtaccctcaccaccgccacgtccccatccctcacccactctggaacactttgcaacagtgtgcacacccacccactgttgataactactctcctaaggctaccaacccataggcctctcctcgatgcagagtcctttggactttgtctgttttttttcaaaccaagaattaacagcccttatctaatggaagacagaacatcaagggatacagatcaacaaacactggatggctgtctccgaagtcttttataatccaggtgaccaacccctttggagaaaggtcaaaggtcgccggcccctcgcaggactggggctggtgtcagctgatcagtttccccgttgaaacgctggagaaggagggtttccaggaagaaggggctttttcaggttgatgcacccggcggagaagtgctgggggcgaccccggaatcgtgacctggggtatgaatgagccctggattttttcctacccggcagcacctcgtctggctcccccggcccgcagcagaggcggcgccgcgcggaacgccagcacctgagccggtgcctcccgccaggctcggcctccgtaggcccccggcccggcccaccgctccggctgaggcgggactgccccacggacgccgccacgtcatccccacgcccgccccgctacagccctgggactgaccccggccgtcgcccggctaccctcgcacggcgcccgtgtccagggaactgcatttcccgggcgccggcggagccagcgtactcaccccggaggcggccgcggcgagctagcactgcccgcggagaggggagaacgcggaaagcagctcggggaccgccccagccgcccgggaggcggctcttgagtacgagctccgcctcccgccttggccggagaggctggtccgcccggctctgcacgcgcctggcgctccacccccgccaaatcgaccacaccgggcgctggaaggagcaccgggagggaaacggagggttgacgcctcggcctctgggtggctttaaaaccctgtgccaatagtagactgggtgctgagcgcttcccaaattccatccccttaaatactcacaaagcagtaggaaagagatagggacccttccattttacagagtgggaaactgagactttagagaggctaataaacttaatcaccctgcgagatttcagccctctcaactgcaaaaatgataataataataataatatttttcccatgttgcaggtctgagaatattaaatgatttttttaaatccgtatttcttcaaagatattattacagaaagcaaagacaattatatttacactaaagatttgagtgaaaaattatggtaggctctgtttaggcagtcaggatagctagattctctaatgcagtctcccactgcactcacgggaaagtagtagattctccaagaaccacacatccactccacccaaaaaggaacaaaccatagctagagccagtgctgggctcattaagcttcatagcaggaaatctgaggctatactgaggccgcataggcccaatgtaggcccttggaagctggaaaagagggccacctagtggcagttgaggataggtcagtgaaataggtcaacactgctcctgaacaaggtccagtgtgaaacttatttttttgtgttccctttgtaacatgctgtaagggtgtataaccacatttagtgaaaaaggacattactggatttcatccagtggcgttatacaatcagttacttatacccacatagtccccaggtcttgagcatatgatgcctggaagcataatatataccttttgcaagaatcactcagcttttcccctccccctccccctctctgtctccctccccatctccctcccccctttgcacggtcctcgtctcccctttgcatggtctccctctgatgccgagccgaggctggactgtactgccgccatctcggctcacggcagcctccctgcctgattcccctgcctcagcctgccgagtgcctgggattgcaggcgcgcaccgccacacctgactggttttcgtattttttggtggagacggggtttcgccgagttggccgggctggtctccagctcctgaccgcgagtggtctgccagcctcggcctcccgaggtgccgggattgcagacggagtctcgctcactcagtgctcaatgttgcccaggctggagtgcagtggcttgatctcggatcgctacaacctccacctcccagccgcctgccttggcctcccaaagtgccgagattgcagcctctgccctgctgccacgccgtataggaagtgaggagcgtctctgcctggccgcccatcatctgggatgtggggagcccctctgcccagccgcccagtctggaaagtgaggagcgcttcttcccggccgccaccccgtctaggaagtgaggagcgtctctgcctggccgcccatcatctgggatgtggggagcgcctctgccccaccaccccgtctgagaggtgaagaatgcctctgcccggcggcgacccgtctaggaactgaggagtgtctctgccccgccgccaccccgtctgggaggtgaggagcgtctctgactggccgccctgtctgagaagtgaggagcccctccgccgggcagctgcctggtccgggaggtggggggcagccgcccagccagccgccccgcccgggaggtgggggggcagcccccgcctggccagccgccccgcccggcaagtggggggcagcccccgcccggccagccgccccgtccgggaggtggggggcgcctctgcccagccgccgccccgtctg

SEQ ID NO: 315354 - DNA, 4001 bp, Homo sapiens
acagcacccctcactgcaagccccaagcccatatacatcaagaatggggatccagagcaggtcagtcatatctggacaactccccttctcagctcctttcatctttgcctaatgtttattcatttaacaagcacctaccaaatacccactggatatctgaggacacagagagtggactcagacaccctcctactctaaagctgttccctttaatgaattaagagttcagttcgttctgccagaggatttctgtagctaccacccctagaatctgcctatctcctcctcctgtcttcctccatttccacttcccaagcaaaaacatggcagcatcccaccctccaaacaaagcacagagtccagcagacctggtgggcaaagaacatgttattcacaatatcatcatcaatcacggacgtatcatccaccaaggtagagacctttcgccgggaccggcgctcttcgatccatttgaacaggaagataaatccatatacagggctgggggaagtaaggggcagagccagatcagccaaaggggagaagacaatcagcattcccttctttctcccattaatcctttgcactgcgtcatcactcaggtgtccttgctgtgatcccccctctcccctggcttcttcccaacactgtgtctgaagtggccttgtgccctcacacaccaaaggcctgccacaggcagagcaaagcataagcctctgactgtgatgctccaggagtccacccagtctccttatgaagtctatagttctgggtaagagaagaaaagctggaactgagggccaaggatgggacagggtaggaacacaaagtaagacaagaacaaaaactctgatgaggaactgaggcactccttctcacttgtgggccccaatgcagtcaggaaagcaaatgaacacccacaccagtctcttttgttccaggaaattaaagtagacttcttggttcagtcacggttgctactgttgctactctcttacacatctattctgcaggaccactgggaaaagactctaagtgtgggcacccaggaggggccttgtcaccccaaccaatcaatacaggatgactttgtgtcaggattaaagccaaggacacatgggcacactaaaattaatacattacacaactgcacaaaagacattgtgtgaccggggtcttcccgctgcaaggccaggaaagcagctgaaccaaaggatgcttaggggtggggagggggctgctacaaaaagggaagcgctaaggaaagtttgggagaaaagaaagtatcagtttgatcaggagcgggcactcagagagcaaggctgctgctttctgtgagattttacaacgtagggttcctggcactgtcttccctaaggggccctgttctctgggaccttccccagcactctgggtgtaaggggcagccctggtgtacagccactcacccctgacatttgctctgaaggtcgtagatctcctccacttgcacccccttgacacctgcgatgaggaaaggaaagcagtagggaaggacagcccctgatgagtgagggcgcaggggtgggccgccacagccccggtccggcagggagaaaaggctcttaccgaaatcttccacgagcagggtgaagaggcctgggtggggcgacaagaggagggggtgatggtcaggcaggcgcgtcccgggcccatccggcctccccagcccctggccctcccggtcccctcctcacctgggtcgctctccagctccagccagcccttattcatcttcccgcggggcggcccctcagcgccatgtccaggccctccctccccaccgctgcccccaccgggagcccccaccgcccccggggcccctcagtcccacacacagacaacgggcccagtcgcgtcacccgcccgcgccggcggcagacgtcaccaaggcgcgacggccctgctccgcctctgggctcgtcttccgcctgtcggacagcagatgcgggcatgcgctcgaaggcgaacgcgcacgcgcggagggacgggggcgaaggggagggacgggggcgaaggggaggggcggggcgggacgggacgggggcgaaggggaggggcggggcgggacgggggcgaaggggagggtcgggacgaggcgggcgaagggaagagggggtccgggcgatgctgagcgctgaggctcgagaggaggggcgggacgggcagtactaggcccgggtgctgcgaggggaggggcggagcgggcgaggggaaaaggcggggccgggaagtgctgggcgcaggtggggcgagaggaggggcggggcaggctaggggaaaaggcggggatgggcggggctgggcgcggatggtgggagaggagggacggggcggggcggcgaacggaaggggcgggggcgggtgttgggcgctgaggcgcgagaggaggggatgggcggggcgcgcggccgttagcgcgcggccgttagcggtcggtttctactaacggtaggcgtcgccgcgattcccgaaggtcatagtccgcgtgacccacccccgtttgcgcgctcgcagtcttcgccggcgcagtcaccgcgcagggcggccgcccggaggtagctaccacggcctgtgtcaacgactaaagctccagtacagcggcgccctcagacagctgggagggtggctctggccgggagcggcggccggtgagctaccgcgaggaggagcggcggaggcgacctcggcccggccctgcactggccgcccggcaggcgcgacatgagcctggtctggcatccgcgggatgctccttaagccccttctccggctgttaacctccggggaacggttgtgaccacaccgacacgtattttacagataaatcattcttgcggcggcgggtcgaacacgtttatttattttttattttctcaacaagcttttacccagcacctgtccagtgaaacaacttgataatcgtttcgaggggcgtccgccgggttaggaagccactgcctggcagcttgtggaagcctcatttgcaaagccacccctcagatgttttgaagatcgtgacgtcttgtaactagcagtgtgtgcacagaatcctactcaaggaacgtcttggcccagcgatgcaaagaactgaagtttcaaggttttatgtctattgctggatggtcggggtagccccagtaactgggaactgctccgcagtccgctcacgtggacccctgtgggaatagcaaggtcaggacatgcccttctctctcctcttccagcctgtccagtgttttccttaaggaagaagccatcagatgtcattgcttctgcaactcctgggttagaggaggagacagaacaagcacaaagaaggggagggcagggtggctttggtttcttgaacagtaatttcctcagtcgtccttattcatgcagaatagtttaaagtccctgaagatattcccgatctccagccgtgatcggaggccatggatactggagtgtctctggagtgacctgattcacccagccctccttctaagaaatgctgtccttctcctctcccctgactagacagtccttgcttcacagcggtggattttctttcgttcccgttcactttcagggatctccccgttaaccagtgaaactgtacatttgttttacagtttgtttactaatgaaaacaggtaacagccggagttggctgacattggaaataggagacaaggtaccttctgcacttttggctattgtactcggctcagatggagacaaaggttgggtacagaccatatctcagtggccacctgagcctaggtgaaaagaattgataggagaggtcaggcctggtggctcacgcctgtaatcccagcactttgggaggctgaggcgggaggatcactggagcccaggagttgaagaccagtctgggcaacatggcaaaaccctgtctctacaaaaaattagctggtgcggtggcatggcacctgtggtcccagctacttgggagg

SEQ ID NO: 315355 - DNA, 4001 bp, Homo sapiens
gagaactggacgtgtcattagcaggacaggcaatggtttcaaagccccaggccaatgaccattagcagaggcagagctcgctccgtccccatcccccacaacctccacccaccttccccttcgcccccccccccacctccaccccacctcgcgaaacttttcaacaagatccacctggactaatttgtccacagacagttaaaatattgactagaccctacacactgggaaggaaggggaatgcacgctttattttccttcctacagaaaggaaagcaaaaaatagcttctctctctgtctctccctctccccccccccccctctgtcgtacatgttgtgtcttagctttttgcatcgtttcgttttaccttcctcatttagcagaaatgatcgcggctatttcacacataaacgtgttccagattctgggattcagggtccttgtaaattacaggactcgggttcggtctcagttatgttaagtttcatacaataccaaaaaataaataaaatatgataataaatttcagagggtgagtgagcgagacgaggtggaggaggaaaagaaacctcgagtctgatttctgtaatttactagcgacccggatcgcagcaaataacagtgtaacacgagtgtggcttaagagggctagggagctctttctagaggcatcgaccccatccccggataaaggatctgcaagttttctgtcatcgcgaccaggcaaagccgtaacttaccttcagaaataagactttaaacggccaaggccttcctcctcccctccaccaccaccctcagcctcgctctctccaccttaaacttattgacacaacataatcccacattcaagcaaaatcctgacacagcctccctcctcctcttccccctcctctcttccctcccgttctctctctccctctctctctgtctccctctctccccccccttccctccctcttctctctccccttctccctcgccctcttccccctctccccctattcttcctccaggctactctggcactaaaacagcactttctctactcgccgcgcatttgggtaggggtggggggtgagagggcactgatctgcggggccggaacacccaaatcccaactctccagatgaacgagcaactgggctgctgttcccggtcaccaacgcagacgaaacgttcaataaatccaccgaaggctggctcctcgtaccttcctccactgcccctgctccccaggccccacctccccggcagccgagaccaggcagggctccacgtactttcgccgagatgaagtttggggctccccgggcggccacgagccgcccgccggcgtgagggctctgttgttgttttcctggggccgctccagcccgcgccccggcgcccgtgcccctctcaggcggcgctgcctgtgtgccgagaggtgctggttgcaaacgcagcctggcaccggctggcctactactccccagcccggcccccagcctcccgctcgcagggcactgcctcagcgccccccgccccccggccccagccggcgcggccgccgcgaccctcgcccccgacctctcccgacccaaagttttggcggagggggaaagtgcccagggagcgggccggctggcggcggctccggacgcgcggggttccctccgtcttcctcaagtccaccctaccggctgccgccgccgccgccgccgccgccgccgctgctcctgccgcggagtccttggggctgcagcccggcggctcgcaagtgagtaggaaaacagaaagtgaggggagtgcgcccagggagggctggggatggggggcgcctacctcgcgggctcgccgggcgtgagggcgtgtgtgtagctagccctcagcggccagtcagggtttctctatgggaaagtggagagaagctcgcggagccgctctgcctccgcttcactgtacactgctccacatacagtacatgcaacccggagagactgaaaacactcattttatataaggcagcctgccattggcccgcgcagtgacggacaggccgcgcagccaaacaagaggcccgttacacccaaacacacgcacacatacacacattttacagagacacacaaagatcatcacattttctattttctaatgttcgggacctgtagacagtaggagaggacaggtaaagaggcccagcagagtggggtaaaggggaaaacccctgtctgcaccaagttgcaaggcttgaaactggtgtccttttgacttgggagggttatggtaataaactacaactccactggatatggaagtgaggggggtttttcatcgctgccttttggtgccccatggaagaggcctgcattgtgttacgattttacagcctgacccggctaacaagtggccaagaaaggcttttatcaccttggatttcttttgtcaatgggttagctatcacataggccaaaatagtgcaagataagtttatcaggactctaatgcattgaggttgttagtgcctcattcgtaggtagattcaaaaaaatcaatataacaacacacaaagataaacattttgctgaaatagccaaacaacttttaactggtcagtggactgccatcacctgtgtggacatgcaaactgtgctgttaggtaaaataagtcatggaagattggctattgacccttagccttcaaaacagacctttgattcaatatatacatgatttatattttgcatattatatataaaaatatatgactctttacatatttcacatctcatgtgaacatcatatgttgcatgacttttggagatgatgaacctcaggactggtctttctgattgtttttcaacaatgcaacttcagaagattatatgagacagttcaatacacataagtcaacaggttggtggaaagaagtcaaagctggaaattagaaggaataaattgtagattaaactctttaaccagctgagcaatcttgagcaagttacttaacctctccaatgctcagacttggttttgatttttaagattaaaataagaagcttttccagattccctcaattaaatgtttattcagcatctactatgtgtcaggcattatcttaggcctagatgttttcttagggttccttccgttttaagagttggtgaattattctcaaatacaaacattttggagattacataaacactacgattttatggcctaggtaagtagctttaaaacttaaagaaaacccaactagggcaacttatttcagttccccttttatttccttgatgctgtcttaaggtttttctctcgcatccataaagttgttaaaagagtgtatgtgtgcatgtgagcactcctgtgtaagagggagaaagagaaacaaaatcagaaaagtttaaaaagttcagaaaacaaagtggtatttagaaatgtgatgtttatttttttagaaaaatcatttttaaaaggaaaagtatataaaaaatcacagcattttattttattttatttttgagatggagtctaaccctgtagcccaggctggagttcaatggcgtgatctcagctcactgcaacctccgcctcccgggttcaagagattctcccacctcagcctcccgagtaagctgggactacaggcacctgccatcatgcctggctaatttttgtatttttgtagagacagagtttcaccatgttagtcaggctggtctcgaactcctgacctcaggtggtccacctgcctcggcctcccaaagtgttgagattacaggcatgagccacagcgcccagccaatcacagcattttaaacagataatatcaaagtttgtattaggggtgggcgcggtggctcacatctgtaatcccagcactttgtgagatggaggcgggtggatgacctgaggtcaggagttcgagaccagcctgtccaacacggtgaaacccccgtctctactaaaaatacaaaaattagctgaacgtagtggtggcacctgtaatc

SEQ ID NO: 315356 - DNA, 4001 bp, Homo sapiens
tatttctacttggaaataaaccctcttaaaatggtagagaaagagccatctagataatattaatatgatctagaacaagctctcttaaatgtatttgaagaaattggaacaacgacgtctttatatcaaacttaaaaagcttgttttgttgcagactaagtgaagtggggaattgaggaagtctgattataaatagactacatcactgtctttcagggattcttcagctatgctttaggcatgtatacatatagaagacactacattagatataagaaacttaagatgttttatctgtcctcaattaggaagaacatttgcaaacttcattgtgtgaataatttgaacatttattagagagatttcttgagtcttctctgaaaattaaatctcctcttaggttgctatctattcaattacaattctcttaacatctgggaccgtctaattttggtaagaatgagcagatgctggcaagaaaccatcgaaatgaagataatattcaatgtaaatatatattatacttatcaagaaatgactcgaagaaggaaccaaatttatagataagatgtgacttgtttagctattagtagcttatgttttataaaaatgaaatatggaatacatcccaaacatatttttacaattaaaaaactaggacaatacaaacaaacaacaacaacaaaaaattaggagaacaaaacagaactttgataacccaattagaaatttatttggcatccaaaagactactttattttatatccagagaaaattctgaagatttttattcaaatgttaaagtcacactttaaaagctcacgcttatccttaaacaaagtaactacttatataagtaaactgtcattgtatttattgtaactatgagatagtttatattaaggaaggcattacacagactagtgacaggagctcctaattgagtttattatcatgaaatatattcataaaaatgtagaagacatactcataaaataaaaatatataataaatagaaatcataaacaatgaaatcacatttcagtttacttttagtcattcatagattttataatccttaatatttaattccctggttaaagtggaactgatgttatcaaaataatagttttacaagattataggatgagcagaaagtacatttgcttactatttctataatagtaaaataatagcaaatgtaaaatattttgctacaatttaaacaaacatataaaaagtgaacacaaagggcaaaggggacacgctcataaatcactgtaaatcaaattagaaaacaggttttgtttttatttacataaaataaacagacctctcatttgccagttgttactgttaaagttttaggtgacaaaatgttgattgagaaaagtattttgttcaggaaaaagtaagttaactactaactttatcccatttaaaaagaaaaaaaaaggaagactaatcaaagattacttttacagagagattcaataaacaatgcatttaagggtaagccagtatgaaatgttttttcttaggaaactcactaagaatatatatcacagtgattccacacgtgctatggtcctttatacagagttgaataaattcattattttctcagcagttaaataaacaaagtctgcgttccctgaataataggaagatttgatgcatgtgcctgctggctcacttcctctgtcccatttgcaagcttcagtaactgttccccacagagcaccaaagggacacaacaaacacatgaagagatcactctcatcccacagaatgagctttacagtaacttggatctctacacgaaggtgtaaattcagagcaacttacccgattctctgcaacaaagatggcaaagtttgcaaggagtgaaaatcatgtaatacttcggggaaatgcaggatgcagctgctgctccagcctgtaaattggactgcactgacattcagtgttactgaatgtaacaatcaactgttactgacaaagctcgcgagagttggcagcagcaacttgaaatctgttcagaggctaatggtataaatgcaatagtgattcatttacagaagtattacaggattcatgctttacaattgcaggtagtcttctaagaatgaagaaaaaaagcatagaagattctttaactaaaataatctgaaatgtaacagaaaatgcatgtttcttttaactctaaactttaaaaaaattttcctttttttaagaatatacatatttcctatgcttgtcttaagatttaaagacgtatacatcattctaaagtagtgctattattgaaatccattatagcttcaatctgtgctaattatatagttagagaagatagtaatatagaaaataagaaacacaatgctctagatataagctatgcaaatcaaaaacttagttctattaactgaatggatgtctctgatatgtatctcctttcaacccccacacttcaacacttatttaagtcatacaaatttcagcattggtaatttcctattcagaagaccctgcaggcagtcatacatgatgagaagccacaattttctggtcaagacaggaaaaataaaatgaataaccttcaccaaactctataaaagagacacatttgtcaacttgcagtgcacatgctctggagaatatatttatgtctttggcgcttatctttcttgaaatgatgttcaggaaaataattttttaaaaaacctttgataaactccttaatccctatcttctcaatgcaatatattcttaatcttctgtaagtgatagctttcacttttgaatctcttacttgtgggctttctatggactaaacagaaggcatgtattaatatttgcaggtgagcacttttttgccttttaatagagtgttaaattttcaaacaagcaaatataattagcatttgttgtaattctaccttatgccagtcattataattgacaatttatattaaatattttatattatttcagcaaatatgagagttaatattattaaccacctcatcagatgagaaagctaaggtttctacaaatcagaagcttactatatttcttaccactagtagctgttggaaaacagaattttaatctgtattattctgttattttatgtcaactgcttccaagagaataaccattttggtcttttaaaattatcttttctgtgaaaattgctacttaggcagtgttaattcaatgataaatatcatgatcacaataatttataatgtatttagaatatagtttatgtaataacaagttagttacacaaaaggtacagaatacataatctatctgaaaaggagaaaaaggaggtggagcacagtggttcatgactgtaatcccaacattttaggaggcctaagtgggcggattgcttcagtctgggagttcaagacaagtctggacaacatagcaaaactcaatttctgcaagaaaatgggtcagacatggtggtgcaagcctacattcccagttacttgggaggtagctgaggtaagagtatcacctgagcctaggaggtcgaggctgcaagccacgattgtgccactgcacttcatcgtgggtgacagagtgagatcctgtctcaaaaaaaaattaatcaataaatcaataaaagcaggaaaaggctttttaaatggaagtatattgacaaatttgcaatggtttttatagtgatggcatttctgtttaaaatatagtaaatctgatgttccacatgagagttcatgggttcaatatacatgatttttaaaaatccaaatgtcaaaattcttctctccaacccaagtccactgcattgtttcctgtgctagcataaggtcagcctatcaaacgcggcaattattaaggaatattttgtgacgttagtgaattcagcaaagcattttacatgcttcctgcatctactcactgctaggtaaaatatgtcacatatatacacatatttcattttcatctttaaacaggaagcc

SEQ ID NO: 315357 - DNA, 4001 bp, Homo sapiens
ggaggctctcaaaactcatagctattctcataggtatcttatttcatcatctcagtcaccattggtctctctctactgttaggctttagagttgcttgacttttgtacctcgaggagctagcatattgttggtgaacattagctggctaaattagtttgtacaaagaaagagtaacaatgattgaccatgcaagtggtaagacagtctaatacagaggtgaaggatgaggactaggagtgatgtagagggaactggttatccttgtctcatataatgaacagtggcaaagttcacagagacacatgtattggcaaattcaaaagaaacagtttgtcccaacattttaaagcatataattttatttacttacccaatgccttgcttcacagtccaaaattttgctcaaaacctacagagaagagaagaaagcaaacagaaattgatttaacgaatgtaagattgtccactatagtcttattttaggacatacacatttagttttgctttgatagttgcagcttgccagctggtgtggttttaccacaagctaacaaacattttccagctctgctcttacggaaacaacaggcacccgaagctatgagataataatgtttttatccagagtactgggagtacaattgcatacattaattagttatacatacatacatacatatatttccttcttcaaagaaaaaatttatactatccaaaggccactagagtttatgggaaagaaaaaataagaaaaatggttctgtcaacattaacaataacgattcgtccgtggcctaaaaccactggacgtcattcaaaacctgctaaaatattatctttcaagccttagaatgattccgcaaggacgatagggccaatatctttatccttatttcactggcgatgaaactgagacttaggggttcaagtggcttgctcaagacaaacagctaggcagtatttcctgcccatctgaaacattaagactgaatatagactctgcagaacacagcctgagatgtcatgtctacgtattccttgaaaacctttgtcttctttttcaaagtgttctctcccttccctactgggtctaagaccagacagaatgccattgcttctaagtttgtgcttctccctgctggtaaaagacttaactatgtgatttagctgagaactggccagggagcactaaaccttgaagagatttaatgaaatatgtacctccttccaaaccggcttctctaaaacaaaatcattaaaagcacaggtgtaagaccctcatttatgatcaaatgtgggctgcaaaataaaacaatatttgaactgtcttcccccctttaaaaaaaaaaaagcagaaccttttagagctattttctgggtaaagaggcctgaggccaacaaggtcatgttgggccatgtacatggttggtgacccggccctaggtcttctggctcaaattcctgtcccctttccaaatcagcctacgtgctgtagaacatgcaagacagcaccctgatgtgggtgaatctcatttttaagttccttcccccacacaaacactttgccccattccaggctgctgagtcttaccaaatgagcactctaaaatgagaggtttccttgagtctgtaaccaaacactctgacatttctctgtggtcccaagtgccagtcactcaatcccatcggctccaaggttagtgtgtgcatgtgagtgagtggggactggagggaaggaagtggggaagggagaagacagaaaaagacaaaagaacctatctcctcctctccccagcccaactcgagataggcaaagagagatagactaactcggtctttaccaaacttcaaggattttctcctttgcaaaagaaagctgaagacacatgggagtgggaggtttacttaaaaactttcctctcttccttcatggaagggatcctcaaacacttctggaatacctaggctgttctttaaccagcttcaaccaccagctcgcttgtggatttccagtcgcaggcttctggaaccacaggaagcccagatttgccatttcaccatgacaagtggcaatgactcactccagatgcggattgaaacaaacaaacaaattcccctgtgtccactgtcagctgggccttgggcttttcaccgtaagcctctgcctggccaaaaacaaatgtacatacacgaggcgcaggtccttctcaagttcactcctttgcaagccaactcgtcttaagaaccagccccccccaactcctgagtgtgtgggttgagtgtgggcaatgttgtcaccacccccaccccaaatgccgcaggtgtggaagcaccaccagcatttggtttgtatttttacagagctcttagtcctttcccaccccctcaagattgcatcttatccttataacagccctgctttattagggagggaactgaggctccgggtgagaggccttgcccaaaatctcaaaaccaatttccagcaagttctggacacgccgcgtctcctagattcagccattccaccaatgccacacacaagactacccacaaaaacaatctccaaggagcagggctgtcaatgagaaactgacaactgctggctgcccccagacctggacttcccatcccaatctccccgcacccacgctgggtcagtaaccaccatgggagagttaaatgttttctcttcccttcctccctttagctcttttggcgctttccttgtgcatagccaactaggctccttgagaagacagatcctttaaaagagctttccattgaagaagaaaacaggaaccaaaaaaaaaaaaaagcaaagagagagagaagacagcagaaacgacagagagagagagagagagagagagagagagagagagagagagagagagaaaatgagagaagagggagaggcgaggttaagagccagagagcaagccaatacaaaagaccccatccttttcctccctcctcccctgggctggcaccagaaagccccattttctcgctcacacataagagcacaaacaccagccctgcgcgccggggcaagcctaggcagacttcgctaccccaccccgaccactccgtacctgtcttccagggactgcccgcccctgggcgatccacctcgaagccccccgcaaggcgcgacggaggctttgtggtatgaccgtggcggcccttaatttagttacattcaaataaaacttttggtgcacctcggtagctaacattgtgtgtatgcctttttttttttttttttttttttcctgttacgccgtcaatgcagcaggcaatgaggggaatgacacagccctctcattcccggaacgtagtcaatctcggctctgcggatttcacagaacacactttgcctattgccggctccaacaagaagtaactttccaggaagctgccggccccggcagccgccaggatcgctgcctgcgctgcgctggccgccggggattcacccagggaggcggggccgctggggaaggctcgcggggaatacagcacactttcccctaaatccctcgtccgcgccgagtgcagggctctcagagttcacctagtcccacctctcacccacaacagtttataaatggggaaggtcagacaagttagtagcagagctgggtctagaacccaggagttcgaatacaatccgaggctcatatcgagactttaagttgtccgattccgaagtttatttgcttttttccctctttttgccttccattctccctcacccccgttcttttaggggaatgtttgagcgagacttcaaggtcaaaagatggagtccctaggggctgagggtctccatcataggcgccccaggcaaggttggagaaaaactaaacagaaagccccttccgcctacgttggcaagaacgggaacccagctccacttggtttccgcccaaagtctttagaacaggagctgccaagccgtaaggatttccgaatccgatttccccgaaaccgt

SEQ ID NO: 315358 - DNA, 4001 bp, Homo sapiens
catttaacctccctgtgctttccttttaccatctataaaatgaaggcaatagtgtaatgcataacactgaagactactaaaaagatccaggaagatgatatcatgtaatataaaattgctctgaaaactcgaaatacttgataaacatgaagaatcagctagttcactctcactaactcttgcatatactctgaacacccatggaaattcagttgtagcaaaaaataaatacatttatagcataaaagagcaaaacatttcaaattaacttgcttaagctacttaaagacaaagaaagttcatttgaaatcttttctcattttttcactggttaactgaagttattctccatgtctgccccaaacacatcctttcttggggcagtatataatttttctccctctatgcccacagaacgtggctctttcttttctaaaagtgcattcatccattcattcattcattcacttgggagcctactgtgccacgccatggtgctgagatctggagacaaagcgagacgtcatcccagatgcagtaaaaggcccacatgttctgccttgcttggctgccagcaccatcaccccactttgacttacccaccctttcctttcagatccctcacctgcaggccatgaggaccgttttatgggctctaaactgctcacggctcacaacaatgacaacatcagtcaagatgtctcgactccggagacgattaaggttgagaagaacatcactggcatggcgggtgaactggatacagctgtcagccggcgaggccattttgtcttcacttgaaaaaagaggccaaaatcctgttagtcctccagaacctgtttcctgcttgccacaggtatcagagcaggtggcttagcctgctaaggtacagaatgcaactcaggtcccttgtatttgatctttgaacaattcatagtccaactctggccattattcttcatagttttaaaatggggagaataacttttatccaacaagttgggatagaaagccctttaggggaaaagcaaagggaatgaatatttgttgagtgtttttcccacataccaaatactctgccaagcactgacaggtagtgagtatgttgcaatggagagacaccgtgttttttgtttttgtttttgttttttgagatggagtctcacactgtcacccaggctgaagtgcaatagtgcaatctcagctcactgcaagtccgccttcccaggttcaagtgattctcctgcctcggtctcccgagtagctgggattacaggtgcctgccaccatgcccagctaatttttttgtatttttagtagagatagtgtttcactatgttggccaggctgggtctcaaactcctgacctcgtgatctgcccaacttggcctcccaaagtgctgggattacaggcatgagccaccgcgcccagtcaagacactgtgttttaagattatcaggctagacttgccttttgctagctgtgggactttaagcaggttgtttactggtttggggctttggtttccccaaatggaagtagtaatacctatgtggttataaaagttagaaatacattcctcgttcataggaggctctcaaaactcatagctattctcataggtatcttatttcatcatctcagtcaccattggtctctctctactgttaggctttagagttgcttgacttttgtacctcgaggagctagcatattgttggtgaacattagctggctaaattagtttgtacaaagaaagagtaacaatgattgaccatgcaagtggtaagacagtctaatacagaggtgaaggatgaggactaggagtgatgtagagggaactggttatccttgtctcatataatgaacagtggcaaagttcacagagacacatgtattggcaaattcaaaagaaacagtttgtcccaacattttaaagcatataattttatttacttacccaatgccttgcttcacagtccaaaattttgctcaaaacctacagagaagagaagaaagcaaacagaaattgatttaacgaatgtaagattgtccactatagtcttattttaggacatacacatttagttttgctttgatagttgcagcttgccagctggtgtggttttaccacaagctaacaaacattttccagctctgctcttacggaaacaacaggcacccgaagctatgagataataatgtttttatccagagtactgggagtacaattgcatacattaattagttatacatacatacatacatatatttccttcttcaaagaaaaaatttatactatccaaaggccactagagtttatgggaaagaaaaaataagaaaaatggttctgtcaacattaacaataacgattcgtccgtggcctaaaaccactggacgtcattcaaaacctgctaaaatattatctttcaagccttagaatgattccgcaaggacgatagggccaatatctttatccttatttcactggcgatgaaactgagacttaggggttcaagtggcttgctcaagacaaacagctaggcagtatttcctgcccatctgaaacattaagactgaatatagactctgcagaacacagcctgagatgtcatgtctacgtattccttgaaaacctttgtcttctttttcaaagtgttctctcccttccctactgggtctaagaccagacagaatgccattgcttctaagtttgtgcttctccctgctggtaaaagacttaactatgtgatttagctgagaactggccagggagcactaaaccttgaagagatttaatgaaatatgtacctccttccaaaccggcttctctaaaacaaaatcattaaaagcacaggtgtaagaccctcatttatgatcaaatgtgggctgcaaaataaaacaatatttgaactgtcttcccccctttaaaaaaaaaaaagcagaaccttttagagctattttctgggtaaagaggcctgaggccaacaaggtcatgttgggccatgtacatggttggtgacccggccctaggtcttctggctcaaattcctgtcccctttccaaatcagcctacgtgctgtagaacatgcaagacagcaccctgatgtgggtgaatctcatttttaagttccttcccccacacaaacactttgccccattccaggctgctgagtcttaccaaatgagcactctaaaatgagaggtttccttgagtctgtaaccaaacactctgacatttctctgtggtcccaagtgccagtcactcaatcccatcggctccaaggttagtgtgtgcatgtgagtgagtggggactggagggaaggaagtggggaagggagaagacagaaaaagacaaaagaacctatctcctcctctccccagcccaactcgagataggcaaagagagatagactaactcggtctttaccaaacttcaaggattttctcctttgcaaaagaaagctgaagacacatgggagtgggaggtttacttaaaaactttcctctcttccttcatggaagggatcctcaaacacttctggaatacctaggctgttctttaaccagcttcaaccaccagctcgcttgtggatttccagtcgcaggcttctggaaccacaggaagcccagatttgccatttcaccatgacaagtggcaatgactcactccagatgcggattgaaacaaacaaacaaattcccctgtgtccactgtcagctgggccttgggcttttcaccgtaagcctctgcctggccaaaaacaaatgtacatacacgaggcgcaggtccttctcaagttcactcctttgcaagccaactcgtcttaagaaccagccccccccaactcctgagtgtgtgggttgagtgtgggcaatgttgtcaccacccccaccccaaatgccgcaggtgtggaagcaccaccagcatttggtttgtatttttacagagctcttagtcctttcccaccccctcaagattgcatcttatccttataa

SEQ ID NO: 315359 - DNA, 4001 bp, Homo sapiens
cccccgccctttctccccgcccgcccccggagctcagccgatttctgaggctccaactctacccactccctccccgggccgccgccgccgcgccttcccccattcttactccctcgaggagagccacaggttgcaaatccaaccaacctcgcaatctatttttgcaaaatcactcacaaagatctccctttcgcgcccgcgcccgctcctcccgcgccgggtcccctcagccacggccacaaagtgcccttctctcctcctgagtcttgcacataaggaacgcgggctggggctctgttcgtctttctcctcgcccaaggtaaggacctcgggaatctgaagcctggcgtccactacgctcaggcccgcagttccctttttacagagcttgcaccatgggaaaaaataaaataaaatttaggaaagggaggcaacagccattgggagccaacacagagtcacgcagcgcccaaaatacaaacaccgcagcggccagaaatcccgccacctttctcgttctcccaggctgtcctgtcgaggttccctgagtccccccgcacactgaaaggcatcgcaggtgcagtgcgcacccctttcccacccaccccaagaagccctgtcccgccatcagtctctctcctcgggatgagcagggagagcgcgcggaggttcccgactccctcgactacaaccaagaaagaataattttcaaagtgttcaacatccccgcccccaagctccccaaaacacaggggcagggaacaccaaaacactcggctctcattaggaagatcacggctctgaaaggaaatagtagacacgatacttcatctcatctggatttatgaccaaaaaaacaaaaacaaaaacccaaagagttcgcttgcattttttccttccaaatctcggttcggctcgaaggcagggaatctaaaagaccgaggccgatggaagagagccagcggggcgagcgagcgggcagcctccctttttgcctcccggagttacccagaaggacaggggaagggaaggaagaagaggcgaggaaaaagaggagggagggaagcggaggccaggagcgacggagcaaggaaagcagtttgcaagcgagaaaagagggaaaaaacacagccgcacgaatccagagagatcacaagccgtacgcaagcagcagcagaaagagcgagagcgcgagcgcgcgtcctctccgcggtctggggccagacagcccccagactagcccgaatcaccccccaagcactgtctcgtcctctctgctccggccgccccctaattcccctccttcctctcctccacctcctttccaaaaaccaaaacaacacaagggagggtggcaaaagcctccccaaaccggccgattcactcaaagacaacaataataataataaatacataacaatctatatcctatggtgggagagacgtgggactaatcttcggcatttattttaacacctgacagctagaataaataaatatatacatttatatcaatagatacacatagaaaacttggagccaaagcatttggcaagagcggaaaaaaaaagaattaaaaggtaaaataatgatcatgagcagcggcggcggcagcggcaccagcggcaacagcggcggcggcggcagtagcagcagcagcggcggcagcaacagcaataatcacctggtgtccggcctttcctagaaacttcttgcatcaccacttctaagaaccccagttctaagaatcaacagagctcaattctcggaatttgagcttcggactttaccactgctacgtggcaggggaggacttggtgtcagctctccgagatttttactgcccctggccaaccaaaagccctcaaagccacaagattttttcactggccggcatatttcgaggtcctcataagcagagcgtctcggatttggaggttccggttcgaggctcgaggggcctgaaggtggctctccctccccgggcccaagacgatggtatggcctgctccgccaccatcacgtgggctcctcctctgtgacgtcggcgccttcgctgtagcaaagctcggcctctggaattctgagaactaatttgctattcggtgacataagagggggagtgcgctttgctttcccggggtctggggctaattccttctttcttacccataaactcagcagatcgagctaaatgcacaaaagggagcgagaggtttgaaccactgggaaaagtatgttatatatatagtagggttagagaggcgagtaagagaaaaataaaataaaataaacatcacagctctttccaactagaatattaggcaccacgagaaaaatatttgccaagcagttttcggtgggttcatttgctttatttttatttaggacaggggtttttgctgttgttctgggtttttttctttctggtgtggtggcttgggatttttggtttctgtattttgatggtttatggatttttgcttctgattttttgccttttgcaagtttgtggtgttacgtaaatcacaggatcggcatcggttggatttttttgtacgtgccttttctttccctatctaatccctcaagcgttttaaagatgtattatttcaatactaatactattgaaagaagcttaaatttttggccatatgtaacaatcccagcccccactttttttttttttttttcctttggtgcaattttctttttcccccttggacttttgctgaagtgtgtctctcctgcacttcagagaaatgttcaaaggatttgttttggtttggtttgtttctttccaggacagcaagtggtgggtttaatctgttattgttgactcttgggaaatttcttgttgcaagaaacgtgtgtgtgggggggagggtgggggtggcggggtggtatgtgtgtgttttctacaaaattctgtgagccaaatacctgtttgtgttttgttttctcttaaggtcttgagatttttgttttcgaggctcgtttcaaggtcgttgtaaaaaaatctcttcagtctgtgtttaagagatcagccggagggaattctaaaggcctgccgtgccagtatcacagatactgcctgtatttagaacagactgccacaactacaatgcactacacgcagcacagtcttcttagctttgaagctgagttggggggtggggtggggggggggtagagaagaaggagaaattctttccttctctttttctctattactttctttttaaaggcaattgcagtgcagaatcatttcattgtgggtcctagtttgtttgttcagagctgctagtttccttatttaaatgttggttcgggttttttcccctcctactcatccctgaataagggagactcttgtttcttttatgtctctctcttaaaagaagggtgtgaggggaaaataatatttcagattcctcaagaattagcccaaaatgtttggaccagaagcagctttcaaaggtcaggctgttctgagccttggctatgagagtccttcaagcgacttattaaattacagatgaattcttaaagcttccacaaaatctcgtcacttgttaatttctaataaagatatgtctaaaataatctacctatctcaacccaaaatttgggtttataatggaggagtgatcagagctgtgaaagattgctgtttgctgggatatttggaaaatctctttcattgacagtcccgtaagaagttccatctatcaccgaaaatgttgttggcaatgcacccccctaccccacaacacacacacatttttaaaggctgtattttaggttttaaaacccagaaaggtgcaaagaggttgattattttccacaagggctggagcttaggaaatatgcgttaaagtgtctgtccctgtgaaatctgaatattttaatacttattgacagatggattactgcagcctctgcagaaaagcctgtcttgtgaacggtttttgaaaaatatacataggcctaatcctgtc

SEQ ID NO: 315360 - DNA, 4001 bp, Homo sapiens
agctgagcccccgagtcctcacctggctcctccaaaccgtatctccaactatacttttctcctctactcattcaaccgtttgctacaccatccctcaacaagccctgtactttccaattttcgagccttgctcatcctataccaaactgactgcatctgaccaagtcctagctggttcagataactctcccgagcagccttttctaatcccctaattcaaaaatctttcgcccaatctcctcccttctgtgcctctgtaactgcacctacctagccagggtcgtattcgagggatttctgtttataaacattcacaagcccccatcctaccaccaatccccacccggactgtgagcaccctacagacaagacccaaatgttgaatcactctcttcttgctcctccgaatatttattgtgtgacgcctgacaggaagtagaggctctgtaaatgtgtattgagtgaatatgaaagcttcacaaatttcaagggtcagcttccttggcggccagggatatatacgccctatgcagagcccggctccaacgcctcttgtagaaagaaggacactgaccaggacatttgcagcgtcacaaaagatcctgtcagcgcgaggcctgcaggcggccctccatagtgaaatatgtgcttctgcaacccctcaaagtaggaactgcagggtgactctgcatcagctgactacaggcagatttccaggctgactggctggaaaagaaaaaaaaaaaacgcggagttcgacgccgcgcgcagcaccaaacacttccccagaagggcgcagcctggaggcggccgcgcgcaggacgcacgcccaaggcgcctgggccgctagggaccgaccggagcgctcaaacccacagggtatctatcaggcgcgcgtcagcacgtaagcagagcgcgagaacgcccgagacggcggcgcagccaatcccagagcagcgctccccaacggccggccggagggcggggagagaggggggctcggccagagccacgcttcccattggttgagacagcaccgcccagccaaagcccccttgtcctcgcgcgggtgcgccgcctggactcccaccctggccagtcccgggcccaccaccactctggcatccccagcctgtccccgcggctcctcctccttccccggccctgtggcctgcctgctgtccagcattcttccccagggcgctgtggcgcggagggaggactccccaaaccccgggaacagagccttgcggaggaccccggaggaggaggaggaggagggacgcggacgggactgggagattcggtcgggaaggggacagggcctagagcccggggctagaaggcaggacacctggcttcggtctgggctcggcctttgactacgacgtgaccttgaggacggttccttcccttcgtggggcctgggtccccttcagtaagatgcgccggcaggaaacgatgagtcgtttcacctgggagctgcagggccgcgtgtttaacccagggcctcctcctgcctggcacattattccgaataataaatgccagatcatgctgctggagacgccggcagaaaagccgagagggagactccctggggtctgggcgcgatcggccatcctacccttaccccgctgcggccgcagggctcggcctgtagggcgcgagccccccttccccacccgtatcccggcttcggagctaaaggaacacgtgaggccgaaccaaaccgagtagagggcgccagggaatcccgcccgagctgcagagacgcggacccctcctcttacccaaaaccaaatgggcagggggctccgctgcagagggctcgccgaggctctcgccttcacccggcgccgcgcaggtgcccgctctcctgcggggagagccgagggggggcgctgccgcagggtctttctggaagcccctccaccagcactcctgcggcctgcggcctccgccacccggacgcttctacacgcgaagcgcgcgctggggctacgctgggcggggctcacggcggcgtggctgtcggggggccgccgagccgcctcctccgcgctgggtgcccggctggcgctcctcccgcccaaggtgccctgatcgctaggctcccggtgcggccgtctcgcccctaagccgggcgccagatcccccgccgccttctcgctccccgaccgctgggcgggggcgagggccagggagatggagccaggtgcggaaagggttgcagcctcgcgggctgaggccggagggtgaaggcgccgctccttgaagtgaggaaaactccggtgaggaagaggctctttccaggtcctgtgcgtgttgctgtctttagagctcattagggttggttggtttttaaatttcttttgatcagatgaatttatttaaaggccgggggcggtggctcacgcctgtaattccagcactttgggaggctgaggcaggtggatcacttggggtcaggagttcgagaccagcctggccaacatggtgaaaaccagtctctactaaaaatacaaaagttagcagggcgcggtggcgcacgcctgtaatcccagctactcgggaggctgaggcaggagaatcgcttgaacccaggaggcggaggttccagtgagccgagattgcaccattgcactctagcctgggcgacagagtgctccgtctcacaaaaacaaaaaaattaaagatttgcttctcagggtctttaaaaataaattaagaatagcagtttcccagagttttaataatagaacaacggagggccatcggccacagataagggtttcctcccaaccccaccccactgcgctatcgccctgcgccagcacacctcagtttccaggatgagaaacaggctgaggagagaagacaccaggacacattagtggcgaagctacgcgaaaggaaaataaaccttggggcccccaaatcactaggctaaaggggaaagtcaagctgggaacggcttagggccaacctgcccccattctactcaaaatcaccccctgctcactgagataaatgcatatctgattccccctttggagaggctcatcagaaactcgaaagaatgcgaccatttgtctctcatctacctataacctgggggctccctccttgcttcgagttgtcccacctttccagactgagccaatgttcatcttacatatgttgattgatgtctcatgtctccctaaaatgtataaaaccgagctgtgtcccaaccaccttaggcacatgtcaggacttcctgaggccatttcacttgcgtgcattcttaactttgggaaaataaacttcctaaattgatctggctcagattttgggggttcacaactatgtttaggtaaagtacagagaaggaatgaatagaatgaagagaatgaatgaaacttgcaaatacaggaagatgaaaacaggaggagggaagtactggcatgatgaagatttaaagaaaactgtagaccgggtgcggtggctcacgcctataatcccagcactgtaggaggctgaggcgggtggatcactttaggccaggagtttgagaccagcctggccaatgtggtgaaaccctgcccttcgtagtggatgcttgtaatcccagctaggtgggaggctgaggcagaagaattgcttaagcctgggaggcagaggttgcagtgagctgagatggtgccactgcattccagcctgggcaacagtgggagactgtctcaaaaaacaaacaaacaaataaaactgttggctctgtctgtccattctgtgagcttctggagagctaaggctatctcctttatccccagctcctggcacatacagccttgaagactgggagaatcaggaagggaggatgcacttagttttctgttcccgtttcacagatagactcaagcctggatttgctccagtgacggtgtttcagaacattaggcatatagtaccacagggttaaaaataaatcactatactaaaattacgccttgaggatt

SEQ ID NO: 315361 - DNA, 4001 bp, Homo sapiens
tgggaaactgttgggaaggcatgattggttttgaaatgtgaagacatgagatttggaaggggccaggagtggaatgatatggtttgactctgtccccacccaaatctcatcttgaattatagctaccataattcccatgtgttgtggaagggacccagtgggagataattgaattgttgaggtggttccccccgtagttttcacatgctagtgaataagtctcatgagatctaatggttttacaaggggaaacccctttcacttggctttcgttctctctcttgcctgccaccatgtaagatgtgccttttgccttctgccataattgtgaggcctctccagccatgtggaactgtgagtccattaaacctctttttctttataaattacccattcttgggtatgcctttatcagcaataaggaaatggatgaatacacatataaactttgaaagatggccaagcatagtagttcatgcctgtaatctcaacactttgggagaacaagatgggaggatcacttgaccctaggagttcaagaccagcctaggcaaacagcaagaccttgtttctacaaaaatttaaaagttagccaggcaaggttgtggcaggccaggtctccataatggctgaacaggtaggcctccataacaactgtttcagcactgactgagtggttaggttaaatattaaaagctgatagcatcagtgccctatacaaaggcttgaatgtaacaaaagcccaccaagagttttgcctaggcctttcctgggccttaaagcatgacaaaataatgaaggaattcttaacaggacccatttaggattaaacaagttttattgtggatcttaaggaactccccagaccttcacaaacaagctttactggggactaaaggaactccccaaaaccctgtgatttagcaggacacaagataagggtaatcaccccagcaccttcacccatttagattaaatgaatttacgaaggctccaaaggaaggccttcaggactcagatcttagttatagattagaagaagttaatcacttacttatgtctttagatgaatgcacacgtacacatagacatatagcttagaaggtatataagctctggaaaactttgtaattttgaattgttctggtgatattttccagacctccctgtacccagttacagcaataaactcccttctttcccagttcatctgcatctcattactgggccgcaagaataagcagcccgaccctcagtttggtctgggaacaaggtgaggtgtgcctgactatagtcccagctactcaggagactgagacaggaggatcccttgagcccacgagtttgaggctgcagtgaggtatgattgtaccactacactccagcccggacaacatagcaagaccccatttctaaataaataaataaacaaacaattttgaaagacaaaatatgtagtgagattctcaatccctaaaactgatttgattttctgaacttcaaattctatttttttcaaagaatatctaatgtattacaacaagctgttttaaaaaacaagatacaaaaccacatgcttattttgcctaattctttttccaattattttcccaatgaatacatattactttttatttatccctattgctaccagggacagagcctgctatttcaaaaagaaaatctaattgcaaagctgctgcctctctgttttgggttaacagcacctctttccaaaggcctattcacgcctccccaacctcctccctttctaccaggccttacccatggctcaaattttcttctgctgaccgctctcagtgacagcccacatgttcaagttcagctgtctctcaccttagctggcaggtgcctcagcactatcagcatgcaggatcctctccaggcaagtgaccagccggatcctcttaattctcagttgacagggcgtattgacacccctggaaaccttttccaggctttctgtgtattctttcaatgcttgcctttagctgagaatggaaattctcacatatgtgtgacaagtacagtgggggtcagcggggggtgggccttgggatgtttttgtgtttgtccttgcacaggcaaagttcaacagctttgtaactgtttgttttaagcttaaaatgtctgtgagtttggccttctgacaagcagaggatcaaggacagatgctgctgcttaggaatacattaaaaatcaatgatgccaaagggcagctcccaccaactccatctttagctctccctgccaggtatgtgtgggcataaattagcaaggaaccggcctgaacaggatgagaaatcttcagagactgccctgagcataacccagaatcaggacctgagaaagatttcaaaatggccaagtggtttttagatagggccatttccaagaagaggctggagactcagggaggagttacagtttgaatctgaaggcagattcaagaaggtggggccaaagccataccccttgaatgtcacagtggaggtaaggaagagtatgtctgaaatacaggagataccataggacgtctctcagtattcccatgccctgtgattaaagtcagtggaaaattacaacaacccaatccaggcagaactactaatgaccccagaccctttaggaacgagggttctggtcacctcaccaggcaacgatccatggccactcaggtgcttgctgagggcaaagggaatatggaatgagtagtgaaataagatagttatcaataccagccacaactacatgaccaggtataaaaaccagaactgtaattgtcatgagtgtttcttccttattttgttatgaatatgttagtgtgcgtatagcacctttgttttcttccctttcgtattcatttatcgtgtaacataagatgcattactttatctcatagaatttaatattgctaactttacatcatagtgtttaagttacaggatctcaaataagtaaatatcacctgtgaaccctcaaaatgagacaagtctcaatcaatttaggaagtttattttaccaaagctaaggacgcactcctgtgatacagcctcaggaaatcctgacgacgtgtgcccaaggtggttggagcacagcttgcttttatacattttagggagacatgaaacatcaatcaacatatgtaagatgaacattggttccctccggaaaggcagaataacttgaagcagggagggggcttccaggtcataggtagataagagacaaatggttgcattcttttgagttgctgattagcttctccaaaggggccagcagaatatgcatttatctcagtgagcagaggggtgactttgaatagaatgggaggcaggtttgccttaagcagttcccagcttgatttttccctttagcttagtgattttggggccccaagatttattttcctttcacacacctaaggactttgtatcctcttctgggaaaaggattagtgcagtaggatgcagttgtagcaaggatagttgtgtcatgttagacagaactacgatcttgttattgtctttacttgaaggtgaagtatgatttaaggagagatgtgtgggtcccagattgacaaggagcagactggtgatgattaattttacatgtcaacttggcaggagtgaaaattgtaaattctttttctgtaaaggttttattatgcagaggaggggctcagtccttggcagctgctttcctcatggcggctcagtacccagatatttggtcaaactgatagccacgggatgcagccaaatgcattggcaggtgggggtgggtccctggtgaaaccccaccttccagccaaaaacagagctgaaaggctggactgctggtcccagacgaaacccacgactcagacttagaacttctgttcctgtttgcccaccctttcctgattgattctttctgaataatgccttttaaccagttgaatgttgccttttccaatactacctatggcctgcccctcc

SEQ ID NO: 315362 - DNA, 4001 bp, Homo sapiens
gcagcccagatggatgcaagcagaacagcagcaccagggggagagcctgagaggatggtgctgttcatcatgcactctgtgctgtcagtgggcactgacagcagtgcaggagaagcatcctgggatgaagtgggaggcaggaggggcaaatggggagtccctgtgtgcaactgcttagcttcccccagctatacacaaataaaattttgtgacctcctcttgggaggctgcatactggactccagggggccaagggtctgagttggcagtccctggtgggttagagactgattttgctcagagggatcccaaggccagcatctggagagaaagaggaggaggagaggtgaagccagctatccacagagagaccagctgagaggtgtaatgctggctggagtcccagcattagaactacaggctgcaggccagacatgatggatgtgctccagactccgcagaaatcaccctggagagtgggaaaagcagggctgaccaagcaagggagaaagatgaaacctctgcatccttccctgtccaataagatagccattagctacctgtggctgtttacatttaaattaatgaaaattagataaaataaaaatgcaattcctcagtctcattagccacatttcaagtgcttgatagccatatatggctagtggctgccagattggacagtgcagatataagatattaatatttccatcacgcagaaagctctacttgaatgtaaattacctcattaatatattttgtattgattacatgttgaaataacattctggacatatagagttaaataagctataatattaacttcacctgcttctttttacgtgttttactgtgggtaatagaaacttgtcaattaccaatgtagttcatatttctattgaacagcgtggttgtaggtggatacaggaacacacctccatttattcattgttcttaacacctcatccatccaatggtatttgattggataatagctgtaaaaatcccttctcaacagtaaaggtgactgaggcagccccagggtaatggggcaaatgcaactttggaggcacaaaaattcaggttcaaatctcatctccatccctctactagctttgaagtcttgggcaaattacatgcctcagtttctcatctgaaaaatgcaatcagtgaatgatccactgcatagcatttctttgaagtttaaagaagacagtgggtagtgcacgtatgggggctagcgtgggctcctagtaaacctcggtaaaaggtagcattgttgttatcattaccattttaagtgtgaaagtgtaggggattatggtcagtttctctggcctcagcctactcacaaccctacccgctgccttcagcagcccctcccagccctctgcaaagcccttggcacagcctggacacttacctgctggcagctgctggcccaggaagcccgtagggcaccccagtttcccgagcgtgtggctttgctctccaggtgcatccgcagttgtgtttccagctcctgactgacttgctcaagggcgtgcactttggccatatattccaccaggcagccccctaggtcctcaacagcaccatggtccctctccaaacctggagccggcacggtggccaggcctgagctccgcaggccctgaaggaagacactgctgatgccgagggcccggcgggtcacacgggcacccaagccacctatgcacccactgggtgctgttcctacatagaccccgggtgctcggacaaggccactcatggcattggtcctggaggctggggggctctccagggaggatgatgaccgtggccccctgaaggacgccctgcgcctctggaggggcatgctggagctggcactggtgggcaagtccactaccactcgcctctcactcatcaccccttctgcctctgtggtgcccagtgggtttacagagtccagtggcttttggtttacagccccagcatccctgtggcctggtcacgggcctctctggaatctcccctatccctggggctgctttgtctgctgtcttccatgagtttccatcattcactgagctgaaagagaaatgggcactgcccagggctgtgtgcagagaggcactcatgcattctttgatgcagggtcatgtgcccaacctcccagattattctgctggtggtgggggaggctggatcagtgcaggctgtggaggtagaccatttgggtttgtgcattttactacctaagtgggcaaggcaggcatcaagcaaccccattttacagatgagtaaactgaggctcaaggacctcagatgacaagtgtactgatcacttgccccagacctcagattacaagctaggactcaatctagctatttcagggctttctacatccctatgtgtgctggcacatgtgaatgtgaacacatgtccacacaggcaatagaggatgaaaaatggcaggaggcagctccagggacccaagagaaaagacttgcctatggtttcctctctcagtcctggcagcagcttcaggtccttccctcacctctctcctttcctcctcatctctgtcctctaatgctctgctgttcatcagctgcttgctgttggccaggatgcttcctccctctggacctcactgtctgaacattggcttgggcctttaactctctgatgcaccagataaggaccttgggcaaattcagatcccacacatgttccggccattccctacacctctgcttctccatctgttggaaaactgagaaataaaaacaacaacgagggtgttttctggtaagcctctccaagggtgccccaagttaggatatgatgacacccctgggttttaattattgaccttggcatccactaagccaccaagggtcacacctcaatcacttctctaggatcagaaaggttcccccagttacaggatgacaacatggacctaaaaacctctgtacataagttttaccctggagaaaccaggtcaccaaaccccagagctggatacttttccagatgctgtaatgtaggaatgtacctcaggtgagagaaggagaagggagtcaatctctagtgagtagcagatccagcctggtgtgtgcatgaatcctatggtttatttcgtggaattctcaactcaacctcaggaggaaggaggtccagggttgacaggtactgccatatgggctgtgtacctcacagctctaaaatgacatgtcctacagttggccactgtcctcttatgtgaggaggaccccgagagctgcaatgacttgcccaaggttctatgtccagaaagtagcagagctgggggcagacaacctcttccaaactctgggccactgacttacttaggagcctccctgttgcccaccacccagagagcagagtacctacctgaggtcacgcaggtagaggtaaaaaacctggtcgcctactagaggaccctgtgtgcacttccttcctactgaccaggacactccaacccttcctttctttattgtcttccactttgtctctctgagatggcctgggaggtattttataaatatcagtgttggctatttgatgaacagatgaaagaaccaattggattaagtaaaggccagtagtgtccttgtttattcagatgtagcattaatgctgtgaacaccacccctgatgcacccagaaggggcatgcgagcctgtgttacagtaacagcctcctatacggatgacactgacttggttctgaggatctgcattattgtgaattccaagatgtattgtccaaggctgaatgaaaagttcaggctactgattaagttgtgcacaaatgtgtcatgtttaggcattgttattctctacagaatggtaacactcaatggccaggttaacttcagacttctccggaccaaagatatttactatataaatccactcagccctggagacagggagaaagagggggggatgtactttgacaccactgtctccaaagacctgat

SEQ ID NO: 315363 - DNA, 4001 bp, Homo sapiens
tttttccaagtgacccaaagtctggaaggaaaagagccttagtcagcggtgaggtcagagaagtcccacctttgggacatttattagcaatgagaaatgagaaaagaaaaaaaaaagtggaatagtgtttcctggttggctgttttaagtctgtaggtcatgcttttaaaaagatagacagatacactcatatatgtgtgtgtgtgtgtgtgtgtgtgtgtgtgtgtatatatatataatatatatatataattaaataatttaaaaaaacgggtgccacctgtctttggaggcattttggaagctgcaactacctcaggaaaatcctttgacagataaatttctccagcagcctctgccgaccttaactcaggggaatccagagataacattttcctgcagtggtgtcaactcagagagggacctctattacgtctggcagccaagaggctttccctacttctttccttacaccctttcagaacttccagctcatccaggcttttttgttcctcccgaaatactattttttttttttccatttccccaaccaaaggctgcgaagtagccgagggctactgtcaagaaaggacaggccgtaaaaatcacacaccaaagcaagtccccttatttgacaacaacaacaaaaaaggtggggggagtggtagaggggaaggggtaaataaaatgtgtgtgtttcttggcgtgttcctttaagtgagaaaaactagggaatcctgaaaatcaccagaagttaaactcctgaaaaggaaggccagttggtgttggagccaacttggagaggtccaagtggttctcgcctcatttgcatgagtcagccagaaaacgccaggactgtggaggaggaccccaccgcagagccacccgccagctctgatccgccagtctggtctgcagttccccgcggaacctgcaggcggcgagtgacccgcccgccctctgggcaaaggactgggttggaaaggggccagcttctcacttactgtaagtttgagatgttcgggtaggagatccttcagctgggcgatgcactcgttaatccggtcacgtctctttttctcgatgagccggtgcggcaatttgtaggtctcctgcaagacgcacggggaggcggtgggcgcttggggaaggagatgagaagcctatcctcccagccccgcagcaacagtccggcagaggagcagagtagcagagtagcacccagaaccatcgtctgccctttcttttccaagtcactcagaagaggcaccgagcccacaccctgcatcccctcgccaacctcaaagcgagaaaacttttcttggaaactcagcgcgcgcgaggggctgagcgcagggtccctaggggtgcacttgcttaccttgctgtcctcgctccgctttattccccgtcttgacttgtacacttggtacatgtgggcagggtacatcctgcaggaagagagaccaggaagggtcgtgactgcttgcgcacggctgcaggcgttctgccgggcaagaacctcccggtgcgcccggagctgctccaagttgagagtggcgcataacatggggctgcagttgaggcttgaagggccaaggagtgccaacttaccctggtaggtctccgtgctccagtcccggtgctttgggcaggcaggcggggggtggttgcgcgctggggatccgctccatggcgcggcgagccggggccactgcgcgctcctgtctgcactagcggagcgtctggatgaggactgccctggagagggcttcgggggtctctccgcagatgttcctctgagtctgagctctttgaaatcccctgggctgctggaatcttcggctttgagatgcagcttcagttgggggcgtgcatggcccggtgtccccgcggcctctggctccgactcagcgcacagactggcggtgtgtgctccctgcgcggtctgtctgcgccgtgcgagccaagtgaatgagaagtggggcgggcggggaggcgggagggagcgggtgaggggggggcggttagggcggagtgggggggtgggggggcaagccgaggagtaatggagaggctgcgggctgggttaaatgggagcgagtgggtgggttggagctacgtgttctaccctgtgactccaggcacgtctggccactgccggggagggaaggagcgacctgcccgccctcccccggcttcatcacatgagtctcacgtgttggacaacgctccggcggctgctagggagcccccacccccagccccggcccccaggtgtctgcggctgcggccgcctttccccgaagagggggtggcagcacgacctgggtcctgcccagttgggtggggggcgcggaagctggaagggacgggggtgctgggggagggggagaagttggtaacgtgggcgaacctgccccagggaaatgaagtaagttcccgtctcctgggagggaacgggggaggacggatccgcccgcgtctgactcaagccgggagaggaatatccccttgctagctccagcccagccctcttcctcctcccccgcccggcccgcttggaggaaccggcgcgctgcggagggagtcgcccggccccccagccttccccagaggctggggtttctttccgtcctggcttccctgcccccactgctcaccctcgcgtccaggaattgcccgccttggggagggaccgaggggcggggcggatgtcaccccatgggaagcgggccgacggccaagcgcaggggcagctgaggctgccgccgagcacgccgcgcgcacctgaccgtggagggtgtgagccgagggcccctcgctcccaggagctccgctcctgggcacaacctgcgggcgggcgggcacccggttgcgcagccccctgggtgccccagtgtcacccccttcctcccggccagtcaagcgcagaaagataccgggcgctgtgcccggcgctccctccctcctctgccccctccggagcagaggcgccccggtcgcctcccctccggctgcagcgttacacaaccgcggcggcggcgcctgccctgcagcagcgcagggcgtgacgcttcacgtggccgggctcaggtcgtagcaccgcggaccgcgagcctctctgcgttgacccagggactgagaccccggggacgtggcgtgccagcccggatcggccctctccctgcctgttgggaagttcggcggcgctgttcgcggtctgcacccagggcaggagggatgagagagacaagaaaaaaaaaccgcctgttacagggaaatcttagcaatcatgcggtcgacacgtatttcttgagccccctgctctgcactaggcgctgcactagttgatgaatccgacacggatcctgcccttgaacttgcagaacctctaggaagaggttaaattgagcaataaaggaaaggcagccctgggaaaattgtatcgaggccactggctgacagaggggaaaaacaatgagaacttgtgttgctttgtgttttgtttttaatttcattgtaaccgagatgcctaggtagagaagcgggggagaagctaacccaaagccccaagcccggggcggaaggacctcctccagcggccccagatctctgcaatctcacttaggctgccggagggccccacccacctcccccggaaaggtccgggctctgtgaccttctcactcagccgggagcagggaaaacagctgaaactccaatcccgcggtgtgagcagcgctgatacagtcagaggagggagccagtggaaactcatgactaaaataaggcctggctggggatttcactgacctctgcgctcccctgccctgcaagttcggggagttgagagatgactgtaagcccttcccactgcgcttcgggtcagtcaccccactgctgagtgacctggctgtgggaaggattgaaaaaaaaatggggtcactgccgagactgggcgaagagtagtagcctcgggtgcagttaggggatcagtc

SEQ ID NO: 315364 - DNA, 4001 bp, Homo sapiens
taattcattacccacatcagtggctttgccgaaatttgaacccagaccccctaggggacacggaacactatgacacatcaggctcacttcttgctctcctttttcaaaccgtggggggtccatgtgaaagtcaactgaattatttcatgggtaaaatctcttattcattcttagggcatggaaaccatgttgttgaagagagccgggatcccaaacacttgaaaaagcacttcaaaaaaagggaaaatctctggacccatttggagggtggaaaggaacataaatcacacagcttaccaagagttggctcaccaattaacagctaagcagagtcctctctattttttccccacaccctccctctccagttgtagtcaaagaatcaaccattctggcttctagcaacctcttttcccaagtaaagccagtggcctatggcgtgggggacaactgctccctagcgaatgtctcttgcagtgaagcatttctgaagtatctcgatagaggataaaagagacagtgtctgaggtctcaatcctcaggcttcataaatgtgtagacaccctccagcctcctcaaggcccaaattctgagtgacaaatctatacaggggaggacagtgtcagcaaagtggcccaatgaggcaactcttctttctttcattttacctctttgcataaactcatttgaaaaactcatagcaggaaaataataactctactgctgtttctgcccggcctctgtcccactgaccccaaggtgctttcagatcaccacgagaagcttctgggtctcaattatgagaccattaaaaagtaccaattataagacctcagaaatgtttctgggaaacctgttacacacctcaaaatggctaacctcttgcctcagatttactttaagttcagaaaacaggtcacccagatgtatgggcatcctagcccccacaagcagcccaagactgtggtttaatattttccatgctgcccttaagaaaacgaagattgatttattggctgtaaccaaagggatgaaaaaaaccatcacagagctgggctgcctgtttaagacccagtcgtggaataaatcagaaatgtctgcacactgaagttttaaaatgacattcatccaatggtcaatgtgtaccgagttctggacaacaaagaactaggtgacaaatgtgtgctgggcacagtgcatctgcaggtggcacaagggcctgaaatcaaaatataatcttcactcagtccactcaaagaggtaactctgggtcaaaaacttaggcgaacccatttgaacttgcagagaagggatgaggggagcagcagaacaccccaccacacccaaaaagtgccagtttgggattgctggtgtgtggtttcggtattcttagctctactgccacatctctggaggagcacaactctgttccaagcaactctggcactgccacccccatccccaaaacaaaactctgccaaacaaatccccgaggctccattaactccttcaggtctgcctgcctctctcatccctcagcattctcccatcacctggaaaagcaaattaatactgaacatcctgaaagtcaagcaggcccttcaacacccccatgaaaattcttcctgggttccctgccctccccacagccccgtcccactggttccagagattcatttcccacaccttctcacagttacatcaacaaaaaccccaggaggacgctgctggcgcgaacacgcacacacgcgcgcgcacacacgtacacgcacacacgaactctctctctcacacacacacacacctctttcacctttgccccagcccctcagacacctcgggccactcggcttcagcctcgcccctctgcgccaacagctagggatgcttccctcaagctgcgtcgctcccggtccgctgagttcctcattttagtgtttttcctttagaagacgccaactatgagaaaccctcaccctccaaagaggccgagtgcgtgttgagtgactctacgcatttgccgccacgcctcgggttccccccacggcctggagcatggggccggggcgctggtgtcaaccttcggtggaagtttgggaggctggctggatccttcttccacccgagaagcttctgggaaccgctgaggcgaaaccaccatcgcccggccagaccgctgcggcagggaacgagatgcggcgcccctgggccccgtagcggctgcagcccccgggacccccgctgcccgcctcgccccaacttcttcgcccggcgcccggcgcgcccagcctcggccgcagctcccagccccgggcgcccggccgagcgctgggacccggctcccgccgccggcacgtcccccggcagccactcgctggcgctgcctcggcctgcggccgcctcccgccccctcctctccccgaaccaacagtaaacacaactttttatgaaaagaaaacaaacttcagcgacgtgactcacctctgctgcagccggcgcctgggaagggcgagccggggcccgggggccagcgtggtgggcgcgagggagccacacagcgccgcgccgcacggacacacaacacgctcggtgacaccggggacacacaacacgggcgagcggccgcggctggagcaacaaaggagccgaggaccgagaagttgcgggccggagagggagggcgcgtgcgggcgtgttgtggctgtggcgggcgtgagggtgtgcgcgccgtgtgtgcgcgtgtgtgtcttttctgtgtgtgtttgtgtgtctctgtgtgtgtgtctgtgcgcgcgcgcggcggctgacaccggcgggccggggctcagggtccccgcggcagaaagcggcggccgcgggggcggcagcaggaggacaacgcaggggacgccgcgcccagcgcacccggtccctccatatggaagaagctttttggatgactgaactcgcaaacaattccttcttttgcttctcctgcctaggagcctcccattaccgtgcgaggaggaggaggaggagggagtggaggaggctgggaggagggggaggagcaaaatggagcaaagaaaaagtcttggaaaggaagctggaaaaagtcccccaaactctagggcagttttcccgttaacacccactttttgctgtgcctcagacccgcgctctcctccaacttcttttgctttcccataccaaaagcaccatcttctcccttttccccgaacccagggggctcccctgaagccttcactttctctttagcttcacctcgcacccttgctcttccatgtacaatccttccctcctttcgcctagtctcttccaagactttcctgacacccacctctcaatggtcttcttcttctgcaagacaaactgttggataaatcattaaaagcaaactcatcagaaaatgggacagcggcggtggagaaaatgataaggaaaccaatctcagggaagccttaacgcagcctcccccgaccccctcggtcggttggggagggtttgccgcgtcgtccattgacagcgccctgacctccattcatcatcccaggatggagccagggaggaatggggagggagagctggggctggggttgggggcatgggttgggggtgctagtggccacggaaaagttagttacctatgcgtgtgtatgtgtacgcgcacgcgcgcgtgtgtgttggtcagaaaactttcagagctgtggttctcaaacttgatctgcagcaggactccctggaaggcttgctaaatccctttgctgggccccacctccagagtttctgattcagtaggtggacctgggaatttgcatttcaaataggttcccaggtgatgctgatgctgcaggtcaggggccacgttttaaaaactacctttccagggcagtgagaaggcaaatgttgagttggtggcaaattggattcccttcttattttttaggaatgaagcacaggttgtgagcggtcatccattccgtatcttcattgcagctgag

SEQ ID NO: 315365 - DNA, 4001 bp, Homo sapiens
gaaaaaaaccatcacagagctgggctgcctgtttaagacccagtcgtggaataaatcagaaatgtctgcacactgaagttttaaaatgacattcatccaatggtcaatgtgtaccgagttctggacaacaaagaactaggtgacaaatgtgtgctgggcacagtgcatctgcaggtggcacaagggcctgaaatcaaaatataatcttcactcagtccactcaaagaggtaactctgggtcaaaaacttaggcgaacccatttgaacttgcagagaagggatgaggggagcagcagaacaccccaccacacccaaaaagtgccagtttgggattgctggtgtgtggtttcggtattcttagctctactgccacatctctggaggagcacaactctgttccaagcaactctggcactgccacccccatccccaaaacaaaactctgccaaacaaatccccgaggctccattaactccttcaggtctgcctgcctctctcatccctcagcattctcccatcacctggaaaagcaaattaatactgaacatcctgaaagtcaagcaggcccttcaacacccccatgaaaattcttcctgggttccctgccctccccacagccccgtcccactggttccagagattcatttcccacaccttctcacagttacatcaacaaaaaccccaggaggacgctgctggcgcgaacacgcacacacgcgcgcgcacacacgtacacgcacacacgaactctctctctcacacacacacacacctctttcacctttgccccagcccctcagacacctcgggccactcggcttcagcctcgcccctctgcgccaacagctagggatgcttccctcaagctgcgtcgctcccggtccgctgagttcctcattttagtgtttttcctttagaagacgccaactatgagaaaccctcaccctccaaagaggccgagtgcgtgttgagtgactctacgcatttgccgccacgcctcgggttccccccacggcctggagcatggggccggggcgctggtgtcaaccttcggtggaagtttgggaggctggctggatccttcttccacccgagaagcttctgggaaccgctgaggcgaaaccaccatcgcccggccagaccgctgcggcagggaacgagatgcggcgcccctgggccccgtagcggctgcagcccccgggacccccgctgcccgcctcgccccaacttcttcgcccggcgcccggcgcgcccagcctcggccgcagctcccagccccgggcgcccggccgagcgctgggacccggctcccgccgccggcacgtcccccggcagccactcgctggcgctgcctcggcctgcggccgcctcccgccccctcctctccccgaaccaacagtaaacacaactttttatgaaaagaaaacaaacttcagcgacgtgactcacctctgctgcagccggcgcctgggaagggcgagccggggcccgggggccagcgtggtgggcgcgagggagccacacagcgccgcgccgcacggacacacaacacgctcggtgacaccggggacacacaacacgggcgagcggccgcggctggagcaacaaaggagccgaggaccgagaagttgcgggccggagagggagggcgcgtgcgggcgtgttgtggctgtggcgggcgtgagggtgtgcgcgccgtgtgtgcgcgtgtgtgtcttttctgtgtgtgtttgtgtgtctctgtgtgtgtgtctgtgcgcgcgcgcggcggctgacaccggcgggccggggctcagggtccccgcggcagaaagcggcggccgcgggggcggcagcaggaggacaacgcaggggacgccgcgcccagcgcacccggtccctccatatggaagaagctttttggatgactgaactcgcaaacaattccttcttttgcttctcctgcctaggagcctcccattaccgtgcgaggaggaggaggaggagggagtggaggaggctgggaggagggggaggagcaaaatggagcaaagaaaaagtcttggaaaggaagctggaaaaagtcccccaaactctagggcagttttcccgttaacacccactttttgctgtgcctcagacccgcgctctcctccaacttcttttgctttcccataccaaaagcaccatcttctcccttttccccgaacccagggggctcccctgaagccttcactttctctttagcttcacctcgcacccttgctcttccatgtacaatccttccctcctttcgcctagtctcttccaagactttcctgacacccacctctcaatggtcttcttcttctgcaagacaaactgttggataaatcattaaaagcaaactcatcagaaaatgggacagcggcggtggagaaaatgataaggaaaccaatctcagggaagccttaacgcagcctcccccgaccccctcggtcggttggggagggtttgccgcgtcgtccattgacagcgccctgacctccattcatcatcccaggatggagccagggaggaatggggagggagagctggggctggggttgggggcatgggttgggggtgctagtggccacggaaaagttagttacctatgcgtgtgtatgtgtacgcgcacgcgcgcgtgtgtgttggtcagaaaactttcagagctgtggttctcaaacttgatctgcagcaggactccctggaaggcttgctaaatccctttgctgggccccacctccagagtttctgattcagtaggtggacctgggaatttgcatttcaaataggttcccaggtgatgctgatgctgcaggtcaggggccacgttttaaaaactacctttccagggcagtgagaaggcaaatgttgagttggtggcaaattggattcccttcttattttttaggaatgaagcacaggttgtgagcggtcatccattccgtatcttcattgcagctgagaaaaccaagtcccagcagggctaagccatttgtttaaagtgaactgggagtttgtgccaagctggtgaggaagctgtcctggaaataagacagccaggctagtagtagggtgaatgggggtgctgccttccctgtgtggctggacagctgcactgggagtcaggaagccactgtgactttggaaagtcacttaacttttctgggcctctgggggttttgtgtgtgtgtgtgtgtgtgtgtgtgtgtgtgtgtgtgtgtgtgtgtgtgtttgtttgtttgtttgttttttgacagagtctcactctgtcgcccaggctagagtgtagtggtgcaatctcggctcactgcaaagtctgcctcctgaattcgagagattctccagtgtcagcctcccaagcagctgggattacaagcacctgccaccatgcgcggctaatttttgtatttttagtagagacggagtttcaccatgttgtccaggctggtcttgaacacctagcctcaagtgatctgcccaccttggcctcccaaagtgctaaaattacaggcgtgagccacctcacccggccctgttttgttttttattaacttgtttcttgtcagtaaacatacatactttacactgagtataggactctaattgaatctgaaccaaaagacctttacaaaggaaacataaatgtattttattccatattttgcactattttttctccggtatttagtcattcaggcagaagccaatttcctttttgatttatcgagtactttcagctctgtgcctggattcttaggcatgttcctctggcaaaatggatctggaggatgatgcattttcagcaagaaggtgaaaaggactctgaactctctctgtgcattatccacctacatttccttttcctacttaatcatcctaattttccttcccttttaatctctaacaatctcccccaacattctcaaagacctatttttctttccagtcattgactatattagcttccactttcttttgtcctccttccaaggcac

SEQ ID NO: 315366 - DNA, 4001 bp, Homo sapiens
cgaagcgggtggatcacttgagctcaggagtttgagaccagcctgggcaagatggccaaaacctgcctctatttttaaaagcacaaaaatcagccaggtgtggtggtgcacacctgtaatcctagctactcaggaggcgggggcatgagaatcatttgaatccaggaggaagaggttgcagtgagctgagatcacgccactgcactccagcctgggctagagtgagaccctgtctcaaaaaaaaaaaaaaaaaaaagaatttgttgaaaagcccaaataaagtctttactctctatctgatcataaaatgtgactcttacaaattagacataaaaatatccaagctgatatctccttgcctataaagcaagaaaagggacatttctcctttgcaaatcctaagcttaggcttttcaattttcagtcagtcgcctaggctggagtgcagtggcatgaacatggctcactgccttcagggctcaagtgatcctcctgtctcagcctcccgagtagctgggacaacaggtgtgcatgaccatgcccaactaatttttttgttgtcgttgttttgtagagataggatctggtcatgttgctcaggctggtcttgaactcctgggctcaagcaatcctcccaccttggcctcccaaagtgctgggattacagacataagccattgaactcagccacgattatagtcctaaacaccctgtatgaaaatactttaatacaaaaatgatgctcttctttgtcctgaagttgtcattatttcatcttcaagattagaacttctttgaatgtaggaagtggttcttattctgtgtctcccactatgccttaagagagggcctcatatggagctctagcatctctcgctgatgctttctgacaatctcttgctctgtcacctttgtactcctaaggccatcagtcctttagttagagaatcattcatttaaaaatctttccaaagtacactagtccctatatcctgtaattacacaagaaagtctaaccagtgccaagttctgttaaacacttggagaagaaggggtaggaatctcgattgctttgcttgctgttcataaggaagaatttaaggctgtcacaagcaggccatgcctaggaaagattctggtaaagatatctttctgctgaaggcacccgacctgtgttagctctgaggaatgggctagaagcagacagaacacctaccataagctatatatactagcaatacagagaggacttccaaggtcctacaagatcctggcatccctctgacctcatctcccaccactctcaccgcagcagacacaggaaacaggaaggaatggacaagacgggagtggttgacaacgggtccaactaaaaggcacgacgctagagggtatcgaccagatcctgaagatggggaacggtcaacagtcttgaaacagaggagtgacacggtcccggatgctcactttgagtgcaaagtggggaccggaatggatgcagagtacaaaggaggcagggagaccacttaggagaagaaccacggagcgaggatggggctgcctgacgcgtctaggagaaggacttgtagaatggatccagagggatggcaggaagccatgagctcagcgtagggcaggataaccctacagagactgtctacgggagcctgagggtcagggcgggagggagaaggtgggacctgaaggaggaagtgaaaacccgcaacagccgaaggctgcgggagtcctctcaaagcatctccccggcgccccagcccaaccacctcagcggcctccctcctccccgcctccccttgctggcccgctgaccgaacgagttgagaaagtctgcgattttcttgatgctgctggtgattatctcaatgtactcccggttagcccagtcctggtgaatctcccgctgcaccggatcctcctgtcccgccatggccgccgcctgaggaagagcgactgcgcaggcgccccgaccctacaggcctctagtgcgcctgcgctgccaggccacacccatcctcttgagcacccacgaattctcgggcactatgataggcctgtgcaacgtcacgtcctcgccggcgtttgctctctactcccacgctatagaacacagaagcctggacgccggcggcgaggttgtagtgcacgcgcgttatggtcgttacacggcgcgtggggtcttgccgtctccctcaactgctccaggctcaggttgcgcactcagtgtccgcagtgagatgggcacagtcgattaaatcacattaaatacaagtcttttttttttttagacggagtctaaaaaataatatggtcataaatagctgggcacactgcaaactggaacagtccctttcagaaggaaatttgtgtttttgtgttgttttttgagacaaggttttttcttgttttttgtttttttgagacggagtcttgctctgtcgcccaggctggagtgcagtggtgtgatctcggctcactgcaacctccgcctcccaggttcaagctattctcctgcctcaacctcccgagtagctggaattacaggcgcacaccaccacgcccggctaatttttttgtatttttagttgagatggtgtttcaccatgttggccagactggtctcgaactcctgacttcaggcaatccgcccgcctcggcctcccaaagtgctgggattacaggtgtgagccacctcgcccagcctgagacaaggtcttactgtcgcccaggctggaatgcaatggcatgatcatggctcactgcagcctcgaactcctgggcttgaactcctgggctcaagctatcctccagcctcagcctctggtgtagttgggactacaggctcacgtcaccacgcctggctaatttgtgtattttttgtagacacggggtttcaccatgttggccaggctggtctcgaactgacaggtgatctacccacctcggcctcccaaagtgctgggattatacgcatgagccaccatgcccggcctattatgcagtcatttaaatgctaattatgaacacaagcaacatgaaaacacatacaataaattgaggggaaaaacaaaataccctccctccctcccttccttccttccttttcttactttttttttttaagacagagtttctctgttaatgcccagactggagtgcaatggcacgatcttggctcactgtgacctctgcctcccgggttcaagtgattctcctgcctcagcctcccaagtagctgggattacaggtgcccgctaccacacctggctattttttgtattttttagtagagacggggtttcagcatgttggtcaggctggtctccaactcctgacctcaagtgatctgcccacctcggcctcccaaagtgctgggattacagacatgagccaccctgcctggcccacatttttctttaattgcaactatggaaaaatgtatgtttgaggacaagaaggatctacaaaaaaagtcactatctgctttgctaaggtagtggaatatgaacaactttattctcatttcagggaatacttacaatctggcatgcagtaaatgctcttttttttgagacagtcttgttctgttgctctggctggagtgcagtggctcgatctcggctcactgcaacctctgcctcccgggttcaagcaattctgcctcagcttctcaggtagctgggactacaggcgcacaccaccacacacagctaatttttttttttttttaccagagatggggtttcaccatgttggtcaggctggtctcaaactcctgacctcagatgatctacctgcctcagcctcccaaagtgttgggattacaggtgtgagccactgtgcccggccagtaaatgctttttattaaaaagaaaaaatgtggctcagtggctgggtgtgtggctcacatctgttaatcccagcactttgggagcctaaggcgggcgtattgcttggggccaggagttcgagaccagcctggc

SEQ ID NO: 315367 - DNA, 4001 bp, Homo sapiens
agtcctcctttctttttacaagttacagctgtttttgtctacacaggggatcttgccattccctgaatgttataacctctcattcctgcaaaatgatccctatttggaatgccctccatactttctgattggtgggctcctactcattcttcaaaaaaccagctcaaatgtcacttctgacacaacttctctgactctcccatggggagctgtttccacagcattccattctcacctctaccacagcacttgacatactgaaagttgtctcccccctggactgggagctgtgtagcaagggtaccagagcctatccacctctgtatccccagtacctagcatgcactggacattcagtttttggcgaacgaatgaatgacctgttgaacgaatagctgaatgaggggatcaccagactgagagctcagatgggatgaaggccatgtagaaagctgaatgggtgggtggctaatgctttagcgttggactcctgcagaaatcactggatcacagaaagaattcatttacttttgaggtctttatggggagcctggccctggtactgggtaggagatgtactgtgaaacaaagtgaaaactgaggtcatttagtcagtgacagcagcttgtattacatttgagctgttcacccactcacacatcaactgagtgactaccaagtgccaggccctaagggtacaaacacgaacgcgacaatctaggcatgctcagctccatgctggtccgcaggggccctccctccccgctccccaacattcctgggtgagtgtagacagcagatggcaccaggcctcaggaagcccagcttggtcagagactgccccaatttctctcggcctagttgagttcaaccattcagctaggggcttggcaccatcccagccaggcagggctatcatgagctccctgacaaaataacccctcttggcctctccacctgtgccttaaccaggcaagtgggctgctccagctccactgtcaacggctcctgattttcacatcagtaacgctacacgtccaactgcaactcttctatttcctacctgcggctgtgtctttaaacataaaccaaccgaagcacaaacaagctctcctctttccaagctgggtcccgggtgaatggttcccaaagtagcacagcgaatcagcaatctccccttggaacccggcagcagaggcacaggcgagggagacgagaacttagaccagaaagcccgtggggagggcccaaggagaatggcggctgcatctgcccctgaagctcagggggctggaggaagtaaggggcgggggccggagggatagggctgggccccggcagtgcccgcagcccactctccggatgcggcggcgtttcccctttgtggaagtgtaacaagtgaaacaaggctccccgcctgccactagcccgggcagccccgaaagatacactgttgccccaggatgcctgctgggaagcaatgcactgtcagttctcccaactggagttgccagagaggttcccgggccacgcggctcagtgcgcgtcccacgaacgtagcctaccccttccctgccggccactcccgccctggtcccaggcccgcactcaccggccacctcgagtccgggctcatcgccgggggcgcccgccggggctccgaccccacttggggaggtcggcggggaaagtcgggccgggaagggggagccccaactccggagaccgtagacctcgccaccccggccccctgccgccccacgctttggtcccggctccccgggattcctgagctgacccctgccgctcctggtcccgccggcgccctggggtctcaactccgtcggccgccgcccgtttcgcgagcccccaagatgcccggtctcgggaccgggcgctgctggaacaatggaggctcccagaggcagcgcgaggacagcggcggcggagaccgtggcggcaaaggctgtggcagcggcggcggcagcagcggcggcgacggcgtctgcgcagggtaaacgtggcgccgcggcgctactgagctgcactttcgccacggatccccgcccgcccgctgaggctcgaaagaccgtgctccgggattcagaaaggaccctggacaccccacagggcttctctagctctcccatcttagagtggagtttctggagactgaagtcaccgtactcgggatctggggtcgtcgggcggtttgtggcgaatctgcaaccacggacggtgagcgcggggctgggcgtgaggagcccgcccttctcccctccccctctgcctcctccctatccgctccctgcctcctgctggcgccgcggctgcgggagggacctggccttggtctcggaggaaggcggtgaggcggggccagagtcacggggcggggctgggggcagggccgggagcaagagggatgcgggctggagcctaagggaccggtagttatgggtaggaccggggcggggctggagactagaccggtctgtggggcggggcttgtgggagggggcggggctaccgcacagcgggggcctgttagaatagcggggtaaaaagtggggctaaacagaagaagagtactcgcgagagaaagggcggagctttggatgagcctggaaagtggagctggactagaaataaagaacaaagttggaaaaagcgatgcgacgctgaagggagcaggcggggcttggtaaggcaggggcggagctgtggggaaagggcaggaccgattagggataacggggcgtgactgaaggaaagggaagaaacttgggaaaagtaaaggagaggtgctagagaaaaggtatgggtctgagagaaggggctggtttggggccggtgggtgtgaaagggcttgtctggtaaagcggtgggaaatctgtgggttggcagggatgtgctgcgggttgctgattggaacatggtgccaaaacagctgatttaatgtgagtgggtcacctcctagcaatgtgaacgtgggcaagttcagttctttaagttccttatttgtaaaacagagctcgaaaactctgttgttagttcttgagggtttcagagaacttgcatggcagggggagacatccttaaacaatacttctccagttttgtcatcaaagaggagcgtgaaaggtcttccagggttctgggacaaagcccaaagcatctgaaagcttctatcttcttaatgcaaactttgcatttgacccaataaaatgtatgttttctaaaaaccatcccaataaaatcgacatgccaggaagaggtttgctgattaagatcttgggatctgaagtcaaactgatgaattatcttaaatgactcatcttctcagagcctcagtttccttatgggtaaagtgggaataatatatagtacctgttctcagagttgttgtgagaattaaatgagatgatgcttgtaaatcacctagcacacggtttgacatgtagtgaatgttcaaagaaaatattagctgttattatccttattaaaataattcagaatagatggatcaaagcagagttatactaagttatctcctttagtggtcaggaattcgtttgagaatctgctgagaactatgggtcgtgtgtaggattcggattttatggaaaaaagaaaaaaaacaactatgggcctctctcctgaggaaaaacatacaaagtttcacttattaaggtctttgaagaatgtatgaagaagtgattggatgaacgtgttaggatggggatgaatctaactgaagccatcctggttccctccctcttgatgtggccccagtcgttgggtcccatagtcttccttcgccaacatgcatgagacagaggtggaataaagatcagctttattattggcatgaaggcagagaggtggtgatagtgccaggccctctgcaggcaaggaggcggagggcttgtcagccagcactgatcctccaagttggccctcccagtgaagtccagggttccaggtgcctctggcttaaa

SEQ ID NO: 315368 - DNA, 4001 bp, Homo sapiens
taaatccatcaggagtccgtggttcgcctcacccacagcagttcatgggtctgcctgcagcagaatgtacagatgaagtacaaatgaaacactaaaaaggcatatgagcaatagacatcagcctccttccggtccctctgagctgcccaggtctttccagaatttcatatgattggctctgcaacatctgataaactacaagcagagcagcctgtttggttatcagaagagaaatgacaaattccccatacagggaactctcaataacaaggtgtttttccattcagctacagaagctttcccttggaaggagaacactaaagcctgggtgagcctccctcaagctaaaacccaaacagcaactcaacatgcagcaaaatggacagtgtttgcagtgctaagagctgtgtgctatccaactgcattactattatagctagtataaaatggacaaatcccacctctaaaaaggatgctcacaggctgacctgtctgccgcaggtttcaagctactaacagcctttcattactgttagttgtctaagaaatgacttctgaggaaataaacacacaagaggcacagtcgggcagccaaagaataaaaaattatgcgtcctcagtttatgtgcttccacacagaaaagccagggcaacatatatcagcagacccacatggagctggaagcacctccctcccaccccctgggggttttgctactccccaagcctatttggtgcaaagataatgccttccattttatcgtgtcatctcttagtagttttcctgagttttcagtctactgacttattatatattggcattcccttacagccttcattgccacttgactgtttttgcaggacctgggttggcatacatttaaaacaaactggtttcacagtatttaatcagatatgttctgtttaaagcattctgtgtgggtttcagcttttccactggtttgatctaaatcataaggtaacgagaacatatctggtgctggatgactcaatagcatttttgcttcaccccaaaatgtttccctaaaccttggtgaaagcacatgatcctattagtattgttgggcctaaataagcacctcttggtgtccagtgggcaattttcctttcccccaaaggtgattacagccactaaatgcccaaggaaagcccaagaccaagttcatggttcaactattttcatctctctgttcctcgcagtgacacttatcttccctgacagccactcccattgtgctgttttctcggcccagcacaatggacacatgcagacaccagcagacagggaggacgttttccatcccattgctctcctgtgcggagggaccaggttaaggttacataagcccctcctgagcagtcaggcccgagcgttggggagaagcgaatttggggttcgtgacggagtcacggtctgcaggccccgactgaccctgcgctcgtcatcctgccacgccaaggcggggcagctggaaaggaagggccgcttcccgcgaccacccagttcacgccaatccggcagggttcagagtgcggccggacgtcgaacctcgctgtccacactagatcgcgggatcctgggcccgggtcccggcctcaggctgcagctcaccgccccccgggcgccgagacacgcgcttacctgcccgggccagggccgggaccggggccggggccggggccagggaccggtggtaccgcggtcgaccgcgctgctcccgccgcggggagctgtccgccaccggccggtgctgaaggcggctttcctgcgccggggccggggccggggcccgggccggggccggcgccgccgggcggcagcggcccgtcgccagcgccgccctccaggctgacctcgttgcccatggcgggcaggcgggcgggcggggtcggggtcgcgctgcgcccgggccggcggctcccgggcggtgctcacactctcggcgccgccgctgccgccgccatctcccagctcggctcgcgccgccgcctgccgctgcgcatgcgcgtctcgcgcccccttccctgcacacgccccccttcccctgtgcgcgctcccgccagcctcggggtcgctgggaaacagccgccggcgcccgcgcatgcgctgtccagggccgacgcggttgtatcatgctgagaaggagccgggcgggggccggcggggctgcgagggccctgtgaggaggggcacctgccactagaagcggcctctgggacgtcgcgctgagccctgctttggagtcagaggggctttccgcctcggtgaactcgagagtagcaactctcctccgggtaaccggagtgccacagcgggcaggcgtcataaggacaggcctcggagaggagaggggctacccgagaatggcctcaaaagtatgcataggagttgggaaggcagaggaacaagtgtattcagagacgcaaggtcgtagagggaaggagagggagggtgctgggtggtcgggccggattgtgagggtctttaaggccagctggggagtggagcctttatccagatggcgatgggaaccatctgggattcacactgaggaactgggagtctcaggaagcgccccgggcacagatggaaggtgtgacagggctgtgtgaagccagctgggaggccacctcagtcagccctgggagagtgaccttggggatggaaaagaggacttgatggttctcaggcctggagctgtctcgatgcggggccgcaggttgcctctgcattaccctgagagctttccaaattacttccccgctccctcacatttacagccggtttctgcccgctactcaggattgtctgccgtggtggcttctcacacaagcctgtactttcctgtgggagaatatttcctaggagcctatattccagttcatctctgacgtcataaatcatgactgtgtagaaaggcgtgagtaacttgaacccattttacaaacccattcaattctcctaatgttgcgaaatatatcacatagggtgttagcagttctaactgaacctagaataatccagggatcccagtgaatgctgatagccagcctgctggacagaccggtggctgtgtcagttcttgtgaggaggggccaggaccctccctgggccttcccctgtgcactccgagctgctcctcccgacctctgggatggagcaagtaagagaaagaggaaatgcagagcccccacttcctgatattttctcctgacttcatacctcccgttttcacgctaaactgcctggcccctctgggatgacctaggatgaagagagcctctcttcctgcagatgatggtccttgctgtgtttcctcctgtgctgcaggatgtttgatacagcttcgtgagtggtgactacatgtgcacatttaggctccaaaagagtctgcacctcagccccgataggacccttggcaactgacttaggctcactgagcctccatttcctattctgcaaagttagaatcttagtagctcctcgaatatgggggattgtaagggtagagtggctgatgtagatattttattttttattcattttattttttttatttttattttttggagacagactctcgctctgtcacccaggctggagtacagtggtgtgatctcggctcactgcaacctccacctcccggattcaaatgattctcctgcctcagcctccctagtagctgggattacaggtgcccaccaccacacctggctagtttttgtatttttagtagagatgggatttcaccatgttggccaggttggtcttgaactcctgacctctggtgatcctcccacctcggcctcccaaagtgctgggattacaggcatgagtcaatgcacccagcctgatgtaggtaaaacaccaggacaagtgcctggtatacttatgacaactctgttattagttgtctccctggtgatggtctgggatgtggcggtcttgtgccatatatttcctcctggggaagaatatg

SEQ ID NO: 315369 - DNA, 4001 bp, Homo sapiens
tacctcactcccgtgcacccattgtatctaggaagtaactatcttgcttttatttatttatttttaaatttaattttattattttttttgagacggagtctcgatctgtcccccaggctggagtgcagtggcccaatctcagctcactgcaagctctgcctcccgggttcacaccattctcctgcctcagcctcctgagtagctgggattacaggcgcctgccaccatgcccgcctaattttttgtatttttagtagagatagggtttcaccgtgttgaccaggatggtctccatctcttgacctcatgatccgcccgcctcggcctcccaaagtgctgggattacaggtgtgagccactgcgcccagccactagcttgcttttgattttacaggctcataggcggaagggacttgccttgtctcagatgaaactctggactgtggactttcgagttaatgctgaaatgagttaagactttgggggactgttgggaaggcatgattggttttgaaatgtgaggatatgatatttgggaggggccaggggcagaacagtttggctgtgtcctcatccaaatctcatcttgaattatagctcccataatccccacatgtggtgagagggacccagtgggaagtaactgaatcatggggaggggatttttcccatgctgttctaatgatagtaagtctcatgagatctgatggttttataaagggcagttcccctgcacacgctctcttgcctgccaccatgtaagacatgcctttgctcctccttcaccttctgccatgattgtgaggcctccgtagccatttggaactgtgagaccattaaacctctttttctttataaattacccagttttgggtatttctttatagcagtatgaaaatggactaacaccgtccacatatgcagggaggcaaccacttcactctcctctgcttggggtggggttgaggggttgagaaaaagaggggaagaccttttgaaaagacccaggactacagtttgaaaatgtctgggtttagaaatcgtttcacttccagtgcttctcactcatttcactacccatgacccactcccctctcatctctttactgtccacttatcactgttctttttgcttaaaatgactccaaatcctcaaaaaattaaaagttccactgtttattacaattggaaattttatgtttattgtcactgagcagagggtctaatgactccaaggcagtagtttcagatattgcacattgcaaacgattttcacacaaaaatgttttaaaaggctatcgggtgcagggctggttgtaggtagggacccaacctaagaattatgaaacgccatagttcctaattttggaaagatattagcggagagtaatatggattagtagcaagggctggagaaaacagtgctctatactaccttcaaggtgctcttttcatcgcttgtgacccaatggctgaatagtgggtaggaaacaggattcaggatctcaggcacggtctggatctactgactctgagcgtcattttatctcttgctggggtacacatctgcttctggatttaagtaacgtgcgctacaataatttaaggactataaaaccacaaggttatgagagcgtaaaccacaaagcgtgtaagtaaatgcctagaaaacgcaacgcggtagcacagcagcaacgcacaaacagccccagcaaacgacgcgcgccgggcttcccagctcccggcagcctttgcgcagccctccccaagtccaactgggcgcccggggcggggtctggaccgcacgcccttaccacaccccctccgcgccgcaccacgccccctccgtacctgctcttagcgcgccttccgccctgaatatgcgcatgcgccattctccctttacagccccgaaaacgctccagctggccgactcggagacaatggcgagaggcctcagagttcggcttcttacctgctttgcataggcagcaatctcctgctagtcccgcctccctctggcattctggcgcgcgaatggaggagccgagaagagagcgcagttctgattggagaacgcgcgtgtttacattctcacctctcccgggaagtggacgaatttagaccgcctcttccttcccgttgtttaaggcagttggttgccctcctgtccgtcagaggtgcagtaccagaggtggcgtgctgccgatttcgcgtttgccttgctggatgattccgcttgtttgccggctgcgtgagtgcttagagcttttcggtggaagatgccggacagtaacttcgcagagcgcagcgaggagcaggtgtctggtgctaaagtcatcgctcaggccctgaaaacgcaagtacgatggaccttcctggaatgaaaggctcctacggaagctggcggggaccgcgatgttgtcttggagacgagtagaaatgggcgatgggggtcggggggttttccttttagcgcccgggagggagggaaggatgtggcgatatggtggggccttgggagtttactcccctgttcttcgttcctcaggatgtggagtacatatttggcatcgtaggcatcccagtgaccgaaatcgccattgctgcccagcagctaggcatcaagtacatcgggatgaggaatgagcaagcggtgagtatggactcaggtggctgaatgcgttactgggaatgatcagtaatagcggtaggtatgcattgcaaacacccagatagcgcttaccactcttctgctactttacatatatcatatcaatcactgttgaatattaactgttgttacaccaagttgacagatgagaaaagacacaggttaagtaaaacttgcctttggtgacacagctggtagtagcagagccagggtttgaacccacgtattctgggtctgagtccattctcttactactatactgtatgtcatgattggaatggacagtttatgagtaaagtctgacttccctattaggctacaagctccattagagcagggatattatttcttcacgacacatctgtacccccagtgcttagtgtggtgcctgcataagaaaggtgttcagagattacctgtgggataaatgagtgaaggccaaggctttgttgtatgattggttcggggcagggtggaggatatcacaaatggtagtgccttgatggaaactcagatggctcagatcctagcctgatgctttttccaccacatcatgctgccacctttcttagaggcttatttggaagcaggataaggaagatacgacgttttgtcaatccactttaagtgcatcctctgccaatccaccttgctcttctctcagtagtgcgggcttgaaaggtcaagaatccacttctgtgatatcacatactctcagtccagctgaggctaaatattcctgctttacactcccaccgttgccttctaatttaaattcttgcctcctcttgcccaaacaactgcctggccaccctaagtggtgccttttgccatcatacatgagtgcctggagggcagaagttgtgattcatttgttatatcaccacagtgcctggcttggtttgtgctttcacgtggtgtagatgcttaatattatacattatttattaattgaatgacattctttattgaatgacattctttattgaatgacattctttatctacaaggtttgagatttgtattttttaatcttaaaactaggaggttttgagtttctgttgcttctacattttacttgtctttgttagaacaacattctgttctttcatctgtgtgaaaaaatgaagctattgacctatgaatggaacctatacttaactgtttttgtagagatgacatatctgccactgatttcttcatacagcaaacatttattgactaagtactgtatactaaggattgtgctacataacctgtaggagagagggatgtaaagaaggagtgaggtttagtcttgatcttcacgttgatcagtcctggaagg

SEQ ID NO: 315370 - DNA, 4001 bp, Homo sapiens
ggctcataggcggaagggacttgccttgtctcagatgaaactctggactgtggactttcgagttaatgctgaaatgagttaagactttgggggactgttgggaaggcatgattggttttgaaatgtgaggatatgatatttgggaggggccaggggcagaacagtttggctgtgtcctcatccaaatctcatcttgaattatagctcccataatccccacatgtggtgagagggacccagtgggaagtaactgaatcatggggaggggatttttcccatgctgttctaatgatagtaagtctcatgagatctgatggttttataaagggcagttcccctgcacacgctctcttgcctgccaccatgtaagacatgcctttgctcctccttcaccttctgccatgattgtgaggcctccgtagccatttggaactgtgagaccattaaacctctttttctttataaattacccagttttgggtatttctttatagcagtatgaaaatggactaacaccgtccacatatgcagggaggcaaccacttcactctcctctgcttggggtggggttgaggggttgagaaaaagaggggaagaccttttgaaaagacccaggactacagtttgaaaatgtctgggtttagaaatcgtttcacttccagtgcttctcactcatttcactacccatgacccactcccctctcatctctttactgtccacttatcactgttctttttgcttaaaatgactccaaatcctcaaaaaattaaaagttccactgtttattacaattggaaattttatgtttattgtcactgagcagagggtctaatgactccaaggcagtagtttcagatattgcacattgcaaacgattttcacacaaaaatgttttaaaaggctatcgggtgcagggctggttgtaggtagggacccaacctaagaattatgaaacgccatagttcctaattttggaaagatattagcggagagtaatatggattagtagcaagggctggagaaaacagtgctctatactaccttcaaggtgctcttttcatcgcttgtgacccaatggctgaatagtgggtaggaaacaggattcaggatctcaggcacggtctggatctactgactctgagcgtcattttatctcttgctggggtacacatctgcttctggatttaagtaacgtgcgctacaataatttaaggactataaaaccacaaggttatgagagcgtaaaccacaaagcgtgtaagtaaatgcctagaaaacgcaacgcggtagcacagcagcaacgcacaaacagccccagcaaacgacgcgcgccgggcttcccagctcccggcagcctttgcgcagccctccccaagtccaactgggcgcccggggcggggtctggaccgcacgcccttaccacaccccctccgcgccgcaccacgccccctccgtacctgctcttagcgcgccttccgccctgaatatgcgcatgcgccattctccctttacagccccgaaaacgctccagctggccgactcggagacaatggcgagaggcctcagagttcggcttcttacctgctttgcataggcagcaatctcctgctagtcccgcctccctctggcattctggcgcgcgaatggaggagccgagaagagagcgcagttctgattggagaacgcgcgtgtttacattctcacctctcccgggaagtggacgaatttagaccgcctcttccttcccgttgtttaaggcagttggttgccctcctgtccgtcagaggtgcagtaccagaggtggcgtgctgccgatttcgcgtttgccttgctggatgattccgcttgtttgccggctgcgtgagtgcttagagcttttcggtggaagatgccggacagtaacttcgcagagcgcagcgaggagcaggtgtctggtgctaaagtcatcgctcaggccctgaaaacgcaagtacgatggaccttcctggaatgaaaggctcctacggaagctggcggggaccgcgatgttgtcttggagacgagtagaaatgggcgatgggggtcggggggttttccttttagcgcccgggagggagggaaggatgtggcgatatggtggggccttgggagtttactcccctgttcttcgttcctcaggatgtggagtacatatttggcatcgtaggcatcccagtgaccgaaatcgccattgctgcccagcagctaggcatcaagtacatcgggatgaggaatgagcaagcggtgagtatggactcaggtggctgaatgcgttactgggaatgatcagtaatagcggtaggtatgcattgcaaacacccagatagcgcttaccactcttctgctactttacatatatcatatcaatcactgttgaatattaactgttgttacaccaagttgacagatgagaaaagacacaggttaagtaaaacttgcctttggtgacacagctggtagtagcagagccagggtttgaacccacgtattctgggtctgagtccattctcttactactatactgtatgtcatgattggaatggacagtttatgagtaaagtctgacttccctattaggctacaagctccattagagcagggatattatttcttcacgacacatctgtacccccagtgcttagtgtggtgcctgcataagaaaggtgttcagagattacctgtgggataaatgagtgaaggccaaggctttgttgtatgattggttcggggcagggtggaggatatcacaaatggtagtgccttgatggaaactcagatggctcagatcctagcctgatgctttttccaccacatcatgctgccacctttcttagaggcttatttggaagcaggataaggaagatacgacgttttgtcaatccactttaagtgcatcctctgccaatccaccttgctcttctctcagtagtgcgggcttgaaaggtcaagaatccacttctgtgatatcacatactctcagtccagctgaggctaaatattcctgctttacactcccaccgttgccttctaatttaaattcttgcctcctcttgcccaaacaactgcctggccaccctaagtggtgccttttgccatcatacatgagtgcctggagggcagaagttgtgattcatttgttatatcaccacagtgcctggcttggtttgtgctttcacgtggtgtagatgcttaatattatacattatttattaattgaatgacattctttattgaatgacattctttattgaatgacattctttatctacaaggtttgagatttgtattttttaatcttaaaactaggaggttttgagtttctgttgcttctacattttacttgtctttgttagaacaacattctgttctttcatctgtgtgaaaaaatgaagctattgacctatgaatggaacctatacttaactgtttttgtagagatgacatatctgccactgatttcttcatacagcaaacatttattgactaagtactgtatactaaggattgtgctacataacctgtaggagagagggatgtaaagaaggagtgaggtttagtcttgatcttcacgttgatcagtcctggaaggtgagggtaagacttacagaaaaagactcatctattataactctcacaatagatgtagtagcacagaaggggtgactggttctctttgaggacagagaagattgcctgtagaggtaatgttagttcatgtggttccctcaaggtaggtaaaggcatggtgagctgtgagactggtaggtaggttgaggggaggttgtgggaaatctaaaaagagtttgaatttttttttttttttaacagtaggcaatgggggagactaaaggtttttctaaacaggtgggcgatgtaattagatttgtacttcagaaagatgatgcgaggcatggttgtacatgccagtaatcccagctacgaagggggctgaggcaggaggattactcaagtccaggaatta

SEQ ID NO: 315371 - DNA, 4001 bp, Homo sapiens
gggagagggggttgtagcctgtaaaaccacaagggcagagctgcccaaggctgtgggagcccacctcttgcatcagcatgatctggctgtgagatacgaagtcaaaatgatccaaagatcattttggagctttaatatttgactgccctgccagattttgaacttgcatgggggctttagcccctttgtcttgaccaatttctcccatttggaacgggtatatttacctcactcccgtgcacccattgtatctaggaagtaactatcttgcttttatttatttatttttaaatttaattttattattttttttgagacggagtctcgatctgtcccccaggctggagtgcagtggcccaatctcagctcactgcaagctctgcctcccgggttcacaccattctcctgcctcagcctcctgagtagctgggattacaggcgcctgccaccatgcccgcctaattttttgtatttttagtagagatagggtttcaccgtgttgaccaggatggtctccatctcttgacctcatgatccgcccgcctcggcctcccaaagtgctgggattacaggtgtgagccactgcgcccagccactagcttgcttttgattttacaggctcataggcggaagggacttgccttgtctcagatgaaactctggactgtggactttcgagttaatgctgaaatgagttaagactttgggggactgttgggaaggcatgattggttttgaaatgtgaggatatgatatttgggaggggccaggggcagaacagtttggctgtgtcctcatccaaatctcatcttgaattatagctcccataatccccacatgtggtgagagggacccagtgggaagtaactgaatcatggggaggggatttttcccatgctgttctaatgatagtaagtctcatgagatctgatggttttataaagggcagttcccctgcacacgctctcttgcctgccaccatgtaagacatgcctttgctcctccttcaccttctgccatgattgtgaggcctccgtagccatttggaactgtgagaccattaaacctctttttctttataaattacccagttttgggtatttctttatagcagtatgaaaatggactaacaccgtccacatatgcagggaggcaaccacttcactctcctctgcttggggtggggttgaggggttgagaaaaagaggggaagaccttttgaaaagacccaggactacagtttgaaaatgtctgggtttagaaatcgtttcacttccagtgcttctcactcatttcactacccatgacccactcccctctcatctctttactgtccacttatcactgttctttttgcttaaaatgactccaaatcctcaaaaaattaaaagttccactgtttattacaattggaaattttatgtttattgtcactgagcagagggtctaatgactccaaggcagtagtttcagatattgcacattgcaaacgattttcacacaaaaatgttttaaaaggctatcgggtgcagggctggttgtaggtagggacccaacctaagaattatgaaacgccatagttcctaattttggaaagatattagcggagagtaatatggattagtagcaagggctggagaaaacagtgctctatactaccttcaaggtgctcttttcatcgcttgtgacccaatggctgaatagtgggtaggaaacaggattcaggatctcaggcacggtctggatctactgactctgagcgtcattttatctcttgctggggtacacatctgcttctggatttaagtaacgtgcgctacaataatttaaggactataaaaccacaaggttatgagagcgtaaaccacaaagcgtgtaagtaaatgcctagaaaacgcaacgcggtagcacagcagcaacgcacaaacagccccagcaaacgacgcgcgccgggcttcccagctcccggcagcctttgcgcagccctccccaagtccaactgggcgcccggggcggggtctggaccgcacgcccttaccacaccccctccgcgccgcaccacgccccctccgtacctgctcttagcgcgccttccgccctgaatatgcgcatgcgccattctccctttacagccccgaaaacgctccagctggccgactcggagacaatggcgagaggcctcagagttcggcttcttacctgctttgcataggcagcaatctcctgctagtcccgcctccctctggcattctggcgcgcgaatggaggagccgagaagagagcgcagttctgattggagaacgcgcgtgtttacattctcacctctcccgggaagtggacgaatttagaccgcctcttccttcccgttgtttaaggcagttggttgccctcctgtccgtcagaggtgcagtaccagaggtggcgtgctgccgatttcgcgtttgccttgctggatgattccgcttgtttgccggctgcgtgagtgcttagagcttttcggtggaagatgccggacagtaacttcgcagagcgcagcgaggagcaggtgtctggtgctaaagtcatcgctcaggccctgaaaacgcaagtacgatggaccttcctggaatgaaaggctcctacggaagctggcggggaccgcgatgttgtcttggagacgagtagaaatgggcgatgggggtcggggggttttccttttagcgcccgggagggagggaaggatgtggcgatatggtggggccttgggagtttactcccctgttcttcgttcctcaggatgtggagtacatatttggcatcgtaggcatcccagtgaccgaaatcgccattgctgcccagcagctaggcatcaagtacatcgggatgaggaatgagcaagcggtgagtatggactcaggtggctgaatgcgttactgggaatgatcagtaatagcggtaggtatgcattgcaaacacccagatagcgcttaccactcttctgctactttacatatatcatatcaatcactgttgaatattaactgttgttacaccaagttgacagatgagaaaagacacaggttaagtaaaacttgcctttggtgacacagctggtagtagcagagccagggtttgaacccacgtattctgggtctgagtccattctcttactactatactgtatgtcatgattggaatggacagtttatgagtaaagtctgacttccctattaggctacaagctccattagagcagggatattatttcttcacgacacatctgtacccccagtgcttagtgtggtgcctgcataagaaaggtgttcagagattacctgtgggataaatgagtgaaggccaaggctttgttgtatgattggttcggggcagggtggaggatatcacaaatggtagtgccttgatggaaactcagatggctcagatcctagcctgatgctttttccaccacatcatgctgccacctttcttagaggcttatttggaagcaggataaggaagatacgacgttttgtcaatccactttaagtgcatcctctgccaatccaccttgctcttctctcagtagtgcgggcttgaaaggtcaagaatccacttctgtgatatcacatactctcagtccagctgaggctaaatattcctgctttacactcccaccgttgccttctaatttaaattcttgcctcctcttgcccaaacaactgcctggccaccctaagtggtgccttttgccatcatacatgagtgcctggagggcagaagttgtgattcatttgttatatcaccacagtgcctggcttggtttgtgctttcacgtggtgtagatgcttaatattatacattatttattaattgaatgacattctttattgaatgacattctttattgaatgacattctttatctacaaggtttgagatttgtattttttaatcttaaaactaggaggttttgagtttctgttgcttctacattttacttgtctttgttagaacaacattctg

SEQ ID NO: 315372 - DNA, 4001 bp, Homo sapiens
tctatttaataatatttgactccagttgtagctatgtgactgtaggcatctgatggaaggtggaaaattcagtcaaccatctaagcacctagttgacttaatactagatacttacaaacataaagatgtttgagtaactaaggacttttttactttgcacttggttgtgtggcatcctggcatcatagagacatattccaaactacacagtttaaaattatagatagactttccatagaacctcagtggccagattttctaatttaaaattgcagtagccaaactgataaatgtgtgcttgtagggaataataagacagaatatttaaaacctgaaaaatcactgggcatggtggctcatacctgtaatcctagcactttgggaggctgaggcaggtggatcacttgaggtcaggagctccagaccagcctgcccaacatgcattgcatccatagcttggctgactttcttaaaaaacaggttgatggcaagaaaagagaactgagtagatgttataaatagttaagtacaaatctatcactacttcttgcgaaaatgctcaggctgccacactgatgatgaatagatagctcgttcttcccaaactgagtgcagtagagtgttgcagtgctcagttgggtaggacagatgttggataattggggttatccaacatctctactaaaaatacaaaaattagctgtgcgtggtggaaggtgcctgtaatcccagctactagggacgctgaggcaggagaataaattgaacccgggaggaagaagaatcgattgaacccgggaggcagaggatgcagtgaggcgggatcacgccattgcactccagcctgggtgacgagagcaaaactcttgtctcaaaaaaataaaaaaataaaacctgaaaaatcagaagcttctgatgagccactcataggcttttcctcttgataatatgtgggttcctatgcaatataaggtaggaagcgactttacaataaaaaagaaattgcctttttttttttttttttttttttgcctgtataaagtctttgcaggggtggctaaatatcatctttgcagaatccaacttattttctgtgttcaattgacaaccaagtaggaaccattccctttcaacaaaatagaagcaatgacgaaaagttctgctcctatattttgtagcattttctcaatcggtattctcaaggcatacatcccaatgaagcaagtatagagattttatttagaggtaatattatttgagggtaaccatggagatatgtataattccgattatccaacaactgtcctacccaactgagcactgcagcactctactgcactcagtttggaaagaacgagctatctattcattatcagtatggcagccagagcatttttgcaagaagtagtgatagatttgtacttaactatttataacatctactcagttctcttttcctaccatcaacatgtttttaagaaagtcagccaagctattgatgcgatgcctatgattaggcaggtgaatactatgttctaatttggtttatgctctacgatgtcttcggtaagcaaatgtaacagcttggtttcatctacgattacccacttcgtataaacgttacaccgtactaagttcagcaagggagaatgttgcctccaagaccccctgagaaataaaaccagaaataacctaagcaggtgccttaccatggatgttccagatgtccagatatgggattaagaagaagacccaaaataatttcccagttccaagcatggcaggcaatgtcttcatttcctgcacatatcagtgatggaaaaactgctcaagtagaaggctttgcttcgtcttctgagtgctgcagagttgggtcagtttacctaccccagtggcatctgtgaaataactaaaaaaaaaaaaaaaagaagagagaggtggtaagagaggagagtaggaagagcctggatgattttgtgaaaaaaagtgaacagaaagacgatgtggtactctgttctgtggtttttgcttcttgtcaggttggctgttcactttcaaacactgtgatctgcaaagcagctcagtccttaacttctccttccgctctaccacgtttttgccccaggttgaggtttttcctgcactcaatgttcagtgaaatgagcaattaaactttaaagaaatctgtattgttgcagtctttaagttgagattttaatcaaattaaggtcaggaaatttatggtaaaactatcaatggtaagtatacattttcccctttgtgatagcttgtgattatgaaacttcttttatgtaaaagattttaggtttcttttttttcctgtacatgtcacggtaagatgaggatgcttattgtcattaaaccagtgaagatttatctcaggttatggagaaaatgagtgacaggaagcacttcctcaacagaagaaggaagagcagccgtctttaatctgtggatacatatcaatggaacaagatcatcattaatattggctacatgttctctctagataataaagttctaatctaaaggagatcttgaatatcaattaaaggaaatttccattttaaacattcttcatgcagttgttgtctcgatgaagtagaatagaaacagtaaaggaagaaatggaaaagttcaagatcagatagcacaggccaccataggactgttttctccacatccacttgtaataattagcttagcttatagtcataggagctaatcaaattcatctgccatttgagactccaaatgagagatctagatttgtggcattagtgatcattgacagaagtcgattatataagttttttcctcagagactgatgattttattccaaggccaaacttcaatagttttaagttcaaggaaagttttaagagcaaggaaagtgtatagattgctggacattttgacctgacatgggaaactgatgggcaatacttaattcagagctcccagttgagttgccaagggtaaattaaaattaaaaaacagttatcatgtatttattgagtcaaatagacaatgtgctatggttggagatgaatgatgaatgagttgctattgctgattttaaagaactcgttcaatcagtattacgacttcctcacatccacctttagtgttggtcttataatatagtataatacagagagggtacacatagccttttagaatttctgttactaatcaaataaacatcctgggaaatattaaggcagtattttcacagctccttccttttcctgtgttcacagtgagtaaaagcttcttgaggcagctgaagcaaggctcattgtccctttaaaatggcccacaggtcaaaagccataaccttatggcttatgggttacataagcccaaaccagagagagatcatattaactttatctcagcttaaaactgttatgtcactattttaaatatttttcatataaaaagtccatgctaattagacaaaattcggaaaaaatcttatgtagcatctaatgtatttttaaaagatttatatatttcttgcttttattagcatgcctagcactttatccctccacaggtagagtcctgagtgtcccactgtagataaaaccctgcctctgaatctcactcctgtcttcgttctagttaaaaaaaaaaaaaaaaaaaggaaagaagccagactcagaaattaattagctcagtaacaagtcaatcttgccttaagcttataacttttgtaatcccatcataattatgtatattgtttgatccaaaaattacaattttcatttatatttgcaaatttaaagagtttactacattcttgaaagcgatggcattacatattgaaacaattttaaaaacatgaacgtctaatcagttttatgttgaaagacaaaaaggaaatagaatttagtatcttcaaactctctttacaaacatctcaggaactacttggagggcaaatttttcagttcacttgcagactcagttg

SEQ ID NO: 315373 - DNA, 4001 bp, Homo sapiens
aggaggaaaagagtgaataatacaaagcaaagagcaggactggctacacaatttgcagggtccagtccaaaatgatgcaagacaatggcatgagagcattaaaccaaatgcaggacctgtgactgtatataagtcacatacccaagaagccagccctgtgtaagaggtttagagaagcccattaaatgccaatgtggagcctagaaagggtgggaggaggggcaaatttatctatatattacttacaaagagtaaaaatacatagaacataccttttaatcttgcttattcataagaaacaatgaaattccctaacactaaaacctcttaagtgtcagaaaattaaaatgacatgcttgcaaatttttaagtcatcctgtgtatacaatatttcactaacaaagccagtccaatttctatatctgaatcatccctttaaaaaaacttacatttcttcatgtcttttagaaaggcgaatttcttgagcaaacaaggaagtcatctttaatcaaagctgtcataaagaataaaaacatttaaagttacttctaccacatgtcctcagctttgcaacatttgattattttagtaccttaatccattggttctctcagaagagaaaagaaaacttaagatgtaataatgtataaaatgaaaggatgcaattaaacacatttttattcagcatgccagatacatctaagaatactatgaattaggtaaacccaacatatttcatattgtcttctctttctagactctaaccttaatcagaattaaaaacaaacaagcagctggtactaagactactaaacgttttattgaatcaacagaaaaaaaatctgctctgtaaaattcaacacaggaacaccatcccttatgcatgtgcaaacacacatagacagaaaggcaggcaaacaagtatgagaaccaactggaaattcaaggtctttcctttattggaagagtgcccagttctaccatctctcttctaaataggaaagtacttttcatgtgtaactgcgaggaaaagcacaattagatagataccttccccttcccctggctgctaagcactctcatttgtggagtgcaggaaagcccattttcgtggcacacttcacaccacgagcaagctcaccttggctaaagacactggaccgacacagacagaggtctagtgaaatgctctgaaggcctccaaaactgcaggcaactcatctggttgggcttaaaaggttaaagtgcttgccctaagggagaaaaagaggaataaaattccttcctgaaatgaagctttcctaaattttatgaaattaaacatctatgcactctataaagattgtctaaagattgacacaccgcctgagtgtccagtcctgctagaaagcccacgcttattgagtgtagggtgctgaacccggccaaggaaaacggaaacaccgccctgccctcattaggtttcctcctctgggcgtggctgcctttccttcagcaccgcggacagcaatcgctcacaggcccgccctccggggtctaaattacagatattttccgctaacatcacccgcaggccaagtcttgccgccttcctctcggtttccttttgcaacgaggccaattaatgcagcgccaagggaatcccggaaagtcggttcatggtaacttttctgtgaggcccactatcagcactttagacaaaaccaaatcacattctccccttagaatcgaagatccgcaccttctcagagtcatctgccctccggccgccccaactcccgcttatacccaaaggactcatgaaccttcctcatcagcctggctctttacgttaacaacatcctccccagcggtcctgcaaggccctgcgcggccgtcaggcagtcagggcacccacccactgtccgactccactcaccgagcccgcctctgagcccttccgggaaggcaccagctactgcgccgacgccggggccttagcgcaggccagggcgtggtcacgttaccatatttgcgcacgcgcggcgcgcggtgacgtcaccgcatctttataaagggccgccttggggcgcgaaaagttcgtgaggtgtagtcgcggcaaccaggaggtgggcgtgtggtaacgcggcgcgcgggagggtggcttgaaagggtctttatgaaccctagggaaaggccgtctggtaggaactccatttcaagaccttttaaagtgagacctgcatatgttgaaagagtttcagagagtgaagctgggttcttagaagctggaatgtcccagcagaatgtagaaatgcgaaaaattcggcacagtagtctaaagtgagtcgagtttacagtcggtttattcaacgaatgcctgtggagcagtttcgaggtgcttcgtcctgggcgtcttatactgagcagagcagcaagagcccctgcctgctcatagttggtagaccctgtgttgacagtagtattgcttgatcatgccttgcggggtttctgagtgtcagtcgacatatttacgttggttatctcattgagtccccgcaaagccctgtgaaatgggcacattagcttcatttgacagccaaggagacaagcttggttgttaatttagcactttgtaatatctcgtttctgtaaagtgcgtttcttaattttcgttccttgaaataagtatatggtagtgtcagtcctctaatatacagaggaagaaacaggttcaagagaggtaaagttgttttctttataaattatactctgctggtaaaagacaaagagctaggactccaaaatccaaggtgttttttaaattttctcctcgtagaatatttacataaaacgtagctcttgcgtcaggacttctgcacttaatgtttcctttgcttggaaagccccttctgacatttatagatttgattccttgtatctttcgatctgtcacctcacaggaccattccttcaatctccaatataagaatatctccacctcctggctccctatcctccacctgctttatttttttccgtaacacagtaacattgcatatattgtgtaatcactcatttatttgtttagcaggtgcacccaccactagaatttgaacatcctaagaacaggtatttttgtctctgctttgctgatgtatcctcagcaaccggaactgcctgacatgtaagtgctcagtaaatatatttgaatgaacgaatgaaataattcctcccgttaacattcatcataatttcagagtactctaacttcacttgataggaactttgattttgctgttccttacccttaccacttaggaaagatgaaaagtagacccttgagtggtcctctgttctaggaatgaaatagagcttttgcatggttataaggaattcttgtttattttttatgtacatttacaaataaggatttttcttaagttggtaatgggttgcatgaaaataataactgtaggctcattacagcatttgtatgttgcttgacaaactgcttacctccctgctttgtgtaagtttgcatagtaacacagttgggacaaatccggctctttcaactttgagcccaacttttgtaggtcaccatccgccttagctgtgaactaaggaataccttgggagttttcttgcagtttttaagaacagcaatcaggaatatatcacagacacttgggggttatctagatagactttgataatttattttatagcatccaataaaggtggttactttctacttaaaggtctgtgatagctgcccttctcattatattgcccacagctgatcctttctgtgagacaccaggctgttgaggaagaatctatggcaacattgtatctattaatatacagcttctgtatttatcaggtaagtttggatactttctggagtgaggcattcacagccatgaaaattattgcaacctactaagtaacaactgacccataatgagataatctgcaaaggtggtgtgaaattaatgtttcctaacccctggact

SEQ ID NO: 315374 - DNA, 4001 bp, Homo sapiens
tcttaggagccaaggaaagaacgtctggtaattaattaaagaaaaggaaaacctgaaagcccacaaacagaggaggaaaagagtgaataatacaaagcaaagagcaggactggctacacaatttgcagggtccagtccaaaatgatgcaagacaatggcatgagagcattaaaccaaatgcaggacctgtgactgtatataagtcacatacccaagaagccagccctgtgtaagaggtttagagaagcccattaaatgccaatgtggagcctagaaagggtgggaggaggggcaaatttatctatatattacttacaaagagtaaaaatacatagaacataccttttaatcttgcttattcataagaaacaatgaaattccctaacactaaaacctcttaagtgtcagaaaattaaaatgacatgcttgcaaatttttaagtcatcctgtgtatacaatatttcactaacaaagccagtccaatttctatatctgaatcatccctttaaaaaaacttacatttcttcatgtcttttagaaaggcgaatttcttgagcaaacaaggaagtcatctttaatcaaagctgtcataaagaataaaaacatttaaagttacttctaccacatgtcctcagctttgcaacatttgattattttagtaccttaatccattggttctctcagaagagaaaagaaaacttaagatgtaataatgtataaaatgaaaggatgcaattaaacacatttttattcagcatgccagatacatctaagaatactatgaattaggtaaacccaacatatttcatattgtcttctctttctagactctaaccttaatcagaattaaaaacaaacaagcagctggtactaagactactaaacgttttattgaatcaacagaaaaaaaatctgctctgtaaaattcaacacaggaacaccatcccttatgcatgtgcaaacacacatagacagaaaggcaggcaaacaagtatgagaaccaactggaaattcaaggtctttcctttattggaagagtgcccagttctaccatctctcttctaaataggaaagtacttttcatgtgtaactgcgaggaaaagcacaattagatagataccttccccttcccctggctgctaagcactctcatttgtggagtgcaggaaagcccattttcgtggcacacttcacaccacgagcaagctcaccttggctaaagacactggaccgacacagacagaggtctagtgaaatgctctgaaggcctccaaaactgcaggcaactcatctggttgggcttaaaaggttaaagtgcttgccctaagggagaaaaagaggaataaaattccttcctgaaatgaagctttcctaaattttatgaaattaaacatctatgcactctataaagattgtctaaagattgacacaccgcctgagtgtccagtcctgctagaaagcccacgcttattgagtgtagggtgctgaacccggccaaggaaaacggaaacaccgccctgccctcattaggtttcctcctctgggcgtggctgcctttccttcagcaccgcggacagcaatcgctcacaggcccgccctccggggtctaaattacagatattttccgctaacatcacccgcaggccaagtcttgccgccttcctctcggtttccttttgcaacgaggccaattaatgcagcgccaagggaatcccggaaagtcggttcatggtaacttttctgtgaggcccactatcagcactttagacaaaaccaaatcacattctccccttagaatcgaagatccgcaccttctcagagtcatctgccctccggccgccccaactcccgcttatacccaaaggactcatgaaccttcctcatcagcctggctctttacgttaacaacatcctccccagcggtcctgcaaggccctgcgcggccgtcaggcagtcagggcacccacccactgtccgactccactcaccgagcccgcctctgagcccttccgggaaggcaccagctactgcgccgacgccggggccttagcgcaggccagggcgtggtcacgttaccatatttgcgcacgcgcggcgcgcggtgacgtcaccgcatctttataaagggccgccttggggcgcgaaaagttcgtgaggtgtagtcgcggcaaccaggaggtgggcgtgtggtaacgcggcgcgcgggagggtggcttgaaagggtctttatgaaccctagggaaaggccgtctggtaggaactccatttcaagaccttttaaagtgagacctgcatatgttgaaagagtttcagagagtgaagctgggttcttagaagctggaatgtcccagcagaatgtagaaatgcgaaaaattcggcacagtagtctaaagtgagtcgagtttacagtcggtttattcaacgaatgcctgtggagcagtttcgaggtgcttcgtcctgggcgtcttatactgagcagagcagcaagagcccctgcctgctcatagttggtagaccctgtgttgacagtagtattgcttgatcatgccttgcggggtttctgagtgtcagtcgacatatttacgttggttatctcattgagtccccgcaaagccctgtgaaatgggcacattagcttcatttgacagccaaggagacaagcttggttgttaatttagcactttgtaatatctcgtttctgtaaagtgcgtttcttaattttcgttccttgaaataagtatatggtagtgtcagtcctctaatatacagaggaagaaacaggttcaagagaggtaaagttgttttctttataaattatactctgctggtaaaagacaaagagctaggactccaaaatccaaggtgttttttaaattttctcctcgtagaatatttacataaaacgtagctcttgcgtcaggacttctgcacttaatgtttcctttgcttggaaagccccttctgacatttatagatttgattccttgtatctttcgatctgtcacctcacaggaccattccttcaatctccaatataagaatatctccacctcctggctccctatcctccacctgctttatttttttccgtaacacagtaacattgcatatattgtgtaatcactcatttatttgtttagcaggtgcacccaccactagaatttgaacatcctaagaacaggtatttttgtctctgctttgctgatgtatcctcagcaaccggaactgcctgacatgtaagtgctcagtaaatatatttgaatgaacgaatgaaataattcctcccgttaacattcatcataatttcagagtactctaacttcacttgataggaactttgattttgctgttccttacccttaccacttaggaaagatgaaaagtagacccttgagtggtcctctgttctaggaatgaaatagagcttttgcatggttataaggaattcttgtttattttttatgtacatttacaaataaggatttttcttaagttggtaatgggttgcatgaaaataataactgtaggctcattacagcatttgtatgttgcttgacaaactgcttacctccctgctttgtgtaagtttgcatagtaacacagttgggacaaatccggctctttcaactttgagcccaacttttgtaggtcaccatccgccttagctgtgaactaaggaataccttgggagttttcttgcagtttttaagaacagcaatcaggaatatatcacagacacttgggggttatctagatagactttgataatttattttatagcatccaataaaggtggttactttctacttaaaggtctgtgatagctgcccttctcattatattgcccacagctgatcctttctgtgagacaccaggctgttgaggaagaatctatggcaacattgtatctattaatatacagcttctgtatttatcaggtaagtttggatactttctggagtgaggcattcacagccatgaaaattattgcaacctactaa

SEQ ID NO: 315375 - DNA, 4001 bp, Homo sapiens
caaaaactaatgtaatcagtctcaactgtaagaacgtaaggattctaagtataagagaagttggaaaatggtaacagatgatataaagtccaggaaatcattaagagaacatctgtaaaacaagaagctgtatctttgcattgcattttatcatggtttaataatctttcatatgaatactttgctgtcagtcatttggtgtacacttacgcctcatgtgtacacttaacccccaccttgaaggtagggcacatgtcacaacatgtgtaataactctctaactccccatgtcgctatgcccgaaagcaagacagaatgaataaattcacagtcttcaaaatcaaggcttctgtgtttggatatcactttatgagagacacaaacatattcagaaaagaaaaaccaccacagtaactggaaatcgtattatttgatgaacaccgggtgctcatcagcagatgcttcctagtctgaaaatctgtagaagtccctaagatgtagttcatgtgttatttatggctctaaaggcagcactagcattctaaatggaagtaaaggctggttgctacctaacaagaattttcttactgtcccaacaactacctgaagacagaatgggctgcctcggggatgggtagtgagttggtgaatttcccaggcctaataggagttgttaaagaatttttgaatagagaaagagggaagattaatctgtaaagtgtgtaggaaggatagatgggataatctgtaaagtgtgtaggatggatatatgggaaaggggatgtgatgatctaagtcaagcttgtccaacccgccttattttgttgttctgttctgttttgttttaggctttttgcagcttaaagccatggtttttagtttgtctctagtgaaaagagggatgaggaaagggctttaccagcccaaccggaaacaaagaacccatgactgtattctctcccttgggccccggagctacgtatttaatattcataacagcttccatttgagtgttcatttaccatgccaggcagtgttccaaatgctttctctacattatcaactctttcatccccccaaacagccctatgaggaaggtgcttttatctccatttgaaagtgagatcagtgaggcacagaaaggttcaatgactccttcaagctccagcaaagggtagagctagtattcaaacccaaacaacctggctcctgcgccaggctcctacctactatatgcccttcaccctaacaaataccacccatttaggtggcaaaacaccgtcgtttacagcgcactgtctcctaaattacatcattagatattcccaacgcccctgtgaggagtaggaggactaactccatttcacagataagcagatagaggtccgaaaagattgcagtttgagtcccagtgcttaggtgacgtccaccgctcctcgggtacaggaaaaagaaggaaaggggaaatggacggaagggtaaacaagactccgaagacccgggtgagcaagggttcccaggcagcactgttccccggcaccagctgagtccacctctctccgccccctcagcgcacggctgagccttggtctttcatctctccagccaagccctgggttagcacagctggttcaatgaaggaatgcgaagccagaggccctacaagctacaccagcaaagtgctgggaccgctcgacccctacgtgccccgcgccccttcccagcgtcccccgggccgggaagtcccggtaccacccccgcccacatgcgccggctgggcctggcggcctcccccggaaacgttcccccatcctcgcccggcgcctcactcaccaagggccgcgccggggttctgcactgtcactgcgctgcggttccccgccttagggattctcacacggttccacggctccaggcccggcggcaccgcagccatcatgcgaggcggggggacttacgaaaggcggagctacgcgagagcacgtccagcgaccggaggtggggcgatgggacccagtccgggccggaagggagcagggggtggggctcgggcggggccaggagcccggcgggaggctgccttcatcgagtaaacgcgtgggactgggaaggacccagtcatctgtatattggttaccaacacgtggccgcgtagaatcatgggggaaaaaaggccccatcccaatactaaccaacagaatctctgagaatgcgatgaggaatctgcgttttgtttaaacttagcgcaggggattcggaagcacaaccaagtttggaactgttaaatacttctaggcattttacaaatatggaaaatgaggcccagaattgagttggtgcttttacccccaactctgcctcagacattaggggaaaaaggaagaaatgaaatgaagaggtttgtgcaaggtgtggaatttgtagcgaagaagcagtgatttgctttgagtggtaaaggaaggctcctttatgtcttgaaccacagcaaaaccgagatcacatcaaagaaacttggaagacacctgtcagtcattcccacttttgtcagtctccaagacaagatcatattccaagctctagtgatccttacctcattaatatctttctaataattcatttatcctcagccatgctaatgcccccttaagttcttaacactcccacagtaacgtattagaaaaacagtgagttttggaaacagactgccaaggttctagttctagctttgctgtttactagctcggtgatctcaggaaatttacttacctcctcctccagaccttagtatccctgtgggtaaaatgaagatgataataatagtatcaatctcacagacttgtaaaatgccaaggcactcctggcatacaaacaatgaacatttaccatagttaatattgttgatgttattactactatttcatgcaagcagtcttactttattgaaacactttccatgctctttctgtgcgcctttacacatctacctactctacctgggtcatcctcggaaacacaatctcctttcctcagctctggggtcgtcacttggggtaattcttcctaaacaccccgtcctcactccataacttgatacagaggcccctttaatgtgttaccacagtgccctatgttggcctatgtattagttttctattgctgctgtaaccaattacgacaaacctaatggcttgaaataagtagaagttattttacatttctggaggtcagaagtccaaaattaatttcaatggactgaagttggcagggctggttccttccggaatctctagggaagaattcatttcctttccttttccagcttctagaggctgccttcattccttggctcatttcactatcctccaccttcattgtcagcatgacatttttcagtctcctcctcttcctctgtctctctcaccctcctgcctgcctccctcttaaaaacacccttgtgattacattgagcccatcaagataatcaggatagtcactccatctcagaatctttaacttaatcacatctgttttagaactccaaattcaggctcatgtacccgatgggcagctgatgccaaatattgagatactggtgcttggagacagagaaatatttattcgatttgaccaaagttagagggcaagagagcaagatctctcagatccacagtaacaaaaaagaagcagggagtttttatggagctagagagtaatggagagggagtttcaaggaatccaagggaaaagtctgtgtttcttccatttcaggtaacaccttgtgcagccgtatgtacatggcagctggttgcaatgtccttccaggaattcattccttctgcaaactattcttatgaccctgaagttatctccttctgcttgacaaagaaacagtacatcagcagtttataattacattgtgggaacaaggaatactgggcaaaaagcgagtggttaacatgtacaagcaagcaagggcctgttcaaaattttcattatttcat

SEQ ID NO: 315376 - DNA, 4001 bp, Homo sapiens
ctgccacctgtggtggccacctgcacagccacctccttggataaagggagccccctgccttcctgggtgctagaaaggaaagaataagaaacatgaggctaaggacaggggctcagtagtgagatgaagtctctctaggttctgaaagcactggggaggtaaaggtttgagggcaagaatgagggtaagttcaggagacattaggacacatactttacgtatctacggtgcccctgtttttgggaacaaaaatgaagccctgcatcctctgtctgtgggtgagatgatcatagtgatcaaacctggaagatatgaaaggcagcggggatgtttgaaagaaaaagtctccctcccctgatcaaaaactcccctcaacctgcgtccccatatcccccacctccccatatccacctcctcattccctgcctcccacatccctcatcctgcttgggggaaaaaataccacagctttttcctttcctggagggaaacacttgcccaagagtcagacaggcctgtctttgaaacctagctcagctgcttaactagtgatccctagaaagtcactccacctctctgtgtctccgttttcctgagtctaaggtggggatattgagaacatccccacagggtcatggggttacagaaatggcagaacaaacaggtgtcgaagaaagacttagctcagcacaacccccatccacagtaagcatccactacatgttagattttctccccatggccaacccagtcacaaaggggagccaagggagcccctggacccagtccactgtatggtccagactatgcttggagtgtgggtggaggctgatgtggaaagaccagaagacaagaaggagagagaggctctggttctctggcggggcttctccgcaggctctcggggacattggactgccctccccacccaccaacaatagaggggctgctagggtcaaggagaaaggcgaggcaggaatggagctcccagtgtgggtgccttctcttcctttaccctcctcccctggaagcagagggtgagagatttgcccagtgcagagggccctggttaaggtggggtgggaagaggtgccagccaagctgcagatgggacggcctagggagaggagggatacctagctcgtgggtgcatacatccccctgtgctggttcatgggcattagtggggttgcctccctgtgcagatgcatgggcgtgtgtgagatgtgtaaacacctctgatggtccctgaggaaggggcaaggctggcagagggttatggggtagaaaggctcatccctctttgccttctccctccagctaggctgggcacatctgggcacataggaagtcccgggttcttttcttggctttgcaactgatcccgggcgtgaccttgggccaaacccttaactcgtgccctggggctctgttaacatcgcctcccaaaggagagaagaggccctactgaccactttccaggcctgcctcagggtccaaaggggaagggaaggaaaccggggtaaaaggggtcggcaccgcgaccttcgagaacccgcatgctgttctccaccaggtctctcagtcctccctgccccaatccccatgcccgcctccgcgaccctgtgatgcctcccttcttgcacaggagcagtgacctcagcacttacttaatcctctcccggcgccgagctcagttggagaggctaggggtggtagtgactggcaggaggccggggcggggggaacccccaagcccggcgtctggggctgcgggtccgacccgagatccgccctccctgcaagccccgagccgctggccaggcccgctactgcgcaccagccgcatccgcgagcgctggctctgccggcctgagctagggtgggtagggccgggacccacggcggaggtggggccgggccgagcagcctcgggggatccccgaagctacagcgccttgcctccctgcacgctccgcgcccccggcctccgattggctgtcgggcctagagcccgcccagaattggaccgttcgcttgtcgctcgggtctggctccacccccagagggagcctagaacctggtcgcagtttttagagactaccctcaccccgtggcctgcgccgaagttgggcggaggacagtgggtggccaggcccttccgggccagaactcgggacccctgccagctacccgtgccaggacagactcaagcccccaaaacgcggatggatgtacagaggagacttggggagagcactggactgggagtccttgggcctgcactgaactctggctgactttgtgaccttgaagaaactgcttttcccttcctgaaccttggctttctactcagacgggtcctctggtgtgagggttctagacgaagatggggaatcttcgtctacagaagttgagagtggggtggatttattattgggcaccccgacccaggcaagtctacatataccctcacaatagcttccatccacggcatgatcagctcagggaaggagccctcagatactcctgatccgccggttttcaaagtagtttatgggagtcaccgggtagcctggtacaaatgcaaacgcccctgtgtctcccggtctgggaaggaggcagggaaacagcatgtttaatagcagtttaaggccgggcgtggtggctcactcctgtaatcccagcactttgagaggccgaggcgatggatcacctgaagtcaggagttcgagaccagcctgaccaacatggtgaaaccctgtctctattaaaaatacagaattagccggtcgtgttggctcacgcctgtaatcccagctacttgggaggctgaggcaggagaatggcttgaacccggaggccgaggttgcagtgagcagagatcgcgccattgtacttcagcctgcgcaacaagagcaaaactccgtctcaaaaaaaaaaaaaaaaaaaaagaaaaaaagaaaaaaaaagtagttaacagtgttctagttaacagtactttctggtggggagatgttgacaagacacactttgcgagacgctgccgagtattttatagaaggcgcaactgaggtccagaggtcccaacacctggaggagttgccaatagagtcaagattcgaatcggtaaaagagcggcccctggggtctggccgccagtcggccgaccccctggtgggctcgggccactgacctcggtagggtcacgacactgggactggaccccaaagttggaccagccttcaacactggaacccgcccatgcacagctccacccggcccccaggctaagatagaccacgcccccggacatctggtccccgccggaacacccgggccctctggtgacacgccccctttccggcaggctactgggctccgcccacacacctcccggcctggttcctaaacgccagctcggagcaatccccttgggctggagccaaatccctgctgtgattttaaggaagaccggcaggtccgggcccccaagggtcaaccccacacacatccccgcactttcctgtatgcaggcctgcgagcgtagagggagtggaattcacagcctccccacccatccgcaggggtctcctgggaggaacccaccagcgataggaacactgaagctgggctacggcgtccgcccgagccttttcttaaaggcgccgaccccggaagcggggcgtccgagggagcgcgcgacgggccacgcacgtccgggcgtccagttcggggcagcttctccggctggtgggtgggtggggcagcctttcaggcaggtatgcatgggaggtggggatcggaacggggtgtttcgactgcaaccgcctggagacctggccggtaccattctccatagtgcagatggggaaacagggttggagagagggggcctcatctgggtcgttaacaatgcggtgcgtagctgtgagggagtttacacttctgacttcgggccttggctcctgggacggcgcactggtgcaagagccgcttct

SEQ ID NO: 315377 - DNA, 4001 bp, Homo sapiens
ggaccagccttcaacactggaacccgcccatgcacagctccacccggcccccaggctaagatagaccacgcccccggacatctggtccccgccggaacacccgggccctctggtgacacgccccctttccggcaggctactgggctccgcccacacacctcccggcctggttcctaaacgccagctcggagcaatccccttgggctggagccaaatccctgctgtgattttaaggaagaccggcaggtccgggcccccaagggtcaaccccacacacatccccgcactttcctgtatgcaggcctgcgagcgtagagggagtggaattcacagcctccccacccatccgcaggggtctcctgggaggaacccaccagcgataggaacactgaagctgggctacggcgtccgcccgagccttttcttaaaggcgccgaccccggaagcggggcgtccgagggagcgcgcgacgggccacgcacgtccgggcgtccagttcggggcagcttctccggctggtgggtgggtggggcagcctttcaggcaggtatgcatgggaggtggggatcggaacggggtgtttcgactgcaaccgcctggagacctggccggtaccattctccatagtgcagatggggaaacagggttggagagagggggcctcatctgggtcgttaacaatgcggtgcgtagctgtgagggagtttacacttctgacttcgggccttggctcctgggacggcgcactggtgcaagagccgcttctggagtctggtggactcgggttcgtgtcttgcctgggacagtcttttttttcttttttttgagacggagtctctctctggcacccaggctggagtgcagtggcatgaccgcggctcgctgcaacttccgcctgcttgaactgggttcaagcagttctcctgcctcagcctcccaagtagctgggactacaggtgcgcgtcagtatgcccggccaattttttgtatttttagtagagacagggtttcaccatgctggccaggctggtctcgaactcctgacctcgtgatccgcccacctcggcctcccagagtgctgggattacaggcgtgagccaccgtgcccagcttgcctgggacagtttctacctgagtgacgctgggcaagtcgcttcccttctctgaccctacttgtatctgaagatgtggcacttagcaggtgcttaataaacgctagtttggacttttatctggaagcaaaggggaccgctgattttaaaccttcagttaaacttgcttgtgacctctttaaatatacaattgtaaattttttagttggtggtttacgctgatgtcccggattataggttaaattaggaggaaattttcagcatgtacatccatgacagtacacacacaatgtcagattcaaagctcccaattaaaggcaatcatctgcctcttgtaacatcagttaagatcatgtaacatctggtccctgctgtgtgttgagctgcctcccaggccttggatattcatagactaatgcattgcttgccatgggtttggtgtgattttcccccatcttatggattaagaaagtgaaaatcagaaataatgacttgctcaagatcacacacgctaggttagacacagatctgtcctgtccccacatatgtgccctaacctaccaccaacccgtttattagcagagactgagctatgggctcagcccactccagctaaaaatgtgaagaaaacgtaagtggccaagacaagaatgatcaaataggtgggtaaggctctaaatggagtcaagggggtgtcagagcaagagcacaactattctcaggcaatgtattggtagaagggggggtgtcatacaaggctcacctgctttcctggttcctctcactcccagggtggcaaccaactatatctgaggaccagagccattttggggcaccagagcttgtgacctctccatctccacccagctgggtccaggggccactctcagcactcacctcagcagctgacatcataaagcagacttgggaacctggaagcactctggagaacctttccctgagacatggagctttggggccgaatgctgtgggccctcctgtctggcccagggaggaggggaagtacccggggctgggccttcagctcatggcaaccccaaccacctctggctgggttatccagtgccatagaactggtcagccactggactggggtctttgagaagaggggtatccctgaggcccgggaatccagtgagtacatcgtggctcatgtccttggagccaaaacagttaagtttagtgttgtcaagaggacaggaagagggaggagggaggacttggggaagggatatccaggttttctgttcactaagagtgcttagctgagactgatgggatttttctgaaggaacgtcttagcgcctggcacacactgtaacagtttgttggatgaatgaatatatctctgcctaagtgttctgggatagacacctggaagcctggtgttagctgtgtaaccttaggcaggatgctgccccctctgggcccagatgatgagagggttgggcctccagaccagtgctgggcaggcattatccacataagacacctgggttgggggccttgggcccagtgagccagccacttatattctctgtggggacagtttcagagcctgaggccggcactttggacccagcccttgacctctcagcaactacagtgtatccgggagctgagtagccgtcgattgcagaggtgagcacccatggatcagacctgaaggatgtgttcagggagcagcagtccagcctcccctatccccaccaagttcagggaggaggagaatgtccaaggactagggaggtgttggggtgcaggagtggcaagagtggggccggggtactgaataggaagaagggagggagggagggttttgcctcaggagtcccaaggccctggagacatggtcttgcctgatacctttggccacaagtggtatctcaacccaggcatggtcctgttggtcctagctctgtccctgatgaccacccagctgccccctctgcaggatgccggtgcagtacatccttggagagtgggacttccaggggctcagcctaaggatggtgcccccagtgtttattcctcggccagaaacagaggtaggtgtgccaccagggcaaggcaggatcaggatgatggtggagttcagggcaccagtcttaccccaggcttcctccagggggcactggggccccatgacttcagggacagtgcctttctagacatgtatttcctctctgactgtgttggcagagcccagaggacagaggattcctgttggtccccttgactgttatgttccaagctatcaacccagcctctaggtctggcaatggcccagagtgcctcaaatagtgctgcccaagtacttagcctgttctgccatttctctgggagccatcccatggctcacccaacccacagggaacaaatgtcttccagcagcttctcaggaggcatggaggaagtggagagggctccagccggacacctggagacctggtatcagctgtgcaaccttgggcaggtcactgccctcctgccatctctgggcccagatgatgagagggttagccctccagcccagagaatctggtggccctcttaggtctactgactggtctggtaatcacctgtgttgtccctcaaattactaggactagggatgtgtggcgcaagtgtgttatcccttggtaaggcaccctggtcctggaagagacgctttatatggcccttcttggactcccctctgaccttgtagatgacagagctgggagccagagggcgcagaccagggagtagagctgggtgagagctggtgggcaagccagagggcgccaggttctgagaaggagtgtttctagaaagacctaggcacacaaacatttctgggaaaggttagttcccattcccctgctg

SEQ ID NO: 315378 - DNA, 4001 bp, Homo sapiens
atgtcagcgcgtgactgcaatttgtgagcaggcatggctttaggctaggacaggtctgagaatcagccctcactagatgcataaaagaaatggaggtggacctaggaaaattaatagatgctgttctctgtactgttaagcatataaaacagcattctggacagatgcttggcagagaaaaggaaagaagggctctgctagagagaagtggatcttaaggtgagcagagttggggccactgcacataagattgagcttaacttcatgagaagccaaggtttaatgtgacactggaatctcatggtagccatcctagagtggattctcaaggagattcactgtggtatcaaagggcccttactgtgatgggtctcctgacaagacccatgaagaaacataaaattgaccatctctttgacccagttttcctgcttatgaaagtggcaccccaggggacagtttcaaaatgggggggaggagtgtcagggaagttatctgtataaagatcgatgtttgttaaaccatactaaaagatgcttatagccacttcattccctatagtgaaataatgatgtacattaagctgatgaactattaggcaacaattaaaaataactaggaagctcggttttagaaatgttaaagaaagaagaaccaaatggtgtgtatacactgattacacattccatggaaacctgtgcagatcataagttggacacagagatacaaagccttttctttttaaggaaaaggtgattatttttggaaaagcaataaaacctgggttcccagcaaagacagtggcacagttaccagactcacttgcaacctgggagacctgggctgggagcaaggtccactcttgtattttttgattttcaaaaaccgtgaacaactatggctgtgcatggagaggctggtgtggggtggggtgcggggaggtgctctgttcaaccgcagggaataatgaccaaaaaaaaaaaggcgggggggagggggaaggaatgcagtacaccccacagaaaatgcttaaaacctggccaaactgttactaagcatgtgagctttcagacttagggagaatgtggcaattagaaatgtagtggagggccgggtgcagtggctcacacccgtcatcccagcactttgggaggatgaggcagatagatcatctgaggtcaggagctcgagaccagcctggccaacatgggtgaaaccccatttctactaaaaatacaaaaattagctggacgtggtggtgcatgcctgtaatcccagctactcgggaggctgaggcaggagaatcacttgaacccggggagtggaggttgcagtgagccactgcactccagcctaggcagcagagcgggactccatctccaaaaataaataaataaataaataaataacaaaaacaaaagaaatacagtggagaaagaagctgtttcaattgagggtggaacagatgcaatatttctggccactcctaccactggacaaacacacacttactatgagtgactatatagatgcagcctgggatttactaagaaacaccataacagaacatcgataggccaggtgacagcttttcactacaacaccttacttcctttgaacatttggattttctagttttcctagacaatgacctacacccatcatatcattcctggcctctcgcccccagtacacacactttaaacatgaagataatgtccacagcccaccggggcaaaacacctcactcagccagctaacaggggcaggcaggatgactgcagtagtttcatctactctcattttttcagtgggtcaatgaattcctttcagtgatcatcactcaccttagccatgtagttttttataggaactgcttgccgaataaccgacttagttcaatttactgacttaaaaggacacagtatggcatgggctactccaggttgtgttaactgtaaagaccagtacccatccccgttccaaattctaaactctactacctcatctgcatgtcacaacaaggtcagctgaaaacctccctgtgggctgcacttgagctttcacagggaataaacgacatcacaagtctggcaaatgtatggctaaacgcagcaggaatctcatgtatatggatctgaatgttctttgggaattctgcagcaaataaaatgatttattgagccaattcaaacgaactctatcaaaacacacaaaggcctagaggagagattacaatgaacgtaaataattcaaggcaatttttgatctaaagcattttgcttagctctacaaaggcatgaatgaggtgtggtcacgtttttgtataggaggttttgccactacttgctcccaagttaaacatggccacagagtattgtgaatgtttaatgtatgcctgggaaaaatttattggccaatactttagttactaatgggaggattatgtatagtcggaccataaagcgtgtaaaagcagatcacttagagccgctctgtccaggacagcagcactagatgcatgggccctttgagcacctgaaataaggttagcatgactaaggaactgggttttattttttcaaacttgatgttcaattcagttactgaaaaactttactatgtttaactatctttggaacaacttggatatgaatttgtgtttttcaactgcatattttacaaaatctaaatacagatcaagtattcctgatgaaacgttagcatccaaattatgctataaccagatacacagtgagttttgaattcttagtgtgaagaataattttagatctcactaataatttgcatatattgagtacatattgaaatattttggatatgctgagttaaataaaatatgttataatttcactttttaaatatggttgctagaaaattgaaaatgacactctgggcttatttttttttttttaattttgagacggagtttcactcgttgcccaggctgaagtgcaatggcgcaatctcagctcacggcaacctccacctcccaggctccagcgattctcctgcctcagcctcccaagtagctgggattacaggcatgcgccacagatttattttttatttctgttggagtgtgctgttttaagagtatggagctgacatttaagaattctaatgccatctgctggatacactggtacaagacaggcccgtgtcacagtaagactgtgatggtgtgtcaatactcaaagaactggatctgaaacagaaaagggctcacaaaacactgaactaaattatactgttaagaggggattataaataggtttatttagtttttgaaatcccagagaaaatgtgactcacagttatcttcagataacagtgaccatgagccaacgagcataactgcttcgccgtccacccgggtgctgcaggcatggatgtggtcacctgggatggaccctttgtgatgctggctcccacacctacagctcttcctgctgcctgccttgtctctgtctcccttctcctttctactccacagtcagcctcaagtccttctgctctgggttacacacacatcctctttccatctttctttgtctattcattgtttttttttttttttttgagacacagccttgctcttgttgcccaggctagagtgcagtggcgcgatcttggcttactgcaagctccgcctcctgggttcatgccattctcctgcctcagcctcctgagtagctgggaccacaggcacctgccaccacgcctggctaattttttgtatttttagtagagacagggtttcaccgtgttagccaggatggtctcgatctcctgacctcgtgatccgcccgccttggcctcccaaagtgctgggattacaggcgtgagccaccgtgcccagctgttttctttctaccctttcttttttctatttttcctatgattctagcatgtctaataattctatttttctttttagtattccaatttttctttttgtctcctccctctttatccta

SEQ ID NO: 315379 - DNA, 4001 bp, Homo sapiens
acacacacagacacatacacactcacacactcatacacacagacacacatagattcacatacacacacatacagacacatagacacatacacacagacccacacaaactcacatacacatacacagattcacatacacagactcacacattcacacacagattcacacacacacagattcacactcacacacagacacatacagacactcttacagactcacactcagacctgacctcatacacacccccacacacaggcaggtggccatctgggtgtggctggcctcagctctgtccctatcctctgctgcgtgacctgggagctcctcgcttccttggtccaaggcagaggctgcccccaccagcccataacgcaccttgcttcccttcccaattcaaagcagctggcgtgacctactaccacacctggcatgattcaaaatccgatgatgtctggagaggagcccctggggaacacgggtagccctttccaaatctgggattccggagtcctccaaaagccggtgggctcgggcaagactgctcggcagtgatcccataatgtgccatgctgctcatccatccctctgagggcggggtactgggctagctgggaggctgcctgccgccaagtgtggaatcactcaaggcccgaggcgggaggctgcacactggacactgaacacaggccactgggaccatggccatggcatgggagaccagcctgtctgtgagccagaacacacccgctcacccaccgcctccgtgccccatctctgactctggaagatcagccatccagagggcctttgccctggcccagaaatactgccagccctgctcacgacctgtcccttgcccgcaccaagaagtccctgggccctgaagggcaggcttccccactgacttgcccactagtctagtacagggtgcagctctctacaccagtgctggctaaagggggtcttggtggcctccgcccctgcagccctggctgttctgaggactctgggatgccttcgctgggcctaagcccacagtcctgcagccacagcctgggccaggccccagctcagccccttcctgtcaggtgcacttgggtgagtcacctccagcccaggctcaaccctgaggagtgcggggcaggggaagcctgggccgggacaggcagcagggccacagcaggaggctgcagaatggtgcctgtggcctctaagtgtctgctacattctatgcataacctcacttcattttttttctacctgatggagaacgtattatgctcacccccataattcaagtgaggaaactgaggctccggaaagttaactgatttgcctgcattcacacagtgagtcggggaagaggttcaggatgggtggcctgtgctcctcctgctgggccatgcagcctcaaacagtcctgaaccggggaagcagcattaccacaggaattgagggatcaagggagacaggagcgcccctcagccccaccccataccctcccacctgacccctaggtcatggagatgaccctgtaagctgactgctgaatctgccccacagggacagggctgctgcagagtccagggctgccctctgccatcatgaccctgtcccaggctcttctccgccaccctgttgctgcttcccaagtccctaaccgacttggggactgtcctttccagccacacaggctgctagcactcaccaggcagctaccttgaattctggcagtgacgatgatcaggtgtgatcagagagtcctggaactgctcctatccagcaagatgctggtgtgagagccgctgtggcccccgaggctggcagggccctggctacagccctctctggaaagacccagtcccaggctatgcccagagcttccagccagaaaggacaagctgcaggaccctgtgggctggcttatgtgacgccaggcagactgaagctggccatggtcccagctgccacattaccacaggaacagcagccccagggtccccggacaggcagtgccaacaagctcactgcaaggtcagaagcccttgaggtcacaattggtgacatcacagctgctgacccatgaggctcagactccagcctgaagcccctctggcccagggagtgactgcaaagtcagcagcacatgggccagggctggccagcctctcagctccacgcacccagacagaagcatccacatctgcactcttcatagcagagacctctccctgttcaggttctgcatacagaagagacgcccagaaataggtacagacactgaggctgcagaaaagctgtttctgtggaggagtggacaccaggttgcagggggttgaggaaggagaaggcagtgaaggagctgaactggaagtggttcagccgttcacctgtgccactgtctactgtaccctacgacttttcacttattagtgctgttcacctgtgccactgtctgctataccctacggctttttacttattagtgctaacagggtttttatggattatttagggttttctatatgccatctgtgaacggaggtaacttcacttcttcctttccaattcgaatgctttatatttccttttcttgcttagttgctctggctagaacttccagtactgtgttaaatagaactggggaaggtgggcatccttgtctccttcttgatcttagagaaaaagtttccagtttttcactatacagtatggtgttggctgtgggatttttggatatattgcctttatcatgttaaggagttgagtgtttttatcatgaaagagtgttcaattttgtcaagcgtgttttccacatcaattgaaatgatcatgtcttttcctcctcattctaataatgtagtgtagtacattgatattttcattatgaaaaaataatccttacattctagggataaatattacttgttaatagtgtgtaacacttttaatatgctgatgaatttcatttactaatatttcattgaggatttttgcatgtgtattcataagggatattggcccctagttttcctttcttgtagggtctttgtctgactttggtattagggcaatgctggcctcacagaatgagttaggaaatggtcccacctcttcaacttttagaaaaactttgaaaaacatttatgtatgttctttagtaagtgtttgttagaattcacgagtgatatcatgtggcccagggcttttcttcgttactgattcaatctctttactagttatgagtctattcatattttctatttctccctgattcagtcttgttggttttttttttttttgtttctagaaatttgtccattttatctaggttatccaatttgttggcgtgacattttttggcgtattctttcataatcctttttatttctgtatggtcagtagtaatacctcccactttcctttcttattttactaatttgagtctttttctttccttagtcaatctagctaaagctttgttaattttgatcacttcaaaaatcgccttttggttttgttgattttctccattgtttttccattctcgacttgatttatctttaaccttcattatttccttacttctgctagctctggatttagtctgctcttcgttttctaattccttaaattgtgtagttagatcattaatttgggatccttcttatttttaagatgtagacattaatagctacaagtttccctcttagcactgctttctctgcataccataacatttggtatgttgagtttttcttttaattcatatcaaggcattttcttttttctttctctttccttcttttcttttttttttttttttttgagacagtttcactctgttgcacaggatggagtgcagtagcgcaatctcggctcactgcaacctctgtttcttgagttcaagtgattctcatgcctcagcctctcgagtagctggaaatacaggcaggtgccaccacgcctggctaatttttgcatttttggtaaagact

SEQ ID NO: 315380 - DNA, 4001 bp, Homo sapiens
ccttagtaaacctgaagggcctaggaattgtcattatcagtgaaacctgatgttgatgagatcttaacacaaggagttggagaaaatacacatttttaagagagacttggataatcctccaggtctccaggtgcaatataatgcacctcatgtcctgggaggtaccttaggcattgccaatcaacttcaagtactttttccttcacagggatgtctaatcaactccaaattcccttctcctggtagaagcccagagagggaaaatgacttaatatcacagagttagttgcagaactaggacttaaaatgcaggtttcctgaatcctggtttattaatccttcctgaatggcctttgggtagtagagaaggcaataattctcttttatttcccatccttctcttgcccttcctgaaattatgggtcacacataccacaacatgtgggtttattctttatccttgatgcaacatgtgcccttccgttgtacccctatttttactctccaggccccgtctagatctctgatctcccaggtaggtatcaaatgcccatttaacttacagatttggttactatggcttgagttttttcttgactgctggtatagttcaatttggatgagatggaggggagtcttgggaaaagagcttggtcttttgcttggaagttactggtgaatctggcatcaactgggttgtagggtgggatagtggttgcattctgagtttccatttcaactgaaggcttggaattgaggtctacttggctatcctcaaatttgcagggttgtactctgtagtcagcctctttgtcctctttgctgttgcctaactggggaaatattctgtcttcagactggccacgtgtttcatagtaagacagctggtctttatgattagcttgtctgtctgctaagtggtcagtctggtcagattcagtgtagtgagcattgtcaactggaggttgatcagcattactatgagcttggtcaatagcctggtgttcagctagttcagtggcttggccgtacacttggtggtgagtctttacagatgttttgtggtcaacgaggccatacaatctgaggtcagtctgctcagaagttcctgggtcagccaggccagccaatctgtagtcagtcttctcagaacttcttctcctaactttccctgacattctgcggtcaatctgtacggaaggtctttggtcagatggtacggacgatccactgtcaatctgtacagaaggactttggtcagatgggacggatgacccactgtcaatctgcacagaaggtcttctctcagatagtttggataatctgtgtgtaatctgctcagaagttcttcgctcagcctcgccagacattctgcggtccatctgctcggaagctcttctctcagactggcctgccattctgtggtcggtctgtctggaacctctctggtcagatggcatagccagtctaccatcaatctgcccagaagttcttctctcagcctgggtaggtaatcttcgttcagtctgttcagcagttctttcctccgtcaggccagacacctgaccatcactctgttcatgctgtacattattagcttggctagatgccttgcctttagtctgttcagacggtgtttgattaacctgatcatctgctctaaggtcagaaacatcagcagggttggatgctctgcggccagcctgaccaggtgtactatgcccattttgttcagctactccgttggtagcttggctaaatatgctggattcagcctggctaggcactcttagggcagtctggtcagctattctgtgagcagtgtggttatctgccttcctttcggcctggttcttctggtcgtcttcttcctggcccttagtgtggccagcacttgagggagcggctgggctttcatgtttcaagggttcagccagagcctcttgcggaggctcttccatttcctgccgcgtccctgactggtctaggttgccaggcactgtgggtggggttgggctgggtcgtctaggcgaccctccaggaacgccccatgattcccacgggctttgttcgggtcactgcgtgcgtcagggagagtggccgtcccgctgttgtaagtggagggacggcagtcagctgaccctgcagtgtgcaggcgagcgcagggagtacgccatgtcctgagaaggggcgattctcaggctctggcagttacagcttctcctcaccctgccgagcaaccaggccacggggctccgtgcatcgccacctagagtgttaccctcttccttgttcacagaggttctccgcagtgtgtgagaaagaggccctctctcaggtactgctcctctgattaacatcccccaccgcacctccaaatgtcaacagatgaacacacaaccagctgcacgaggaccacaaaactgaacagaggttgttgctattgccatcccctttgggtatagctgtcttggcagtggaaactcctgccccaaggtgttttcttgctggattagacatgtgatctgtggcgggagagccagagagaggagagaagatccagtgagaatgggttctaaaactgcaccatctagtggtcttacagcagagaggcgagttagaaggaggccaaatcagagttccagaaaggaagggagtaaggaaagtgggagaaagataccagaaggaatatttagcaagtggagaatttgtatttgatagtgttggccagtggggcccagtttttgagatttggtcctcccactttgcaatcaaccttaagaatgcacctcagagtcagtaggctgtctactttcaggagtaggccagtacagaggtggtgattgatgagacaaattactttgaccttgcaaagcctgaaatcactgaggcaggccaagggttggtagtgtgatgccagatattcctttagtagggatttaactgcattaaacaattagaaatgagacttaaaatccaaattcaaatacttgtgacaaaggagagtggatacacttgacaccatacttaggaatggaaaggggaatctaagcacactgaagtaaagtcatttatgtaacagtgcctagaacataataggtgctcaagaagtgcttgttgaatgtcactttatgaattatctaccttatttatttaaaaatgcatgacaccattggatactgtgtttagagtaaaataggtcttgggctatggcttgtagcttcaaagtgctattggttttggagatttatttttccattttataacttaaatgtaataatcatagaaatataaaaaagaaagcgtaaagaaaaaaattcccaaacactcaagagataacctgtattgacattttgatgtttatccttctggaaatacccccatgcaaatctatgtgtctatatctataggtatgtatatattttacaaaatgatgatttatcaatttgagatcttttttttaaatgtagctgttttatagttacaaatttccctctgagctgatgcttttgctgcatctctcaagtgtttggtgttatgttttcattcatctgaagatattttctcattttctgtgatttttttttctttgacacattggttgtttaaaagtatgttgtctagtttccaaatatgtatgaattttccagttttccttctcttattgatttctagcttcattctgctgtgttcagagaagatacattgtatggtttcaatcttttaaaatatattaaggcttgttttgtggcctaccatatggtttatcctggagaatattccatggaaagaatgtgtatttgcttttgttgggtggaatgttcttcatatgcgttaggtctaattggtcaatagtgttgttcaagtcctatattttcttactggccttctgtctagggttctactcattattcaaagtgagaaacacaaaaaatcagccgggtgtggtggtgtgcacctgtggtcccagctactggtgggctgaggtgggaggattgctt

SEQ ID NO: 315381 - DNA, 4001 bp, Homo sapiens
tgttctaatttacacaacttcctcccataatccttctgaagtcattttttaatttgaaataacccatgcatctattactgcttaactggaagaaatgagttttcaccaattaacacatatattatttaccattcaatgatgctacaaatatttatctagcacttactaagtagcaggcattactctaagaactggggctacaatgatgagtgaaaacaggcatggctttggactttgtgctgcttggctgtagagcatttgcaaagttatcttactcaactttccagtattattttttaaagttaatgattccttctgaaaacattttcttcacttggcttctagaacacctggctgtcttgacttttttactacctcactgtctgcttcttcttagtctttgctgacctcctctttactccccagattctcaatgttataatcccccaaattctagggcttcttcagtagcttttctcacttgctctgagatgttattcaagcccacggctttaaatgctacttaaggtttatgcaggtcattcccaatgttctatgtcaggttctgatctcccttcaacaccggaccccatatccagttgccaaggacagcatctacaattctgcttagaagtctaataatgatctccaaatttgcacatctccatgtacgtgtccaaaaagttctctagattttccccaataaatcatttattccaactccttctccttatcagcaactattaccagcctccttggacctctttctttgtacctcacacccaaacaattcatatcaccacaattctgtgtcttagccacaaccctctcttgcctggtggcctaacatgtccctctcttgcttcaactccagaggcttagtgcttcacttaaaaaaaaaaaaaaaaaaaaaggcagggcaccagtggctgatgcctacaatcccagtgctttgggaggccgaggcgggcagatctcttgagaccaggagttcaaggccagcctgggcaacacaggaagaccttgcctctacaaacaaaaaacaaattagcctggtgtggtgacaagtgcctgtagccctagctactcgggagcctgaggtgggaggattgcttaagcccaggaagtggagactgcaacgagacataatggtgccactgcactccaggcgtgacagagggagaccctgtctcaaaaaaaagaaatctattcgggaggctgaggtgggagatcacttgaggccaggagttggaggacagcctggacaacatagcaagactcccagtctctaactctaaaagaaagtagtcgatggggtagcgcacgcaacctgtggttccagctactcgggaggctgaagtgggaggatcttttcggccgaagtgggtggagcagcagcagtgagctatgatcgtgccactgcactccagcttgggccagagaggaataccgtgtccctaaaaaataaaattaaaaataaataaaaattagaaatgctctctcccaaggcgtacaggacttccctgctcttcctcggtctcctctctgggccctccccaaatgctctaatggaccaggtggcatccccgagctgggctgcgtctcaccctttgaggtgccccctacagcccagcaaggatccagaacagtccttgtaataatgaggccgaactggccccctggcccgcccccggccctctgcagccccgcacacacgacactcgcgatgtcgccctctcgagctcattcccccgcagttttctgtcgctccccggccccggcgggatccacgcctgaggcctcacgttgttctcagggtcgctctgtgccgccccgcgcccaccacccgcccagactgcgtggccccagtacccggactaggcgcaggtggtcgtctgcccactgcgagatccgagccacgacgttgggctccattccgtccttgtcggcagacggcgagccggtggccgcgggctgccccgccatgttcccggcctcctgcgagcggccctgagctcctccggctggcggcagggggcgccgctcacctcgggaaggcggcggggtccccttccccgcggaccggggtggccccgcgacctgcagtcgccagtgggcgggccccagatatcagacgtcttaacagtgccccaaccgcttttatgcagggtgattccacgatgcaggagatctctgagcagcactgtgggggctgaagcattccctatcaagctagtaggatgattgtcagctggtgacttcaattcactcagctgcaacgtggttttcgcaggtgccacacaaggaaggaaattgaagtaattcattccttccacctgctcccaaggaacagcatatgcatattttttaaccaaatacgacctgtccttgaaacctatgcatatttcttatattcaaattgtgctttaaagttttaagagctgctctgaaagcctaatatcacatgctctaaatctttgagctgttagaaaacagtagttaatacattttaaataaaacaaaaattagatacagagcagtgcaaataatatggtaacatttatgtaataaaaatatatattgaggccgggtgtggtggctcctgcctgtaataccaacactttgggaggccgaggcgggcggattacttgaggtcaggggttcgagaccagcctggcccacatggcgaaattccgtctctactgaaaatacaaaaattagctgaacctggtggtatgcgcctataatcccagctactcaagaggctgaggcaggagaatcgcttgaacctgggaagcggaggttgcagtgagccaagatcgtgccactacactccagcctgggtaacagagcaagactccatctaaaaaaataaataaatactaaatactatacaagaaactagtaacagtgactaccccgggaaacggaaggtaggaaagggcaagaggtttcacaatctgccacctctaataaacatttttcagtgatagaaatgtcctgtagcttcatgtgggtattgcctgcatgaaatgtggctactgaaatcaaggaactgaatttttaactttattaattttaattaatttagtcacatatggctagtggctattatattggagagtgcaattatactactggagttttttttttttttttactttatgcaaatattacctttaaaagtcaaaacagactatgttgtattcctaacaatacatattatgagtggtggcttcaaggagtgtattgtctctgtgttatagccaatagaaagtaaataacagccgggcgtggtggcttacgcctgtaatcccagcactttgggaggctgaggaggttgaatcatgagatcaggagatcgagaccatcctggctaacacagtgaaaccccatctctactaaaaatacaaaaaattagccagtcgtggtggcatgcgcctgtagtcccagctactcaggagactgaggcagaagaatcgcttgaacccaggaggcagaggttgcagtgaaccaagatcgcaccactgcactccagcctgggccacagagcaagactcttgtctcaataaaaagaaaagacaagaaagtaagtaaataagaatcgttgacacttgggtcttgcttgctatgcgccaggtattgttctaggtgcttctcagacattaactcccttcatcctcccagcaactcatgaggtaggcactattattaatcccagttttacagagcaagtatgcacagaatgattaaggcagtagctaaggtcacctagccaagaagtgataaactgggatgttgtgcaggcattcaactcagccagttggctcactctgtgcagttaaccacaacactgtctcttatacaggcaattggccaaatcacaaaaatacctacaaatttccatcaagggtggaacacaaatgatattggggaaaatccatctacaaagatacatattaatccataatcactatttcaaataaaaatatctctgtgtt

SEQ ID NO: 315382 - DNA, 4001 bp, Homo sapiens
ttgagagagtttgttaccagtagacctaccttgcaagaaattttaaaagaagctcttctgacagaagaaaataatataggtcagaaattcagatcttcataaagaaaggaagggcattagagaaggaataagtgaaggtaaaatacaaagttttctttttctttttcttttttttagacagagtctcgctctgttgcccaggctgcagtgcagtggtgcaatcttggctcactgcaacctccgcctcccaggttcaagtgattcttctgcctcagcctcccaagtagctgggactacaggtgcacgccaccacgcctggctaatttttttatttttagtagagacagggtttcaccatattggccaggctggtctcgaactcctgaccttgtgatccacccgcctcagcctcccaaagtgctgggattacaggtgtgagccaccgcgcctggcctatttttcttattctgaattgatctgacagataacagtttgttcaaaataataatagcaaggaggtggagcaagatggccaaatagaagcctccaccaattgtcctcaacgcaagaatataaaattgaacaactatccacatacaaaaaaaatgcacctccataagaaccaaaaaccaggtgagtgattatagtacctggttttaacttcatatcactgaaagagacactgaagacagtagaaaagacagtcttgagttggctatgccattcatcccccattctcagctccagccacgaggtatggagagataatctgcacttgaggaaggaacagcacagtgattgtgggactttgcattggaaatcagtgcttgcctgtcacagcagaaaacaacaccaggcagaactcaggcagcgaccacagagggagcatttagaccagccccagccagaggggaatcacccatcccagcagtcagaacttgggttctggcaagtcttgccaccatgggctaaagtgctctgtgattctaaataaacttgagaggcagtctacaccacaaggcctgcaatttctaggcacgtcctggtgctgtcttggacttggaggcagagcagttgggggccacatgacgcagtgaaacactagctaagggtgtccaagggagtgcttacgccaaccctccctcaaccacaggtagtatagctggcagctctgggaaagactccttccttctgctttaggagcagagagagaagaataaagaggactttgccttgcagtgtggatgccagcgtagccacagcaggatagggcacaggcagagttcccattccctgaggctcccattccaggccctagctcctggataatattcctagatactccctggaccagaaggaaacccactgccttgaagggaaggacccagtcctggcatctctcatcacctgctgaataaaaagcccttggggtctgaaaaatcaccagtggcagccaggcagtactcaccatgggccttaaggtgagactcagagatgtgctggcttcaggtataacccagcacatttgaaactatagcggctatggggagagattccttctgcttgagaaaaggagaggtaagaataaaggggactttgtttgcagcttacataccactttggccacagtttggtagagcaccaggtaggctcatggggttcctgattccaggccttggcttttggatgatatttctggacctgctctgggccagaggggagaccactgccctgaagggagagtcctaggtctagaagcattcactacaagctgactgaagagcccttgggtcttgagtgaatatcaggggtagccaggcagtactcacctgggacaatggtggccatgagaagagactcctctacttgtagaaaggtgagggaagagtaggatgtcatcttgtagcttgggtgcaagctcagccacagtaacagaactccaggccctggctcccaggcgacatctctggacccacctgggaacagggggaatgtgctgccctgcagagaagaacgcaagcctggctggctttgccacctgctaatggtagagcccttagggccttgcacaaacataggtggcagccaggcagaggttactgagggccttgattgagacccattgctgagctggcttcaggcctgaccagcatagtcccagtagttgtaatcataggggtgcatatgtcaccccacccccagctccaggcagctcagcagagagagactccatttgtttgggagaaagtaatggaagagaacaagagtctctgcctggtaatccagtgaatctttccagatcttatctaagaacaccaaggcagtacctctacaagtctgcaaaagccacagcattactgggcttggggtgccccctcatacagatatggctgctatgaccaaaaatttagatcacaatgcccaagtccctctgaatacctggaaagtcttctgaagaaggatgagtacaaacaagcctagatttcgaagactacaataaatacccaactcttcaatgcccagataccaacaaactccacaagcatcaagaccatccaagaaaacattacttcaccaattgagctaaataaggcaccagtgaccaatcaagaagagacagaaatatgtgacctttcagacaagagaatttagaatttttgagtaaactcaatgaaattcaaaataacacaggaaaggaattcaaaatcctatcagataaagttaacaaagaaattgaaataattaaaaagaatcaagcagaaattctagagttaaaaagggcaaggaacatactgaagaataatatatcagagtctctcttttttttttttttttttgagatggggtctcattctgtcacccaggttggaatgcagtggtgcaatcttggctcactgcaacctttacctcctgggatcaagtgaccctcccacttcagcctcctgaatagttgggaccacaggcacacaccactatgcttggttaattttttgtatttttggtagagacaggatttcaccatgttgcccaggctggtcttgaactcataaattcaagtgatctacctgccttggcttcccaaagtgctgggattacagatatgagccacagtacccagcctatcagagtctcttaacagcagaattgatcaagcagaagaaagaattaatgagcttgaagacaggctatttaaaaatgcacagttacaggagacaaagtaaaaaataataaaaaagaatgaagcatgcttagaagatctagaaaatagcctccaaaaggcaaatctaagatttattggccttaaagaggcagtagagagggagagatagggatagaaagtttattcaaggggataataacagagaacttcccaaacctagagaaagataccaatattcaagtacaagaatgttacagaacaccaagcagatttaatccaaataagactacctcaagacatttaataatcaaactccaaaaggtcaaggagaaagaaaggattctaaaagcagcaataaataaaaaagaaataacatacaatggaggctgggcactgcggctcacgcctgtaatcccagcacactgggaggctgaggcaggtggatcacttgaggtcaggagttctagaccagcctggccaacatggtgaaaccccatctccactaaaaacacaaaaattagctggcagtggtggcgggcacccgtaatcccagctactcgggaggctgagacaggagaatcgcttgaaccctaggggcggaggttgctgtgagccgagatcatgccacctcactccagcctgggcgacagagtgaaactccatctcaaaaaaaaacaaggctaggcgcagtggctcacacctgtaatcccagcactttgggaggctgaggcgggtggatcacaaagtcaggagatcgagaccatcctggctaacactaaccatctctactaaaaatacaaaaaattagccaggcatggtggcaggcgactgtagtcccagc

SEQ ID NO: 315383 - DNA, 4001 bp, Homo sapiens
agtcaagagaagatcaacattttatgataggaacaatgatagcatgtttgtatgctgatggtccagtagcgggacaaactgacgatagcaaaagggagtcttatcatataatttataaatatgagggaaatgacactttgggaggcagttagaaaaagttaaaactgttggccaaggtcatagagcaggatgtgacccatacctccatccccaccacgtcccagaatgagcacagcaggtctctggctctgaccatcaatagccacagacctgtgagcagcttctgtcccagccactggggagacaggctgccatagagggacaataaaagtgaaaccacctccattaatcagtgcacaggattacatatgaatggctgaagccttgccaaaaagctccagctatgacaactgaccaagaaaatcaaaaggctcttaagcaaaaacatgtctctgagagcttctataaagcctgtctgaaaaaaatggtcacagagctcacagacacagctgtctagtccaagggcagaagacagaggtctccatagaacccactactgctgggaatgagaggagcagactgagggcctataaaaaacaggcccctggatgaagaaatatctctctcctttctcattcatagttgtgaggttcatacactagcccttgtgacgacttgctttgaccaacagaatgtaatagatgtgatggagtttgggatctgagcttaggcctcaataagccatgcatgctcttatttgctccctcagagccctgtggggctgccatgtaagcaagcctgtgctagcctgccaactatgagggaccacacaaagtagagataagccatcctagccctagaccagccagcctcagccaaaacagaagttggctgcagttgaatgtgtgagcccaactgagagcagaagaaccaccccactgatcccagtccaaattgcaaacccacagaattgtgagcccataaacagttgctattttaagcagcaaacactaacttacatacccaactaatatccacaggtgagcaagtagaattcagtgactattggtttacaatatatctttggttaagaattactcagtgagactttaaacctcaatttttggcattggtacaatagagtatgggctgaggccaggcttggggatgaaaggcaaagcctcaaggacagaaacagcaagggcgggagtatgctcagaggtgaacatgaagaacggcacgctgctatggtttgaatgttccctccaaaactcatgttgaaatttaattgccattgtaacagtactaagagatgggtctctggagaggtaattaggccatgatgactctgacttcatgaatgaattaatgccatgattgtggaagtatgttaattatcatgggaatgggttcactatagaggaacacatttgttcttctctctcttgtgtgcactttacctctttccctctcaccttctgccatgtaatgatgcagcaagaaggcctcacaagatgccaaaccttgattctggacttagactccaggaccataaaaaataaatttctgttcattataaattacctaatctcagctattctgttatagcagcacaaaatagactaagatacacacccagcacaattccatgccacactccggaaatcaggcctatgatccccatatctctacccaccagctccagtgcacaaagcccagtcttcccaggggtctgtgcgaccctctttcttgagacaggacctcccataacctcatacaacaaatgtttacccctcttcaatgcttatgtttccttaccttgtccactagattctagccagcatgatcctgcctctgtccacaaagactcacagcaagcacaggcacttcctgcattctgaggatgtgtaccaagaaggagagtgtagaactcgacctgattcccttacatgttggggaacatgctgagctgcttatccaacatcctcatccctttctcccctgcaaagagaacagatagaaatgtgcccagatagactacatatcccaaacttccttacagtgagaggagtcattcattcatccctccagaacttattgaacacctactgggtttcaggcaagttctggagatgccccagtgaacataacagattaagtatttgccctcatggagccacatgctagtgagaagaaaaggtgacaataggcaaatgcccaagaaaataatctagagagagtataccatatggcgatgactgcttcgaaaatacgtagagtaggatacaggaaattgagtttgcacagcaagagtgggagcactattttttgtaagatagtcaaagagcacctctctgaaaatgtcattttttttttttttttgagatggagtctcgctctgttgcccaggctggtgtacagtggcatgatctcagctcactgcaacttctgcctcccggattcaaacgattcttctgccttagcctcccgagtagctgggatcgcaggtgcctgccaccatgcctggctaatttttgtatttttagtagagacggggttttgccacgtccaggctggtctcaaactcctgacctcaggtgatccacccgcctcggcctcccaaagtgctcggattacaggcatgacccaccacgcctggctgaaaatgtcatatttgagcagatatctgacaaagatgatggaaacacaacacataatatccagtgcaagagcatttcagctggagggaacagcaaatgcaaaggccctgaggtaagaacgtgcctcaaggtactgcaaggagagtagtgtggctgagtagtgggagcaagccgcaaaatgctaggcaatcagagaagtgtcctacagggcttttctggtcactaaaagaatgagatgggatctcctgtggcagggggttgaacagaaagtggcatggcctgacttctgttttagaaggattactcttactggcacattgataaaagattttaaaggccaaaggcagaaacaggagacagtgcaagaggccattttcttaatacagttttaaaatgatgatggtttggatcagggtgatggcagtgaaagcagaaagcagcagttagaatccacgtacatttttaaagcagagacaacaggatttgctggtggattgaaatgtgcagcaagcgagaaagaggggcgtctaggatttcagcctgagcacctagaaggagggaactgccattcaccaagaagacaaggtgcccactggacatccgtttcagatggaattgtgccctcaccaaatttttatgttgaggtcctagctcccaatgtgactgtatttggagatagggccttatcaaggtaattaagattaaattaaggccaagtacagtggctcatgcctataatcccagcactttgggagaccaaggcaggaggattgctttataccaggagtttaagaccagcctgggcaacataaagagactctatttctacaaaaaaaatttaaaatgtaactgggtgtggtggcatgcacctgtagtcctcactactcaggagactaaggcaggaggatcgcttgagcccaggagttcaaggatgcattaagttgtgattatatcatgccactgcagtccagccagggcgacagagctaaagtctgtctcaaaaaaaaaaaaaaattggtcatgagggtggggtcctaatccaatatgaaagaaaaggccacgcagacacatggaagtggccatgagcaagtcagaaaaagaggcctcaggagaaagcaagactgcctaaaacctgatcacagacttccagcctccagaactgtgagaaaataagtttctgttgttcatccagtcgtggtttttttgttatggcaacttgagctgactgataaaaacattcaagtggagatgtgaactcagcagttacatagacacggctggagtttggtggcgaactctgagctggagatgtatagctgggagttgtcagcccttcagtgg

SEQ ID NO: 315384 - DNA, 4001 bp, Homo sapiens
tgagcaggagaacccagaaccctgccttttatcctccacctccttccatcaccccagtccctgcagagttccctgaagcactcttttggaactgcagggctacacaaaacctagcttgaaaattgtgtatttagagttgtaatggcaaacagcttttatgtcgtgtctgaactcaatcgattggtagcagttgtggaggactgagctgaaaagtgttttggtaaactgattaagtgccccaaatcttcacccctcactgtattcgcacccttataatgtgacttttgggctcctcccatcgagagtggtgtgaatctcccccttcattctgagtttggtcaaggttgtgacatgacagaagcttcaaaaatgccggcaggttgccacttctgttcttgcacctccaagtttgccataagaacgtgcccggacagcctctggaaggatggcagagttttccagaaagttttccctgcacagccaaggctccccagctaagccccagacaggtgacccccaattgacagcctgccaccctgcaggtcacgtgaggaagcctagccaagaccagtcatccagcctgaatcactgacccaaagactctcttgggctaaacagacatttgttataagccactgaattctgggtggcttgcattgattgtggcaatagatcactgagacgtgttgatagttatgtctgccatgggcacaggaaggcagccagctgcatccctgccaggcattctgggagaattgacggactgcctgagcttcaaagcattctccatgtcccaccatccctggctttttcacacattacacaccacaggcaaaagccccgtttcagagattcgcccaagatcaccttccctgtggtagagcctggggatgggtccagtcatgaacctcctaagagacgcttgggaagtcagtgggcagaagtgaggctggatttggcacctgttactcagccatcattccacaatccaaaactgggcagagggagaaagggggagctgacacatccttgaaaggcatagataataccctccctcccttaagatcagtctccaatcatttagttggcttgactgcagtcattcacaccttcagctggacgtggaacagacttcccaactcgtgcctgggatccatgtgtggatctgctcagtaagaactgagcagtgggccaaggggcctgggggctggtccaaatccttgcctgtgaagctgtttagactgtggcacttggtggcaaaggccagctggctgtaacctcattctcctgggcccaaagagtgagcaacagggtgcacacagctctaaaaaacaaacttgacttcaggcagctccttcttttcccttcctctgagaggcccagattactttgtgcattgcattcagcttgagcaatggaacaccccacatgcatttcctttttcagagtccacactggcaaaagctgctgttgcaagagtttggttgcaaaactggccctaaactttcatggaaggagataaatggctttcagctgaaaaacatcaaagactattttggagttgtttcttgttacagtttaggatgaggtctaagaaattaagccagacatggtggcgtgcacctatggtcccagacactaaggtggctggggcagaaagatcgaggctgaggcaggaggatcacttgagctcaagagttcaaggccagcctcagcaacatagcaagactccatgtcttaccaaaaaaaaaagaaaagaaagaaattagcaaaatgtactggctttcaacttctggcccctatctgcctctagcctcgcctcccgcacttgcctcacacttcgtcagcagctctcacttgctgtgggctcacattcacacaaactggactatttcttaccttttgctggtccttttgccttggaagccttccctgacttcactggctctcttctactcctcttctaagcctaagaccaggtgtcactctctcaatgatcagttaggtgctcctcctcttggctctcatgacaccagcactttcttctgtgtacctatgttaaggtttcttccagattgttttatcatctctccttcttgggatgcaatcttatttgtgtgtctgtggctgctccctctcacgaattcatttcttctcatggcttggaatctttcccgctagctcgtcttcagcagggtgattctccatggaagttccagcaccctgggatatgcaggcatcttttagcttctcatcagcttatgctgggattctgagggcttcagggcagtgtttatgttccactccttgcctggagttcctgcatgactttatgttcctgcatcactcacgtggtgtgaatctgaacttcacacacgcacacagttcaggctcagcctcgaattgctcacaggcaactcttcttctatccactgaccggggcaaagtgcagcttcttctgctttcccagactggatagcagagggttttggtctttggtttttgttttttttacttctggtttaatggatggaccagtcttcagtgcctcctgggtttatgtaagaagctcaagtctagctccccacctacaggggtctgaaagtttctatcagactcatctggtgctccactcacaaactcttggcctcccctctgattcagccatggctggggtggacagtgccatgtgggcttaggttcattatatatgacagtgtcagcctcaagcatacaaccaggccccatgaaccagttccattccctccccaaccagcctcaagagcctgtgatggggcaggatccaggggtcaggtctggaccaaacaggatgattccttgggacagctgggatcaggcttcgtccaagggttggttgtgaataatagttacggagccctggaggccagaattagggttaactctgagagaatataatcaaaggtcaggaatgaagggcaagttcgagactgagcagagttgaggtaaaaggaaaaggccaagaaggttagacccagtggttaagactgcgaagctgctacggttgacacaggcaggaacaaagtgagcatgtgtattctcattgaatactggcagtaggattactgggcagccattcacctcacagacctagggtagagcaaaacaagcctggattatcccagggtaatgcagcaaggtggtcaccaacagactaatagaacacaaataggactaatagagaacctgatggcaattctggctttaggctcaggaaatcctgagttttctccaacagacttagagccaaggttaaagcaggggccccctcctgagctttccttcgggcctgccccagagaagccctggctgctccaagtgatcattagctttgcaaacactagagttcagcttgacacagcatctcaaggatccctgcaggatgagggcacagagagatgaaatagacccacttagagtggggtgcctctgaggtcagagggaaaggaaggaaatcctgctctcaaggcaggacagtgtgtgagaaaacaacaagggctggaaaggacagccagattggtgaagcccctccctgcagtctttgcttgtcttttttaatgagtcttccctttgccaacctccaggcgaacgtgggcacctcttttggcttaggctcttctctgtaaggtcttcctggcattggcaggggttggttctgggcagttggtgaccatagtcattagcatcttgcctattgtggccaaccacaaaagtgcctggctttagttttgttcaacctgcattttacctggcactcttgcatgttaatagttaataattaataatttcaatcttataagctattaacaagaggctggcaatagacaattttaattgagctcttactgtgtttcagacaccattctaagcattttataagtagtaattcaatctacagccacgcttagaggtagatgctattattattcccattttatagatgggaaaaatgaggcttacag

SEQ ID NO: 315385 - DNA, 4001 bp, Homo sapiens
ctgagaaagccagaggaaaggagccgagaccgcagtcccctgggcccgtttcctcgtctgtggaatggcatgattattgcatctcacagggctgtcgtgaagattcaaggagcaaatgtatgtaaagcgcttcggatgtctggtacattctgagccttcaacccacctgagctgttgaaactctgggattcaagcgattcgggtcaaagaggaacggtgtgacacctgcctctgtcctttccaaggtggactcagggattgcatacgtctcatccagaacccccagtctctcttttgtaagctggcggtcatgagatgtaatgaggaaaaggtttaaacaaatgttggtccctatctgggacctctgaagtcacttttaatggatttggggattttacagatttaaaaaggggtgcctactgtggcccatttatagacctgtggagcgaagagaaggagattagtcacactgggggccggagtagaagccgttttaaattagttgccccgctctgccttgagactgagactttctgactctcagtttcacccttgggttccagcacccagatgagaagagagagaaggtggaagaggaagagagggaggggatagagcagcggccaccacctctccctgagagggcgcagagtgggtggttccccccaggtgagcaaggtgggggccccgtgggtgtgctgggtaggggtggagtgtgctgggagcacgcgggaggactgcgcctctgctcctcggggtgtggcgcggcccactcaggagccccttccagtgtagactccaggagggtactctgagctaggaatgccttcctgagcgtggttggtgggggctctaaggccattcctccaggccctgagggggcagagagacacgtgagcactaacccaggagccgggactaggctgagcccactactcacagcctggggtaagccagcctcaagaccctccaggatggtctcagcctgcatccgactgcctctcctgcctgaccactgcgctccttcacaggcctctggccggcgagttctcaagatgtgcaaaggtttcctgcttccttacctttgcacacctttgcttattccttttgcccagaaagtctttcccagcacatttgactctcttgaattccagtctctcccgcatggctaggatcaagcccgttctcccatcgctcatcaaatgaactcagagcatagtactttgccctgtgttaaggtcttgtcttagctctggattatatgtccttgaagggtagggaccatgtgtttgtcaccacctgtccttatacacatcaggtagtacataaatcaagggaggcgtgagggacaactggaaggagcctcgttttctccatgtacaggatgggactagtcatagtggccgcacagggctgtgggaactctggtgcgattctgccatgagtcaccccatctcctccttgcctgcagggtctcgctccatcagctgtcctcttggaccccgcagcctccccatcctgtggccttttgccccagcaaatctctcctctctgaagccatcctttccttgaccctgcatctctctcagccaccaccccatctctgcctcctctgagcaaaatcgtctttcccacctccccagccctctgcagactgcctcggccttgcctgggcatcatcccctcagcttcagggacccacaattggtgcttcctccattgggaaatctttccagactgtgcttcccaaccccgacagccccgcaaagctggtttaagtgtcccggtgagcaactgtgtccacctaggttcactacccacagtagagggttttagtgctcaaccatatctgctcttttcttctcctgagcacacagaatattctgttccgctcttgcggcagctaggctgggagcagagtgaagagcgttactttgggacaaagcattgcttagcagtgcgggatcttccaggactttcttcccctgccccatccatcatggcagcttataatgaaatggaggtacctcaggttccaaacagtctgagttactgagacactggttgggggggctctcaggccaatcctccaggccctgagcaggcagaggggcactactgagccactgacctgagagtcacccagatcaccacaggttctgtgagcgagataccatcttttgttgtgtcaagtgactaagattcgagaggtttgttaccacagcatagccaagcctttccccactgatttactgattaaagaagtgttttaaatgggttaatggcttggtaaactgtaaagatctgtgcacattttagttattattattgctgtcaagttgtagcagggctggagacatgatgtggctggagagtggaggaatggccagggtatgccatggagaaaaacttcctctcatttatgatttgccaagggcttttccaggatctgtttccatatttaatctctgatgaaaggttataatgaatctggtgtctggtgctactggcaggagatggacctttcttccaggtatttacttcctgtggttgcgaaagataggatgtatttcttctggatttgctgcaatataatattttagtatcaatttgatactgactggcttcagcctccagcttaactgtatctctccatctttgagagtggttgaataaaatcacaatatggctttgtttcttgagcaagaatctgctaagcagtcaccagatggagctgttcccttgaaggtctgtgtgcaggattctcagggccttttcttctcaaaacccttccctctttgtctcttttctccacaactctctttaactcatggtgctatagggataaattggccctgtttaatgaatagttgtgatgttgttgctagttgaatagaaggtaagtaaatgaactgttacctggttcttttgcctttgttacccaccttaatggccctcaagagattcccccacttccctcccatgggccagtgaacatcagtgggaaaagaggggcctccccaccattttagtccatgctgactcttcagaatgactcagctggggcaattgggctggaccagagagaagtggacagcctggtttgagtctagacctggccagctattatctatgtgaaattggccacaatggttgcttcctcgggatcagattcctcacctttacatggggcatccatcatggaggatcaccccaaagggctttgggccaaaggataattgatagagatacggtatttagttatcactgtatttgcgctttttccaagaagggtaaaagaaggattgaataaaaaaggttcctgcacactcttccttttccggcttttttgttcagcccttgaggagcgggattctgtagggagagggagtggtgcagaggagtgggcttcctaggactggggccgggagagggcatagccgcgagtgtgcacagggaggtgggcctaaccctggggtctcggctttgtagggtttccaggctcaggtgagaagcagggccattaaacagcctcaaatgggaaagggaccaaagacccacaatggcacccttgaatgcgtaggcatccaaggaccttcagatggctctaggagccagacccaagcatggttgatattgaatttccagccagacagtaggatggggggtttgaaatcaataactgatttaaagaaataagtgatttttttctttttgcacatccaagcttgtgaagtgagaatgtctctctcagtactgataagggcctcatataaatgtgagctcttggattgtttttcatgcccattgactcttagttgcagccatccaaaaaatcagattcacaggcatctcttcaccttgttatccttcactcacctttgaacataccaaaggcctatcgagcctgtaaatttctcagtggcctaagcacaaatgggcataccccaggctctattgcactgacagcccacctcacaggatttgggaactacccacat

SEQ ID NO: 315386 - DNA, 4001 bp, Homo sapiens
cactgctatatcataattagttatatgactgcacacaaggtatccaactattcttctgtttacagacttctattctgcgtccaattacaaacgctgttactttgaacattctcatacacatctcccagtgctcaaaaaggggcaagcagtatgagcatcaacctggagcttgttagaagcagaatttctgggcctcccctaaaactaatgagtcagaacctgcattttaacaagatccctgagagattcaaaagcatattcaagtttgagaagactaggtctcgagtatgtgtctaatctgccattttaggagatgtcaaatttgttttttcaaagtggcagttttaacttaaactccttcactagttgtcaacgagttgcttcacctgatcatgaacacttgaagtttatagtttatatatatatatatattttttccaatctggtacacagaaaagacaacttctgtttctggttttcatttcattagtttccaaagatgctgagtatactttcatatgcttaagggtgattccccaccccctgccccaggaatgtttcttcaagtcatttaaacgtttttgaactgggaatttttttcttatttgcttttagataccctataattaaatgcagcattttatccattataattttaaattcacactcaccatgattataagaaggtgaaagccatgtaaaataaacgctgaagaaccatataagtctaaagctattttcggtcttaattctttggaacttcctcttttagtgtccatggttcggagtgacaaatgactttcttcaatgccaaaaatgaaatccgacttaagcagaaaaacccagttttataagggcagaatcttttaaagataatcatatactaatatgggaatctggaatttttcacgttttgaagtaaaattcagcaaatttaaaataaaactagctacccgacacacaaaatgaacaaacgctttacatttttatatggactagtcacaatcagacttagcactaataccccttaaaaatccaccggtatatgtatttagctcgcttgtgtgtattcctagtacgaaaatcatctcagaaaaattttgcctccaaaaggagacatggattcaaggtgcctgccatttaattacagtagttgctttttaccagagacatacaaaatgtttgccatcctcctcccactcaaacttgaagaaaaaagcccgagcagcagctgactcttcagctgatcgaaactgaaaatgcaaaacattctggctccccagaaaattttttaaaatttttaaaaatttaaatgacttattccgaatccttgaatcaacaagcgctgcccataatattcaatggataaaacctggaagccgtgccattatcaccgccaccacctccccgccttgacccggcagcccaagtcggcgtagtggttccagagctgtggatctgcggctgcggccaacattcccgaggattctgcctaagcggggtaggcgtgaggccggggaaggggcggcagccttctaggtgaagggtccgcccttaccttggcggtcctgaggctgcaccaggcggttggtgacagtgtcgcatagggccatgatctcgtcgttgtccagtaggccaagtaggttacggcagccctccatctctgaaaagctgagtcccgacatctccatccccgggactgggggggaaagacaacggcaacaatgtcgcccctacggcccactgggcccgcgcctggcaacagacaccggaagtgcctttcttgttgttctccgtcgaagggcctccagtattccaggcccctgggcggaagtaatcgccaaagaggtcaatcaggaaacgcagtgccctcacttgtggttccgggctggggacggagtgaagtcccacgtatctcaattaagggaagtgctgggtttatatggagaacatagactatccgcaagggagctggttaccgaaagagaagtccctcctccaaaagagcgccttggagggctgcgcaggtgcaggtgcgtggaaagcagcccgccacccgggcgcaccgcgagctcccgtgatgccgcggggccggccaatggaggcggctcctccccgcccgctggccgggcccccgggagcgcttgaatgtcttctgcggccacttctgagttgggtgagccggtagtttggttccttaaattaagtaaattaaaataatttagttttgtttaacattatagtatgaaaagttaaaaatagataatccactgtgcctggccgccttccagcggactttcctctcaaacacgccgggaccgtctcttgcctccatttccctcgttgccggctcggccttagaagaggcgatgtcgcgcgcaatttaaggttgggggttctggacgccagattgccagggttttactccgccatttaccctgactgtaagcaagctccttagccttttccccttcagtttccaatggaagtggatctagtggagatgcctacctcttggggctgtgggggcggggtgaacagtgcatggggctcttactaaagagctcttactaaactttagctgttattactattggcatggtagcaacacacatttacgagagaaatagtcatgctctgttaaacaggaatcagactaaatgcattgtcacttgcctttttccatttttaagtcctatttttgatcagttgacatttaattggggtattgccatttagtagctgaaatgtacacatctgcagatcctggtgagcaaatttaactttgtttaaaatatagcttggccgggcgcggtggctcacgcctgtaatctcagcacttcgggatgctgaggcgggcagatcacaagaggccaggagttcgagaccagcccggccaacataaagaagccccgtctccactaaaaatacaaaaaattagcctggcatggtggcggacgcctgtaatcccagctactcggaggctgaggcaggagaatcgcttgaactctggaggcagaggttatagttagccgagatcgcgccacactcactgcaccccaacctgggtgacagagcgagaccctgtctcaaaaataaataatagctaaatatcagtcatatattgtacatgtagtccttaaagcattcaaaatatggtgaaattgtcagtggatgttattggggtaccatttactcaacacaggaattcttcgtattttaaattaagtattaatgaatgcctgctatgttagctattgaaggttcagcgacatgaccctgacctttcttcaaggagcttttgggagtgttgttagtaaagagatgacaagataagtgctaaaatatgttggtatgggaccacgtggagggcatgtccaacttatttcattcgttcattaaaaatgtattataattgagcacctacttgccagttattgttctttgtactggggacaaaaaacaatgcttgcattttgttgggaggaaatagacagtaaacatgtaagaaactatatagtcggccaggagatgctatggaaaaaaataaatccagaagacaaggatgggagaggatgttagtactttatacaggttgaaaggaaagcttctttaagtgactgaagatcagaagaaagtgagtgagccgcaggagaagcatggtaggaagaagcaacagtagagattttgaggaaggagtccaggagactggagcccgtttgagcaaggaggaggcaatgagcaatgtgttagagttgcagtcaagactgatctaacgcagggtttcttaatcatagaactgttgacattttgggcaggataatcttttgtcgaggggattgtcctgtgcattgtgggatgcttaacgcatccccatcctctacccactgggtgccagtagcacctccttccctcactgtgccaaccaaaattacctccagacattgttacatgtcccctgcagggcaaaatcacccacaattaagagccatggatgtaaa

SEQ ID NO: 315387 - DNA, 4001 bp, Homo sapiens
gtctgaatctttttaatgagcctatatttattgacttttctaactgaaatacacttcactttattttataggacaaaagagaatgattaacacattagatgagattagttcaaggcattccttgaacacactccaagtactcctgtagcccttcaccttcactccatcctgttactgaggacagctctcctattgggtgacctacaaagctaacttacaaagaagtccagggtatctgtatataccttactaacaaggacgtcatgagaacattaaagaaccattgctacagggtaggtgctaaacaattacagaatactgataaccctgcatggatttggcttgttctacccaccacctgttttcaacaaggcattcccaggcctcacagaaggccgagtaggcacacattaccactacgggacaggcttgcctctgggacacacttcttagtggcaaaactgtcaccagatttctggattcagccccaagctagggagtctttagggtgtgcgggtccatctaatctgaggcaagtatttccaactcccattcctggacaccgccctggaggactcatacagccagttcacagttgtggccacttgcactggtgaccagactatctttgttcaaccttcattcttctgtggcattcatattttattcagaaataagtttccaaattactctccagagtacctataaaagcagactttgcaatagttccaggaatcaatgtagaacaaaagcaatgctttcaacttttgaatttcctgcttatccctaaaatcaacagctgggcagccaaaaagttgggggtggaggagtggggcctagaaagatcaggtcggggctctatatggggagttctgtgcacccagaaaacctcaagccaatcttaggagttaatcagaaggtggatggctgggaagtcaaagctctgatgttttacaagtctttgatgagagtgaataatgttcccatcattgctagggatgaatcagaaaagagcttggcctaaaaatagccagggacttccttagggattgagaggaggtaaaagcaaggtgggcgaagtctcaaccttcgagacaagaactttgaaattattttctttcaattgagcagggcaagttcacctcccccgcgccgaccccctaacccgcccgccccatctctacgccagccctaccccttctccccttctgaccgctttctctcctctgtgctctcccctatctctcttccggcagaatccaatggccaggctgggagaaggcagaaagtgcttggcggatggtaggcatggaagaaggctgggggctgcggcgaggtgggtggaggggagggagagaagtggcaaggcagtgaaggtaagaggaggacagaagagattctgagagaaggaggatactcaatttgtcattctcattctccctactggaaaaaagaaaaactgaattaaaagttacataactttaaaaaactacttccatctccggaatacctctctgaagacagcagcggccacacctcaccactaggattcctaaagcgcctcgggggtcagaggggttggaggaccccaggggctggggaggggactgctcgggccgaaaggtgtcgcggtgactcggctccattcagagcactcgagcgcgccccaccctcgctcggcgccgtcgacgccccgcctgactggaaacccgaaactcgcgggtgccaggcccgggtcctactactgtcccgccgccggcaagttagggccagcgccaaggggaccttacctcggccggggggacctcctcgtccaaagaagggaagaccttgtcggcaccattgagaggcgtgttctcttctggctgccgctcgagcaccgagagctccagctcgtctactggctgtgagggttgggccaggtccatgtgccggcagggaaagtctgagcggctccgcgggaggccacagcgccggcgagtcgagcgacctccccgcctcacactccacccactgggcggggcgtcgcggacctcgggcggcgggagcggaccggagcggacaggaggggcaactgtgagtggcggccactccctggatcccgcggggtagagcacctgaggccgtgccggagtgggctccagagccgaaggctgtttttctgatttgttcagggcgctgcctgctatgcctttccccgcgcctgcagatgcagaccatctccgtttaggggctgcctgggtgccgggctgtggtaaggaaagggtgggcccggcagcaccgtccaacggagaaaagtttgcgatctaaccctacgaactgttggttgttggggtttgccacagtcctcgcggcctagcaaaagtgcattcattcaatcaacaaataaccatgcctcgtgccagcatggtgctaggttctgagtgcatgaaggtgaataatatacaccaacacacttcctcgcaagtccagagtcaggcacagagacagtattgtgtggtgctggggacagcggactctaaaaccagtgtacctgggttattctccacccagagggttcctcactgtgagacctcggtcttcatctctctgtgccaacgtcctcatctggaaagttggtgtaatatttgtaccctcctaaatgtagttgttaccaggattacaagggttgttgtaagcaaagcactcagaacagtgattgacacagcaagcactcataaatgaccattattatttatctttgagaggaggggccttacacacacacacacacacacacacacacaatgcacgcgcacacacaatctccttgacaccctatctgtagttcagaacttccggtttagttagcatggaattatgtttgttaagcacagcatgggttgggccaagggcctcaactctcaagcttctgttccgaatagtcttgctccttacttctcaccctccacgcaacacacacacacacacacacacacacacacacattaagaccagaccattaacaagaagcatataaatcagctccactccaaatatgttgacttgagtccaaaagtctggcatcttcagtacctgatgttgagacacagcctagatatcctgtctccagcagtctgatgcctgctaccagatcccctgaactttggatccatctgcctgctaaggggagtctgcagtgactcatctgctgacctgcactgacttctgctccaacaggtggatcttgcaagaatcaggctgcattctcagctgggatttttgaacaggttttttaaccaaggagcaagggttaagggaatcaacaaggcatggtgacgtacccagggactagcaatagcgagaagctgttaacactcctaggcctaaaagggactggagactgataaagaactagagccattgaagggtgtgggaatttgcagggaggtcttgataggatctgtagtcacgaaaacatgcagacctgactggaagcactgacacctctcaaacttctgattctccccacccccatccttacccagggtccagaaaacttttctcatagttcccttatttgattgcagaagttcatcctaaatgtgagatttttttctcacttcagatggatagtagctatctccatgcctgatttctccatgcacagatacctaaagcctccctcactcccccagagaatcaaaaagcaactgttcctgtctcaagcacaccctaaaccacatcttctaatgccttttgagtactgttaagcaaggtttatatactctgtaattagatttaaatgcatttctataattccatatgcctaacccttgttctcatgttacagtggaaggaatataagttctgaaggcagacagaactaggatcaaatttagactctcactatctgtgtgttcttgggcaagctgttcaatgtctgcttgttttcttataaaatgattcctacctagcagagtcaggaagattaaggtaaagaatttattcctgtgcctgaa

SEQ ID NO: 315388 - DNA, 4001 bp, Homo sapiens
ggcaaaacacagttacagcggaaactggagatctgacagtggtgctccccctcctctctgccacagcgcgggaggacaggtttaagggaagagagcaccagcgctctttctcctggctggggtcctggaccatgggaggtgctcaggtgtggcctgatgctctgagatggaaacgtgggcaaggtcagggcagagggccctgtgtggctgaagaagcattcatttcctcccgaatgggcagaggacctggggtggaggacaggccagtagccccagggaggatcttcttgagggacctgaaggacacacaatgacagccagtgacaagaaaggagcttagtgtttcatagatgcctgcagggacagaagctgaggaccagtaggaggaggcccagctgagatgcccgtaggatagatgtggaccactgaccaaatggcccacccagaaatttgaggcaaagacaccctggccccagactgcaggagccaactcctggaaaagggggcaggaggaaaccgaaatgcactgagaaagtctcaagtgcccaaggttacccatactgaggaggaaatccctcttcctcaactgcccaaaggtagcctctagatggaaaatcagttctggaaaaacacactacatcgtatgtacttctggcctgtgatacgcgtatccttgcaagttcagatcatcctctaaagcaagctagtccaacctgtggcacaggacggctttgaatatggcccaacacaaattcgtaaacttaaaacattacgggattttttaatgatttttttttttagttcttcagctatctttagtgtcagtgtattttatgtgtggcccaagacaattcttcttccagtgtggcccagggaagccaaaagattggacacccctgcaagagttaacatgcacaaatgcctagttggcttctcaaaaacttaatatggtggagaaggccctttgtgcatgataccaagacaagaaaatacaggcagataaaactggctatttaaaaattgaatatctggttaaaaaaaatgccacaaaattatcatgttcaaaatcaaaagacaaaccacaaaatagagggcgatatctccaacatgtggcagaccagagctaatcatatgtcagatacagacagctcttgctagtccacggcaggtaaataagaccttatcaacaatctcgcccaagggcaaccacaagcaagccacagaataagctatacaaaatcatgtaaaaatgttccacttcaccatgtttttaaaaaaatcaaattacaaaaatggaactttgatttttacaattaatttgataaagaataaagccctatactggcttttcaaaggatatggagaaaaacatgctgggtttgttgtttactctttagtaagtaaagagtaaacagctatcaaattcaaaacccgatttccttgtccgaagcagccagactgccttcatctgggtcccctagggcgggcctgggagctgggcagaacagagaacacattaatctgggcctctacccacacctcgcagctgcagcgggtggagggatgattctgcgagggggcaggcaggagggtcctgggcttggcttttaggggaggggctggggctgagggaacaggctggagagagctgtctcatagggtggggtgcgacgcggacactttcaggcctgctgaactgcaagagaagcagggaaggggcgggaaggaggagaggggagatgccaggagttgggtgggagagtgcggagaggatggtgtcagagaaggtcctcaggccctcgccccaccccctcagccatcccataaggctaactttgttctttctcgctacttacccacttggtctttctagaacgtttctttccagcgaagtccctcaagtggttgaggtttgtcaacagagctgaaatgctctctcaagaggtcttggggctccctaggcgttactgtccccggtccaggtggcggcaggagaccactggaggcctcagattccaagcggcccaggagcgcagtccaccgggcttttacgggaatgcgcgcagccgcggggcggggcctgggctcctggcggtggtcggaagaggtcccaggactcaatcagtttccgaggtgtagacgccggtggggttgattgggtcagctgcttatcccagaaatgaggtggaactcaattgtattgagggctacgccaacagcgcagaggtgttaccagggtatgaagacgttcccctctcggatgggaggcattggggaggagtcctgcaggcggtagctttcggtggagtctgcacgctggatgggccccagcagtgctgggggagtggagctgacgagggaggagacaggaggcccacagggccagaggggaggccttccgccttccaaggccttgtggatggggcaaaagaggttggtctctgtcccgggagcaacgcgagccattgcagagttttcatcagaagcagagcagtgtgctcagctggggcagatcctgcgtttgctgggtccgaagcttaaacaactgggccatcccacaggaagagaagtcaaatgttctgaatgtgcatgctcctttgagtgcggtcattcgggtatgcagctcccagtacccctataccctaacgtttaaggggagcttcctctgtgctaggttctgttctgagcacctctcacgcatttgctcatttcatcctcacaccacctggggatacccacgttaatgcaatcaacaggacccagaaaatccagttgcttatccagaaggtcacaagaagccccaaagtagacattataaaatgtatacaacacaactgattgtctcagatgaccagcagcagtcacttctctctgagagccccagctgcctctgggtgctgatgacattgcgccttccctgccgttcagcccagaatggtcatgaccccttattgtccacagactttgacattccttcttgctttccttaccttttcccaggcctctgaaaatagtccatgcattaacattcagtgttcttcaattaaccacttgaatgttccacacgggaaccttgcccaatacactttccttggttcttcagaatggttcttgccttgaatcatattttgtctgagaccacccttaccatacatggtttttgttgagttgttcgcattactgtcagtattcatctttttttaaatttgtttgtttgagacagggtttccctctgttgccccagctggagtgcagtggaacaatcatagttcactgcagcctcaaactcctgggtgcaagcaatcctcccacctcggcctcccaaagtgctgggattgcagacatgaaccaaggggcctggtcagtacttatctttcaataaataactttacttcattcatatttgttttccttaaattagcaaatcaatagctatattctccctacatgaatacaatattcttagcacaatttaaaaattatcctttcatatttcccctatattaacatcctatattaatgttgggaatattaccttgatcttgttatatcattttttaacccatacttatttagacttactaacagctttcactaatgactgtgttcactgttgcattttgacttacacaatttctttcttaatttcctttaaaattttgattctatatttctataatatataattcatataattctataatttgtattgttagtcactctatgaagatctgtacataggaaaatttggaaagtttttatatgcaaaaacatagttcattctcaattttgattgacaatttggctgggtatagaattctaggttcagagttacttgatcttagcactttgaaaataatgtgtaattaacctattgcccctcttttgttgctgagaactgtaatttttatcagaatctttctttataaatagtttcttttcccatgcaactaatataaatttttcttcatcctttcatattttgacatgtccttggaatg

SEQ ID NO: 315389 - DNA, 4001 bp, Homo sapiens
aatcaggttttaaaaaaattacatgcctatatgactggctggtactaaagaccccaaaattatattacacagtatgtactcagctataattataatacatatattagtattagtactattcctgggaactgggttgtgtaaattaaaaatgtaatttacaaacctcactctaaaacgtggagacatgtttcatcacatactaaaaacaaattcttatcctatggcccatgtgtttacccactcaaagtagctgtgtcattatgtgtcatatataagaaaataattgtgctttttcaaaaaaggctgtttcatcactaaagatgagaacagataaagagtaagtttgagggaaaagttaaacagaaaacaagatacacgcacacttgactatctcaactacaaagtaaactgagaatgccatgagaagttcaaacttaaaaaaatataaaaccttcctgcacaaagcacaaatttaccttagtgtaaatcagatgccaaagtttctcaaattcaatgctatgactacacttaaaaagaactggccacataatgttcttaaaatatcaattctactgttagttgttactaatacatcactattcaaaattacctaaaaaaaaaaaatctttcggtagggacgccagcattttaagtacagtaaatgtatattactaagacagctccttgctaaatttctgggtctcagagaatttgtccgggtatctacttcagcaaaatgctaacacgatctccaagaaccaaccttgctaatacaaacaaggttctcttttaaagatagcttaatgagaaacttcagttcaagtgtatgtacatcataaatacaggctaaacctttagagactgactagtttgggaactactgaataaagaaaatttcttcaaggaaagtttaaccagttttatgcatccattcagttaggtgatacagcagtatttaaaacacactctgactttaaaattaacccaatacacatagcctctgatgtcctaaaatttactaagacccacactaaagtttcatctgaagccaaatatttgtgttacattatttggctgaactaatcaaacgaagctggtttcttttaaagctaaaatgggcagtgtagagcttgagaaaagaaaataatataaagaaatctgcactttcctattcatgcattttagaaaaataaaaaaaaaaaaaaccctgtacctccagccctcagtgacagcaacccagaaagaatgtgaagtataccaaaattacttgtgaacttttaagtcatttttttctcttgtcatggaaaggagcacggtaacttttcctgcagacagaaggagaaaccacaaccccacagttgtaatcactgttcaaggacaccgcactgaagctgggtgggaatgtgcagaaacaagcaaatactccgaaagtaaacagtgtttttgttttttgttctctttttgatgtcaccagtaaagattccatcctattcccctaaaaggcacattacttttcaaaacagtcagacgagagcaaacaacgcaactggcgaaaggcaagaatctccttccctgatactcgccctggcctaatatttcatctcccttcaactagattaccagatgaatagggcaggtcacaggatcaggatgaaaacgtctgtctggccttaagccctcccagccccaagtccaacgctgccttacttttcctgtttctgattctaatcccacccaaagctcggctcacagattaaacccaccccgaccactgtcccgttctccgacttcatcctccccaacttgtcctcgaattaggtgtccaaatgactgccaggtaaatgagcgaaaacaaagactctgagaccgaagttaggccagccaccagcgccagaaaaggaagagcgaacgcggtgtagaacacttcagaagaactaggaaaggtccaagggctcgtgaacagtctgcgccgcggacctgcaagccccggcagataaaagcagaaaggcagggtagagagcggaaggaaactcgcagtagagacattttggggagtgttaagagacgcactccctctggcgttgaaagatccacagtcaaatccgaaatgcgcccgaatctaggtaacaagagcagactctccatcagcggggtcgccctcggcctccctgcacagccccggggctcccccggagacgccccttcccacgcctgcagcctggcccagcccggccgagtccgaactggcggcaagcgctggctgagccacttctcccgactctgattcccacgcgcggcccctcccaggacgccccctgccctggctccgcgcctacctgtagcaccagcggctcggggttgaaggccagggtcagcagcagctgcatgcgctccgagtccttgaggttgcgaagcaggaagctgcccgagtccttggtctccgcgtagcggcgcaccaggcggtcgagaaggcgctgcgaggggcagtgcaccaggtccgaccagccctccaccgcctcgggcgtgagcagacgcacgtcgccgttgaggcgcgcgaactcggtccggggcatggcctgcagcaggtcgcagcggggccggccggtggcccgcttgcagatgctctggtcgagctgcgccagctcgcgctgcgagccgaggcgcttgagcaccactcggcggcggccgccctcgcggggctcgccgtactgcgcgaagtacacgttcttcacgttgaggaagtccagcaggcgcaagcggccccacgcctcgaataccacctgcccgttgaggaagcggcggcaccagctcgtgccgaagcacgccgggcacttattgagctgcaggaagcgccggtcggtcagttcgttgcgctgccaagaggcgagcagcgacggcgagtgcagcaccatcagcaccaacaggctgcccagcgccgccagcttcagcgagcgggacaggcggcccagcttcgggggcaccaggcgccacataccgcccgcccgcccgcaacgggagggcgagggcacccccggggcgcccccgccgcgccaagacccggagagctaccggcaggaaccccgggcgagagaaggagctagcgcgcgggctggggcggagggcggagtaggtgtgtgagagaggaagacggggagcgggaaggcgcgggcctgagcgggctgcgacttctcccagtcactagtctccacaactctcgagctccctcctcctagctccccgccctccgactccggcggcgcctcctccacgccagccaagttatagaggagcgggagggggagggagcgcggggacccgacggtcgcgcgcccgtgcccgcgcgcacgcgcactgctggcttcgcacaagagctgcggcggcagccagccacgacaagtggggtctgcgaggaaaggagggactcacggaaggggaagaggagctaggatgtctcacacccacaagcagcaacgcacgtctcagagccgcacacccttgcttgtgcgcgctggctctcctgagaccaagaaggggagccgggggcggggccagaggggcggagcgagcgcgtcgcgcgccgcccggaaagcgtaagcgggagctcgcgggagcgggtgtgggggcggttcagagagggggaagctcgggctcttgaggtgggggcatgaactcgcggtttctggtttcagaaagagtcttaattacagtcatcttttatgattattgtggtttactggtgcgttcctttcactattgtggaaacggccctttaagggaggagggaataagaagaaatgaactgaggaagtctattgcaaatccttccctctggacggcgcgcgaggcggaggcagagctggcgcgattgcctcccctcgccttatatgggttgggtgcgcgcctggggggtggggcgaggccggggagtgcccgacgggggcttgtgttcccctcagctcgtgctcctcgcggtagggggtggggcctgtgaggaagacggt

SEQ ID NO: 315390 - DNA, 4001 bp, Homo sapiens
acgagagcaaacaacgcaactggcgaaaggcaagaatctccttccctgatactcgccctggcctaatatttcatctcccttcaactagattaccagatgaatagggcaggtcacaggatcaggatgaaaacgtctgtctggccttaagccctcccagccccaagtccaacgctgccttacttttcctgtttctgattctaatcccacccaaagctcggctcacagattaaacccaccccgaccactgtcccgttctccgacttcatcctccccaacttgtcctcgaattaggtgtccaaatgactgccaggtaaatgagcgaaaacaaagactctgagaccgaagttaggccagccaccagcgccagaaaaggaagagcgaacgcggtgtagaacacttcagaagaactaggaaaggtccaagggctcgtgaacagtctgcgccgcggacctgcaagccccggcagataaaagcagaaaggcagggtagagagcggaaggaaactcgcagtagagacattttggggagtgttaagagacgcactccctctggcgttgaaagatccacagtcaaatccgaaatgcgcccgaatctaggtaacaagagcagactctccatcagcggggtcgccctcggcctccctgcacagccccggggctcccccggagacgccccttcccacgcctgcagcctggcccagcccggccgagtccgaactggcggcaagcgctggctgagccacttctcccgactctgattcccacgcgcggcccctcccaggacgccccctgccctggctccgcgcctacctgtagcaccagcggctcggggttgaaggccagggtcagcagcagctgcatgcgctccgagtccttgaggttgcgaagcaggaagctgcccgagtccttggtctccgcgtagcggcgcaccaggcggtcgagaaggcgctgcgaggggcagtgcaccaggtccgaccagccctccaccgcctcgggcgtgagcagacgcacgtcgccgttgaggcgcgcgaactcggtccggggcatggcctgcagcaggtcgcagcggggccggccggtggcccgcttgcagatgctctggtcgagctgcgccagctcgcgctgcgagccgaggcgcttgagcaccactcggcggcggccgccctcgcggggctcgccgtactgcgcgaagtacacgttcttcacgttgaggaagtccagcaggcgcaagcggccccacgcctcgaataccacctgcccgttgaggaagcggcggcaccagctcgtgccgaagcacgccgggcacttattgagctgcaggaagcgccggtcggtcagttcgttgcgctgccaagaggcgagcagcgacggcgagtgcagcaccatcagcaccaacaggctgcccagcgccgccagcttcagcgagcgggacaggcggcccagcttcgggggcaccaggcgccacataccgcccgcccgcccgcaacgggagggcgagggcacccccggggcgcccccgccgcgccaagacccggagagctaccggcaggaaccccgggcgagagaaggagctagcgcgcgggctggggcggagggcggagtaggtgtgtgagagaggaagacggggagcgggaaggcgcgggcctgagcgggctgcgacttctcccagtcactagtctccacaactctcgagctccctcctcctagctccccgccctccgactccggcggcgcctcctccacgccagccaagttatagaggagcgggagggggagggagcgcggggacccgacggtcgcgcgcccgtgcccgcgcgcacgcgcactgctggcttcgcacaagagctgcggcggcagccagccacgacaagtggggtctgcgaggaaaggagggactcacggaaggggaagaggagctaggatgtctcacacccacaagcagcaacgcacgtctcagagccgcacacccttgcttgtgcgcgctggctctcctgagaccaagaaggggagccgggggcggggccagaggggcggagcgagcgcgtcgcgcgccgcccggaaagcgtaagcgggagctcgcgggagcgggtgtgggggcggttcagagagggggaagctcgggctcttgaggtgggggcatgaactcgcggtttctggtttcagaaagagtcttaattacagtcatcttttatgattattgtggtttactggtgcgttcctttcactattgtggaaacggccctttaagggaggagggaataagaagaaatgaactgaggaagtctattgcaaatccttccctctggacggcgcgcgaggcggaggcagagctggcgcgattgcctcccctcgccttatatgggttgggtgcgcgcctggggggtggggcgaggccggggagtgcccgacgggggcttgtgttcccctcagctcgtgctcctcgcggtagggggtggggcctgtgaggaagacggtgagaaaggctcgagtagtggcgggtttgttggagcttcatctttggggttgtatctgtaaaatcatttaaaattttcttgagtgagcacaaaataaagttctcaagccaccgtgttaaagggaaaataggatgaaggggaaccgacgcggcctggtgtcgccaggacgtctgccccaagcgccgcgaagaagccgggaagagtttgccaggcttgcctctgctgcccgccggctgccctagcccgtccccggagccctgcggttcctctccgcaaagctgatttcccggtgccgcccctgagggtccctgaggagcgggccgcgaagcgttgccctggcggtagccatggggacccggggctgcttggtgctccgcacggtcacgttgactcagtcaccccagactgcaaaagtaaggcgcagatgccgcacgaaagcactgtgtttagggataagtttcaggggacccggactgtttagcagtagcgctagtagatacattattatgctattcacttttagtgctagagtagttaaaatgagaagtgatttttagtctgagggacaggtggttcctgatacgttattaaacaactgagtcttaactgagttaattttagggcttgaacagtgcttttagaagaccatggtaactggcatgtgtagatcaactctacagcgggttaataagaaacatctataccaggttatcaaaagtaacaatactttcagtattgtttaattgtaacaggtatttgttacaaattcttataagaactcagattttgaaaaaaaaactttgagaaatttaataaattcaaaatagacgtgattttgtaacgatttgcattgaatacggacagacaaattgaaataatattcaaagctttctagaaattgacttactgtacttaagtttggctacttctgcctagtgccttatgccgcctttggtgggaattttatttaacttgctttcaaatatccccaaactccatataatatagagttaaaagctcaagtgagattttcttaggaaaaggagtttggtgtgatggttctggagacctgtgctgtagttcagctgtgaggctgctgctgctgctgaattgtaaacaaagcaagttattacttaactacaaatttcttctttctgacatcttttctatatgcctcataaatttgttcgattaatagtagacaatctatttagaattggtttaaaacaataaaagtactacataagttgccattaaactgattaagctgagagaaccggggcatagtgagactatttaggtaactagtaacaggattaaggaggtacctgtactgcttctttgtatcgaataggtctttggagttcttaaactattctcagcctccagatgcttggaattgtataggcatcatttgaaacatggaaataaaacacggttactagtctacacaatttgaattttgaaaaacatttgctctgcatctaagtagtttacatttgtttaaaagctctgatcttttcagtta

SEQ ID NO: 315391 - DNA, 4001 bp, Homo sapiens
tctcaaagtgctgggattcaggcgtgagccactgtgcccagcatttttttttttttaagatggagtcttgctctgttgcccaggctggagtgccatggcaagatctcagctcactgcaacctctgcctccaggattcaagcaattctcctgcctcggcctcccaagtagctgggatcataggcgcgcgccaccacgctcggcttatgtttgtatttttagtggagacggggtttcaccagacctcaagcgatccacccacctcagcctcccaaagtgctgagattacaggcgtgccaccacacccggcaaggcctgcactgcttatgagtaccaatataaatatttgtggagttgaaaggaaaaaaattcttgtggagttgaaccaattaaatggcctctttatccccttcctatgaagcagccaagatggcagaactttgaagtttttttttttttttttttttttttttttgatacggagtctcgctctgtcgcccaggctggagtgcagtggcgtgatctcggctcactgcaagctccgcctcccgggttcatgccattctcctgcctcagcctcccgagtagctgggactacaggcgcccgccaccacgcccggctaattttttgtatttttagtagagacagagtttcaccgtgttagccaggatggtctcgatctcctgacctcgtgatctgcccgcctcggcctcccaaagtgctgggattacaagtgtgagccaccgcgcccggcctgaagtttcatctcatacattcatcccttctccaagtcaaggtgcctgggaccaggcaatttcaagttactcgggagaagaaaaagtctagaagagacctggtgatggtccaaaaagatctggggtaagagcggggagcagaggcaaagatgaagccaggaagtagggcccagccttcaattaagcctctccctaatgtgggcaaaggagggtatcaaaggccccagtgtccagattcaaacacaggagttaagatggaattaagacttttgtttctgcaacttaaaaaataaggttatttttaaaacccggttattttacatccactacccctttgggtactgcaaagtggtttccatgactggtttttgacatcaacgattgacaactagcccctcaactggaacatatacacaaaatataactgtttcctaggccagattctgaagaatgtctgtcaactccccaaatgcagtcacagagctgccaagaggaggcaagagcactgtcatgaactaaatctaggatcttcaacaactttttcagaaacaagaatccccttaattgtagctgttaaaccatcaaaattagaatcaccttaaattttcttttctccagttttccccctctcctgcagttctccaagactctctttcaggtgccaaaatggaggaatgcatcaatacattttccttgctggttagaggttttctctcggggcacagagcatgtggttttgcatttaccggggcatggtttgttgcaaaggcagggttctcattctcaggagcacatgggacagcagcaaaaggagcagcagaagagcaggctgccagaggatgtcttctgcagaggagcctgtgcacgggcagcgagaaggagagcggcgcggcgctcagttccagcctctgctggcctgtgcactcctgggaataactaactccttcaaaggcccggtcaatggctgcagtcagttcctttctgcatcttcttagtttttcagacatttctcctaaaagcgaccatgtctttatgtaatgcattggaaatgcacaggacaacacaataatgttacaaatgaggctgcaaactacccctgaatggccacgatttcctggagcttggccctggctatagcaggacccacaaccctcgggctttcctcctggagtaggcggttctcggctctcgcggaggaacccgccatctgccagaagccccaaagacgccccgccccacttcccacagcttcctggcccgccccgccgctgcctcccgccccaccgcggctcccaggccgctggccctaccggcaccccccctttggcgagtcggcagccacgtccttgtcctcacccgcagcgcagtgacgccgacccatccaacggtcatcgcatgcgcgtgccccgcgcaggccccaaacccccacggattaggttgaaggtcagacaaaaaatcccggacccatacgtccggttccttaaggccttgcccacacgcagcggctggccccgcggtgggagtggggacggggctttcgaatgggggccccgggaagagtcttggcagggatgaggaaagaacccgttctagaaagcatctgggtaacaccaaaatgtattactaccctaaatcgccatgaactggagccctttcccggctaactcccacaaagatttctgttctcaagccaacatggaaacaactagacgggacacagcaccgggcagttttatgtactgacttcctttaagcgttatctaataaaaagtgtgttatctaataaaagttccacacagtatttaaccgtcttaattcatctagggtagcaggggatataacagaactgctgggttccacaggaggttgaggggccaggatccccaacactagatatcttccttagcggggagaaagctggaaattacaagatgactcaacggagaaatgggcttcagtgggtaactttcagaaaattataaacccatatcagtgcacatagcgagggaaaggggagtttacttgaggtttgggttactgtgagcagactacttggggtgactagtattggcatcagaaccagaaatccaggcgctcagggcagccctgcaggtggggtgggtctccaggctgctccatactcagcgcctgtgttcctctccattcttcgggatccatcagacatactccattgagtacccccatcccacccccttttcagcttcacaggtttcacagaaatttctcaccacctgtttaaaaataaaaataattcagcctcttgacatagcttcttctaggtaaacggtcttctttttttttttttgtttccttctgctcataaaagaagggtatttccttgtctggtttttagacagaacactagcagtctgcagagtgtcaaagatgttctcctgggggattacactggcgctacagggtggcaggatcgtggagtcagcattagttggtgtccatgctgcaagcctcatcatccccaaagccctgctgagagctgcttggtcgtgtccctccatcagaggaaccagaactgctaagtgaaggtgtcttataaaattcatcatctcgacgttggtaaaatagcacataagctgctttagtctgaaatacaagagggggaaagaccattcagtgcttggaaaaatcacccattttccccagcttttctctagctgtccaaaaccctcaaggatctgccatatccacacagaggagacccttccacctgaggatggctgcccctgccaggcagcaggaaatggaaggagccttgtgcagagaactctgaggagagctgagcttctcatttatgaaggtccctgaaggaatgccagccagctctgtcacacctagctcccactatcacatcaggatgatgaaataaccaactagcctgatagaggctcttcccagctttaatccataacgacatgaggaagaaccacatatcatggcctactcaccactatctgatcctcagaggccagggacacgttgctatcatcaaagtaataccatttaccattcagtttgttcttcgcatatgcagtgtctgccaagtcaacaaagaaaatactctagcggtctccagagaattaatctggctagcttattaggcttgcactaaataaacacaaaaatccccaaaacaaaacccctgaaattaaaaaagtttacagtgtgtgtcttaacaaccaaaaaacaactcaccttcttttctaatctg

SEQ ID NO: 315392 - DNA, 4001 bp, Homo sapiens
taaaatctgtataagagaaataaaatattgtgtctacagacagcctactggttccccattgtaaacatgagaacatggaaggacacacttatgtaagcacactgaagatattactgaatgtccataagctttaattatttaagaaaggggaattaaataagataattatctctaaggaagaatttattgcaaaaaatgagaatcctatatgaggattaaatacggtttgaattataaacaatatgtgagcaaatctaatttctgtaaggaatttccagcttttaatttttctcagtaatataaagatatttttgcctctcagttataacacacgatcacttggaggtaagacatttaatgtcttcttccttaggcagtattacgtgcaaactgtatatgggatagaattactatagcttgtgagggcaggtaatatttcactatgaatttaaatttgagacagctagttgttttaaaagacaaaagccctcatactcggtgagacggcaaactctccctgctgctttttgctttcccatgtcctccaagtttcctgtagtgggcacatgtttttttgataatatattttacctataagaagtgagacaaactctctaaaagtgttctagcccaattagtgataacgaatgggacagaagaaagagaactgcagactactccgagagcactcataatgaggcaagtagtgttaggtgaatgaaaaggcagaagcaataaagaggtggagacgggtagagaactgattagatacagtaacaaacgttcatcagaacagcaggactagcatggtaaacagactgtaaacaaggagtgtaacctcttgcaaaggcgaggagaggagaccaggaagggaggtgtccagtgaggtgaggaaagcaggtcgagacactctaggatactcaaagtgactgaggacgacccagaagcagtgtttctccaagtgtgatccttggaccccctgcataggaatcacttgggggaactagttaaaaagcttaatcaagtgacccccatccagagattcggattcaccagatctgggatgcgggtcaggaaatctgcacgtttacaagcaccccaagaaagcctgatgtactccaacgtctgagattcactgactcccagttctgtaaaaataaaacagcacatagccaaagtgcttattttctttcttgatgtaacaatgcatgcattcactcattcactcttctaaatcgcttctgagataccagtgttgcatgaatactgagtctccaaagcgctttgttaaaactcaagatttctgggccctgccctcaagattctgattcaggaggtttcagtggggcttaagatctccattttaggtagaatcacagacaattaattcatcttaagaaacactgagttggagagtgaacaaaagccaaatcatacgcctagacattggtaaatttttccttctctctgggtcaacagcattcacccattaattctgtcttacccctgaaaaagaccttattatggggatagagggtgcactttatcctcaccccgatcacggactacctcacccaagaggagaaaggtatagacaggttggagaaccgtttcgggttacctggtactcatttttgaacattcccgcagggggcccagggcttggggggcacagagttcagggtttccagcgagtggcgtgaccctgacggctggaaatcggctggcgggaacccaggagcccgacgggtgggaaagggcttcgtgcttggcccagacttgggcaggctcttctcagcccctccggcccctggtcagctccatctcccgccctccatcagcaccattgcggctccagcctccgcggtgcccgggtctggggagggcgcagctgcctggacggactccgggccgtccctggggagtgattgtgtgtgtaacctacgtgacggggcgcccagtcgcggagccacagacaaccgcccgctggcctaggaaaagcgggcgcgctcccgctgccgccccaccccagaatcaaaccgcgaaagagcagcgccgagcgccacccgcgttccggccgcgcccattggttcccactgggcgcctgcgcgttgcgctctctaggcttctcgccgacgggcacgggaggatacgcggtgacgtagcgttgcccaggcaaccgcgggactcctggagaaatggtgggcggtccaaacggtgagcagcacgctccttacttaggtcatgacctctgccgactaaaaaggctaaactcagcgtggattagggctataccaggtactggactcttctagagtactgtcacatcggtttggtctctcctcgtggtaaacagataactggtaggttcctgagggatacagtcatggactcatggaaccctcacgcggcctttgcttagaaggttcccaaatttgggttcgttgaggcagtaagagggtctgctggaccctttcattgtttcagaagaccctaggaagccaagatttttttgtagaaaataataacttattgagactagcactggcttaagtgtaactattaagttactttatttagtttctagatcagagccacttcttacatggaaggtactattgccaatttttggctaaggaactgtggctcagaaaggttaaatggcttggccaaagtcatatggcactgagaggtgacagcatgctggcagtcctcagagccctcgcttgctctcggcacctcccctgcctgggctcccactttggcggcatttgaggagcccttcagccccccactgcactgtgggagcccctttctgggttggccaaggctggagcccactccctcagcttgcagggaggtgtggagggagaggcgcgagcgggaacccgggctacgtgccgcgcttgcaggccagctggagttccgggtgggcgtggacttggcaggccccgcactcggagcagccggccagccctgctggccccgggcaatgagggacttagcacccgggccagtggctgcagagggtctactgggtcccccagcgtgctggcccaccggcactgtgctcgatttctcgccaggccttagctgccttcccgcggggcagggctcagaacctgcagcccgccatgcctgagcctcccacccactccgtgtgttcctgtgcagcccgagcctccccgatgagcgccgccccctgctccacggcgcccagtcccatcgaccacccaacggctgagtagtgtgagcgcacggtgcgggactggcaggcagctccacctgcggccccagtgcgggatccactaggtgaagccagctgggctcctgagtctggtggggaggtggagagtctttacgtctagctcagggattgtaaataaccaatcagcaccctgtgtttagctcaaggtttgtgagtacaccaattgacactctgtgtctagctgctctggtggggccttggagaacctgtgtgtccaaactctgtatccagctaatctgatggggacgtggagaaccttcgtgtctagctcagggattgtaaacgcaccaatcagcgccctgacaaaacaggccactgggctctaccaatcagcaggatgtgggtggggccagataagagaataaaagcaggctgcccgagccagcattggcaactagctgggggtccacttccacactgtggaagctttgttctttcactctttgcaataaatcttgctactgctcactctttgggtccacactgcttttatgagctgtaacactcaccgcgaagatctgcagcttctctcctgaagccagcgagaccacgagcccaccaggaggaacaaacaactccagacgtgctgccttaagagctgtaacactcaccgcgaaggtctgcagtttcactcctgagccggtgagaccacgaacccaccagaaggaagaaactccgaacacatccgaacatcagaaggaacaaactccagacgcgccaccttaagagctgt

SEQ ID NO: 315393 - DNA, 4001 bp, Homo sapiens
tatgtatattcagcaatgtatatatgaagagttgaaacagccatgatctaaaaaaggattcaattgttctatatgatttcataaggcagaaataggagcagaagaaagaagttagaaagtaactgatttcagctccatataaggaagagtattttaagagtcaaggctaatgaagggagaagctgtctgagaaaactgcaaggttcccatcagtaacggtgtacttagagaagacactgtcaaaataagacagacagtaacctggactatcttgaacattcctcacattttacacaacgattctatactttcccacgaaatgaatgaaagtccagattctacttgtgcacttcagcatcccaggtttcctagagttgctacttccaactcggtaccctgtcccaccgtgaagcaatgctttatactaacaaaagagaacagatctgagcacaacaggaataatgagaaataggaagaaactggcccataagcaaatggaacaccagaaatcaatactgttctatgtgcctggaatttgtaaagaaaatgatcctctatccttgaattcataaattcgatttaaaatattcatttatgttcgattaatgtaaataaggatttgttatgtactgcattcctggttgtcagctatttttttctcaacaaagaaaaattcattttaacttaagatcacttggaaaatgtcctaaataagcactccaaaaccctctattacaaatatatgtggaaactaactttagaatatatttcttaaaatgaatgattcatcggatatagtccaaatactattagctaatcaaattgtgaaattctaattaaatggctacttaagtttaatctatttaaaaatcacaggcaggaggctaaacacagagaaagggtttagaccatttggttctagcttttataaattggtttaagactattaagcttactttcactcattttattttgtaattttataagtctcatttatttggctctaaattctacatctgggtatttaaggagctcgaccttccaaactgttaatattaacttcttggaagcaatccctcccacattagcgctttttctcaatttgggtacaatcaagggggaaacaattggatatccaagggctccttcttttaaatagcagcccaggaagacaaaagtgagaaagaaaaagaggagcatctttaaccagcaaccttgaaaaaaggcatccccaacagctgtcgccaactcagctggctcgctcccatttctcaaaacaccgcctggacgccttggtcaaaaaaagaaaaagaaaagaaaaaaaaccagattcccgcttccctgggacagggagctcccttttgtagaagtagctaaagaaagcgaggcgccccacgggatttcatctcgtcgtcaaggcagcgccaaccccagccgtccggcgcaaggaaagctccggcgggcccggagcccacggcggccccagcctccggcagagcagccccggcagagcccggagccccgcggccgcagagttccggcagcgaccccggacggcccggcgggcgtcccccggaccgcggcggaaggcgggaagacgcggctcgacttacagtgacaccatcctaggtgacagcaccagtgcagcttgaagcacttgccatggctgtgcgtggcacagatagacagcccgtcgcacggctggaagtcgggtctgcgggcggcgcaactccgcgccagggcctgagcctcatctagtttctcgctcttccaaccccgctccgacgccggcgaggccgccgcactcatttcctctccctccgcgcggagccgacaccgggagcccgggagaagcgacgtctgggtgggcaggaagccgagccggctgcggacgcgggagggcgcggcacgggccgggagtcacgccagcacgcggcggcggcgggagcgcggcggtcccaggctcgaggaggagccgccccgggcgctgcgaccgggtccgggctggcagcctccctccctccggcgcggcgcgcgccgcgccccacgcgcacacgcacgcgcacaggcgcgcgccggtcggccccgcgcgacgttcctcagcgagcccggccttctcacacacacgccgctggggagcttggccgtcggcgtccccgccggtcacagcgaggtcctcctcacatactcactccttcctcggagaaagaccccgacggagggccgtggtgaacacacactcctcggccgctttgtactcacatgcacgccagcctacatatgcacttccccccgagtgacactggccaccgagaactgacacacgcgtccacacgctccacggagggctgcgcacacctggcccacgcccacccgaacctcctagtggcccgggccgggtgcatcgcgtagcgaggatctcacacacacagcctgtccccacaggcgtctcacatctccctcgtacacacctccccgtgtctgggcatggagcccctgggaggcgcgcacacgctcgtgcacacgcgcgcactccccccacccagggcgggcctcctgccccagcgcggccacagggcgcgtcaggggccagcaccgccaacccctgcccgcctcgccccaaaccccaggccagtgcgcccgggccttcccgcgcccgccccaaccttcgccgggaccgcagcccctcccccttctcctcccacccccgcctccgttgagcgggaaagcaacaaagctgggtgcattgatgtgtgtgtgtgtctgcgtatgtgtagtttggtgtgcatgggatgtgtgtgttgcgtgcgtgtgtatgattatttggagtatgtatggtgggtatgcgtgtgtggttgtgtgtggttaggtgtgttcatggtacatggtgggtggtatgcgtgatgcaagtgactggtgaggtgtgtgtatacgtgtgtatgtgaaatgaatgttataactgaggtggagtgtgggtggtgtgtgtgtggttgagtgtgtgtggcgtgcagaatatgtatatgtgtgtagttggacgtgcatgtgcttgtgcacgtgttgtgggggtgggtatgcttagtaatacagagtggtgtgtgtatggtatatgtgtggcagtgcagtgcgtgtatctggcatgtcgagtgtgcacatggcatatacggatcaaatcgggtgtgtgtggtacataggagtgggtgggcacacaaacaggactcatgtatgcggaggactctgcctttctgtgttagcgcctgctctggccagcaggtgtgactgaccctgtggtggctgcggcttccccacacagttggctcgcactcttccctcctggggacaagttgctccaaatagattttccatgccaggctctgctgctgagaaccgaccccaggctggattcactgaagaggaaacaaaccatttgctcccatggtgcactgctgggaattagtgtttccctgcaacaaggccagaacccagccttgaacacagaagaggaggggacaccccctccttatttgccaaacgcacagaagaatgcttgttcaaggaacaaggctttcagcacaaacactgtgtgggaacatgtttatgcccaggtccactttctcctttatgcctttcctgctttgcactgacaagagactcatcatggttttgaaacaaccaaattcatcctcaagcttgaaaatccttgctgccataagcaatctttcataattttcccttttatgtaaccttggcttgagaagggaaatgtaatttgcatatatctgactctggtgaaatcttcatttattagggattggggagagactcaatttggcagcaaaagtattttccagaaaggtctgaatcaaaatcacaaactctagttcccccattaacctaacattgaaacagttgcaaacatgaagaatcatctcatcagcttccaccccaactgctccccgcctcaaaaaaatcctaaaggaatacatctctgacacaaaatctat

SEQ ID NO: 315394 - DNA, 4001 bp, Homo sapiens
atacagaaaaatcttaaatgataataacttaaataagatagaactttcacaaaaaaaagaaagagagagagagaaagaaagaaaaagaagaaagaaagaaaaggaaaaaaaaaagaaaagaaaagagagagaaagagaatgagaatccagaggctggattgatgtggcagcttcacagtgttcagggacccatacttctatcttgttgctctacgagttttgcatatggccttatgttcaaggtaaactcccagacattgcattttcattctaggcaattttaggaaggaagtagtgaggaagaaaagctcaccttttcccatttaaggaggctttcctaaagtcccacaaaacactttgcttaaatctcgttgaccagaatgaagttacctggttgcaaaattgcctgcaaaatgtagtcttttagaagagtggcagggtgcccatataaaattggcatttgggttagacaaccggaagtctgtcaaagaaatgaaaaaaaaatgtcattacttctagatattatgattgtccacagagagaaatgcaaaggcactctgatatgtatttttaaaactaaaaagaatcttcatcaacatttagatatatatacagggagaaagaacaagataaatatgtgtgagcacatagacgtgtgaaatatttattgcagaatttttggtaatataaaaatggaaacattaatgtctattataggaagaatggataaataaatgattgcatatttgtttcatttataaaatcaaatacttggcaatagttaaaattagtgaaatcgatttacaagtaatgacgattaagtttcaaaaacattgttcacttgatatatatcatttatttatttaaaaaaaaatctgtcacgcctgtaatcccagcactttgggaggctgaggctggcagatcacaaggtcaggagatccagaccatcctgcctaacgcggtgaaaccccgtctctactaaaaatacaaaaaattagcagagcgtggtggcacacgcctgtagtcccagctactcaggaggctgaggcaggagaacggcgtgatcccgggaggcagagctagcagtgagccgagatcatgccaccgcactccagcctgggtgacagagtgagactctgtctcaaaaaaaaaaaaaaaaaaaaatccgaaaaacaattagtaaaatattaacacattaaatctaggtgttgggtattcccaggactgtgtctgtttttgtaccttattatatctttggtatcttgcacattatagccaaacaccatctcatgtattagacatattagacccgttttaagattgaggagacttggactttgagagatgaattaattcgttcaaggtcatgtagttactaagaactgagaatcaaatccatgcctacctgattctagagactctaaaataagcaacttcaggaagtatgatttagccctattttcagccacaagtcttccgtctataacaaagccacaaactgaagcatcagtttaaaactgtccctgatacttgctaaactaaatacatcaaaaggtaggaccagttcaatataatttcaaaagggttaaaaactttataagtctataagaaatagcaggtattttgaaaacagtttggctagaaaagtaaaaagctagagattgttcagaataagagtgtttaataggaaagttctttttttaaagagtagagttgaaagagacaggatgaaagtgtagatatgaagttgcctatggggctcaataagcagagaatgtctaggctgaaggctaaatcaatgttttaccttgtaaagcaaacactgatttctcttggatgaaagctcaggagtaggcagaagatggcaactgaacatccatggaaatgtagtaaatgcaagttggatcctgaccagcttctgcagatcacatacatgcatctgtactccccagtaacttttctgctcctactgagaggctctgagatgttccacagtcctttctaaacccgaggcaaaatcagactcacaagactgtgagcccctctggggtaggaaccacaccattcatatttgtttctctaaatcctaattcagtgccaggcttctaggaagtgttaacaaagattggataagtaaataaatgcaactcattattccatcctatatttgctgagtcctctgaagtctttcccctcctattgattcccactaaccaaaacttaagcagacaattttttcccaaactgtaattgcaatatgatcctatatgattttttaacgtctattcttttcatactcattgatcccacacacttacaggaggaattttgtagtaaaactttccaatgacatccagtggctattggataagtttcttctttctagcttggtcacactgcaggcacatttgccttcccttagcacagcgtactcttccatgaagctttgcatttgtacatgctgctactgctgttccatccagcaaactccatctagtctttaaaacccaaatgaagctcttctgtcaagctttctcctaatcctccagacacagccctctctgtcccaactactttgtatatactgctatcttactggtgattgcactgtaaactgactaatttttaatagttaaccactgtgggagagatggacaaggaaaattaaagatgatcaggtgtggtctgtttctcctttaatcaaatatgggctgaatgttaattatgatttgaccagtaagttatggcagaagggactctgtgcctgtttgggccaacatttaagagaacggcaacttctgctttggcctctcagaatcctaaaccacccccataaggcatttgactaccctgagagctccatgctgtaatggagtccaaactaatatgctgagagactgggtatagaagaactaaggccctagatttgtgacccagccatcttacttatttgggccacctcagctgaggttccacacataacaaaccatgcctacatcttcctgcctgaattgctgagccacagaatcataaacacataaaataggcattgttttatgctactaaatttttggatcatttgttatgcatcaatagataattagaacaaccttcaacatccacgagtattttcctagttctcttcctaccacattagctgttatgacctcacattcctttctcattgaacattgagatctcaaacttctaaaccttgtttaactgcactgatttcctggggaaatttccttctgtattaaggctttaaataccatgcttatgcttacgatttcctaatgtatatctgtagctatctcagaaaatccagatatatcgttacttccttgacatacatctctattttaatgtctaataggcaaatcaaattaagtacattgcaaatgaactcctgatcttcttaaccaaagccgcaactcttgaagtgctctccatctcagtatatgtattcagaatcaacaagttgctcagaaaaacatcataggcattacccttgattcctctttttttttttttttttttttgagacggagtctcgctctgtcacccaggctggagtgcagtggtgcaatctcggctcactgcaagctccgcctcccgggttcacgccattctcctgcctcagcctcccgagtagctgggactacaggtgcccgccacaaaacctggctcattttttttttttttttttgtatttttagtacagacagggtttcaccgtgttagccaggatggtctcgatctcctgacctcgtgatccccctgccttggcctcccaaagtgctgggattacaggcgtgagctaccgcgaccagccctgattcctcttttcttgcagacctcacttcaatttatcaacaagcactgttgactctaccgtaaaaatatattccaacctgagtgatttcataaaacataagacagagtcagtccctacagtcaaactgccaacagcttttcatcacgtttagagcaaaatctaa

SEQ ID NO: 315395 - DNA, 4001 bp, Homo sapiens
taatggctttaaacgagttacaagtcgtaagttcttatgttttggatcatgttgtggaatgtattccaaatgaaaaatggaggagaaagtgcacaacatcatatgcttcatggtatggcatatacatgtcaattatttttacatataactgtgatgaatgatacaattaaaagctatactacataatgcatacagttattattataaaaagttatatattatgccacagtactaaaaataaaatatattcttctcaaatagtgaaaataagatatccttcatgttttttatgtcacatatgcttcctcgtttgaccatacctgtttttcttttttaatgaaataatttaatgatttattaaacaataatgacagagtatgggcaatttcctgaccattaatggcctacaaaaagtgataagacgattaccttgtcgtgaatttgctgaaataccctcctgttgcgttcaatgcatggtaaaaatattagaataaaagacaaataaatataaatacctcctcagttattgaacaatcaaaagtccagccgaatggatatacatggttgctgttccctgagtaggtacagcagctaaccttgtatcacaggtgtcccccctagcccactccccgcactccacctaattgtgaaacaccagctgtgactatttgctagatcaggaagacactgagggattttggggggtctgccgcatggcagcgatttcatcataaccaagtggcgctctcccacacccacgtgcagcagtccctggtcgcggctggtcctcaacggctcctcgccctctgcccaccctgggagacctgtccaggcggcaggtagggaaaggagtggaactgcggtcctttctcctcagccctaaagaagaccgcccttctctcgacgcaccaaagggctcacgtgttctctttgactagggaagcaggcacttactagtgaaccacaatacgaggcaaggcagagggcagggacgtccttcgaaggtgcgctggagggtcgcctgctgcagccgcacccgccgcgcgtgccccacgtttctttgaacggaatgaaacgcagagaaacataagatcccgggagaacgcgagggagacgagtgaccccaacccagtcgcggggtgccgggcagttaggccagggtgccagataaggtctgaggcagttggcggcggcaccccggccgttgcttgccacccgcagcccccagccctgcaccagccgccgatccccgagcgctcagataagagggtagcggccctcgccgccgtcgggctccgcggcgaccccgcctcgagggcggccaagcaccgacactggcagcacgacctccccggggctgagctgctgcagccgcatggactcctcgtaggtgggcagatacttgacctcctcgtagctgggcagctgcaggaagaccggcgacactacacgcatctcgtgctctgaggcgcaggaggggtccgagcgcccgccgcctccccggccccggccgccgccgccactgtccagcagtgagtcctgagagccggctgccgcctcgtcgcgcagcagagcgggcgagtcgtcgtcgtcgtcgggcggccccgcgccccccagcggtccggcgccccccggaggcccgggccgctgtcccgggcgcgcctggccgcgcgggtacctgcgtggactggggcagatgatgcgctgcaggaaatagccgatggcgaagagcaccagcaggatgagcagcccggagagcttgcggacgaaccagcccacgttgtccaggaaggcgtgcagcggcagcttgcagcagcgcaccgccgtggcgttggtcgcgtcgcagcagcgctcccgctcgccgcacgccagctcagcgcagcccccgccgccccgcgagggcgccaccagcgccagcgccagcagtagcagcagcggcagcagaggcggcggcgccggagccaccgacaggccctcagcagtgaccccgggtccccacatggcccgcgcagacctcggctaacgtccgggacgggaggctggggagtccgtccgccctcgcgtccgtcggcccctccccggcgctccgctcgggtcccgcgcgcgccgcctcccgcgcctcagctacctgcggccggagcagtcctcacttggccacgcttgggcgggaggaggagcccgcggcgcgcggaggctgcgggaggcggctgctactggcggcccaagcagcttcccgagcttctgaccttaacctctcgcgcccaaccgcccgggccgggtgcaaggcttccggagcctccctaaatgtcagaggcagcccgcgcggggctgccatgggcatcttggccccggccggcgcgtttttcctcccccgccttgtcgctctctgggactggaagggttaacgctctgctctcagcccgggagccccttgatcttgattaattcagccttcgcgcttaggcccgccagacgggcgggggctctcgctcgcgtaggtgtctccgttttaagtgattggatttccccaggaatgttatttaaattgacttgcgactgggattcgcttaccatctttcttgtgatcttccgattaaaaatagatgatggccattaatggctagtgcagtacccactgctgtcccagagtttgggggtggggggtggagaccggcggatatttctgcttgcaggcaggtccagggagctaggaacccgggattcccaggaaacctccagaacaggtagagaatttctcgtagagggacaggtcagggtaccacagaggtagccccagagggacagggaagcgctccgtcaaggtgaccttagttgattaaggagaagtgaggggacgcatattttcccagtggctcatccgacaagcccccactgagtccgaagcacagagcaaagatttgggttgccgggctgaaaggagacccctccttgagcataaataacacatccgtgaaatgcctaaggaggttacaagtgattggcaacgttcttgagcgttgatttgcgcctaaagggtctttttcaagattattcttgttcgcaaagtttgactttaaaggaattctgcgctcccagttaacatggaacagggtttaccttgccttggttgtcaccattctctggggaagcccggtagggcacacagcacacgtaaggggcgacagttacagcggtccctgactggcaggcacatctacatggtgtagttaagctctgcccccgtggtggatagagccataccacggggaagccaagagcttgccacttttattaaggcagactgcagtagacaatcattccctcaccccttaaacacgaggaccccttgaagagaaaccaaagggaaaattccatagtcacagagagaaaaacagtaaaagcaaaggaacaatatgcagacaagattcagccgaggatcagataaaagcaaagatttctccctgagtaagtcatcgtatgtctccgtaacaaagtgatgatggaacaagaaggttggcaatggtggtttgattgagacaggtcattgctcagcctgaatgaaacattttaaacatatctgttgctgtgaacaccttactttgcctcacactctaaaatgatcctttctactcacagagaagcttctaagtgttacggagacaagatatggtatgtaacgcttacttgagcacaggtcccttttttctcaggttcttcaaaggcacatttgttatgatctctttatagggaggcatattacctattttgcaaagcctgattgacaatggatttcaaattgtagtaaaatcataggatgaaaatgattcattttaatacagtgaattttttttttttttttttttttttttttagagtctcactctgtcacttgggcttgagtgcagtggcacagtcttggctcactgcaacctctgcctcctgggttcaagtggttctcctgcctcagcctcctgagtagctgggattacaggcgtgcacca

SEQ ID NO: 315396 - DNA, 4001 bp, Homo sapiens
accctgtctgtaggggaaagatctgacatctcagagaagaaaggtaaagcctgtcccagggataggtgtcagtacagccatggaagggctgggatgatgcttttgggttctgggagaggcaagaactggtctagtcacccccgctgccttcaggtctgccttgtacctgacatcgctgcaggaacactgctggaggctggggcttggctgcaaggtggtattctctagcactttcactcttgaattggcttctgtagtgcccatagaagccattgttgtgctataacaagacaggaatgaggataaaactcactcaaatctccaccatggatcctagacctcagggccccaactgagggttccaggaaagccagaccagaagcccctcatggaagttcctgacagaatagaaagaatctaaggagttaggacactcctggagatgggccagtatagaagtgtcttcatccatcattgggacagttgacctcagctgtaatgacccacctgggctatgcatgtgtagggaaggagtgccattcatttagagcagagatttgtgggcagggccactgatcaggggtgtggtccttccctaaagagcctgagaagaaatcccctttgttgttctctccacaattttttttttttttttgagacagagtcttgctctttcacccaggctggagtacagtggcacaacctcagctcactgcaacctccgcctcccgggttcaagtcattctcctgcctcagcctcccaagtacctgagactacaggcgcccactatcatgccaggctgaattttttttttttttttttttttttgagacggagtcttgctctgtctgcaggctggagtgcagtggtgcgatcttggttcactgcaacctctgcctcccgggttcaatcaattctcctgcttcagcctcccgagtatctgggattacaggcgcccgccaccacacccggctaatttttgtatttttagtagaaacagggtttcaccatgttggccaggctggtctcgaactcctgacctcgtgatctgcccaccttggcctcccaaagtgctgggattacaggcgtgagccactgcgcctggcctggagagaatttcagagagaggaactgtcaggagacagaaataagcaactatcagaggtccaagaaaggggctgtactgtgctgatgtcattacgtgtacactctgtggatgatcatgtctgggaactcctatggcccaacctctttgtcctgagttctccctggagacgatgggtgtgtctggccctccacaattataacactgagcagaagaacccatcctaagcctgccctctggccatcacaatgggctatttaacaggactagaaagcctcatatctttccatcccactgaagacgtggatcactttgtctgtctatccttctctgtcaggaacccctcactctctattcaggttagctcaacagtatttatcagacctttattgtcttccaggcgtggggctgagcatgggaaatacagatggacaaaaacacaatctttgccctcaaaatgttcccagactagagagcagccaaactccaaaagcttgggaggctcaaacaattaactaggaataaatggggtggctagaggactaggaatttccactggctttcaggagaccatgatgcatggaagggggcaaagtgttaggaagactaggcagcctccaggggtgacctcaagatggtggagaggaagtgggcggctcagggtcctattccaggttggatgccaaatgaaaaccttttcacttcaccggcatgactcagtcagatttcaggtacaaccagagggccaggggccaggattaacataaagtgcactcttacccaggagcctactaaagcactttgcatctttccaagaagggagcagaaaaggcaaactttcctcttgtcttttggagggtatcttcaggaaagagaatctctggaggtcaattttttgttgcttagtgacaagggaaggttgtgactgcacaatgctgctgctgtttgttgagacagtacatgacctgttgcccctttgtccttgctgccctagttcttctctgtgagaaaaacctgccccttggcattaacagcctgaagagcccttatatatagaaacacacagggctccatggtagagtctaatggattcgcagccaatgaaatattcaaagaacattttaaatgcaggcaaatcctgcatttaaaaacctatgcatccatactgccaggaatataaatttagaaagcatttcatggagtcagaagaaatgttaaagaggttggtggcttttaggataaaattactgcttcagaataggctctaacaatttatctcttaggagtttgtggtgaccaggaatgctaatcatgacaggtgaaatgttacaagggccaagtaaaggaatagggcataacagaacagaagaaggaacatgcaaagatttgacattatggttccattctgagctaccctttgacaaatttttgactgaattctctcttatttgtaaaagagggacttgaacagttcaccccctttaacaaccaaaagaaattgacaatcagcctctaaacatgtgccagtaaaacacccaagaccctgctagtgtcaatggcacaagccctaatatccagaatgtctgccccagtgtagtcaccctggagagcccctctcatgcgaactcacaggtattaaaaggttcattggcctgggcttggtggttcacaactgtaatcctagcagtttgggaggccgaggtgggcaaatcgcttgagcccaggagttccagaccagtctgggcaaaatggctaacctggtctctacaaaaaatacaaaaatcagctgggtgtggtggcatatacctgtagttccagctatttgggggactgaagtgggaggattgcctgagcctgaggagattgaggctgaagtgagctataatcacatcactgcactccagcctgggtgacagaatgagaccccatctcaataaatgaatgaatgaatgaatgaatgaatattcactgtagcatctatacaaaggaaaaactgtaagcaacccaagtgttgaccaacgggacaataagaaaattgggctatagtcacacaatgaaattactagcgttactataaatgggctacagatattagaatccacagaggtaaatcttaaaaatgttggccaggtgcggtcactcacgtctgtaatcccagcactttgggaggttgaagtgggcagaatgtttgagctcaggagtttgagaccagcctaggcaacatggtgaaactctgtctctaccaaatatacaaaaaattaactgggtgtggtggcacacgcctgcggtcccagctacttgggaggctgaggagggaggatcacttgagcccgggaagtggagactgcagtaaatggagattgcaccactgtactccagcctgggtgacagaatgagacccccatctcaaaaacaaaagaaaacaaaacaaaaaccgtaaagatgttgagttggccgggagcggtagctcacgcctgtaatcccagcactttgggaggctgaggcgggcggatcacaaggtcaagagatcaagaccagcctggccaacatggtgaaaccccatttctactaaaaatacaaaaattagctgggtgtggtggcgcctgtagtcccagctacgctacttgggaggccaaggaggaagagatcacaccattgcactccagcctggcgacaaagcgagactctaccaaaaaaaaaaaaaaaaaaaaaaaaaaggccaggtgcagtggctcacgcctgtaatcccagcattctgggaggccaaggtgggtggatcacgaggttagcagttcgagaccagcctggccaacatggtgaaaccccgtctctacttaaaatacaaaaattagccaggcatggtggcgcatgcctgtagtcccagctactcaggag

SEQ ID NO: 315397 - DNA, 4001 bp, Homo sapiens
ttcactcctatgtttccattttgaatctcatgtgctatttttcacaagctgggctttagtcagctggagagtcaagaaaagtccacgagctctggtctcagtgtcaatcacacaggatcaccgctgcatcacacccagtggggttagtactccttcacatcatgtcttcacaaagggtcttttagtgcatttcttctgacaaaactgaggtcattcccacatttactccgcatctctgatttgtaaaacccatctatctctaatgagtaacagatacatacaacagcttttctctaacataactaccaccatcaccaaggggaaaaaaaaaggcagtaccaataattcaatagtcttaatcattttcagagtgttactccaacatctttccacagccacaaatgcatttttttcagtaccgaaaaaaaatcttccataggcacccaggcaataccaaaaaccccataacaaatatctagattatgcactgacacttcctgcaaatgaaaattcatgatgcttgggactcatttcctccacaggcttccgaaaacagaaaacatctttagggcttttttgcattttaaattgcagcagcatcagccaagccagcatccagagagacagacaaggcagtcagcctgcacccctacacctaggatagactgactggattatgccaggggcctccaggcctaagagggaattatctccgtgtaggttggtatccaggtgcacacaaggcagaaactcaaggaggctccctatgcgaagcccccgccagctttgggtcaggccatctcccaggcagatctcccaggcacctgccgccttccgccacagtctcctcactgaagcagaagtgagagaggtgacagcaaggtagagagatgggcgtttgcaaagccaattattgctaagtaaagagtcaaagcaagcacgggtctgaaagcctgagaagagggcaaagcgggcgagcggcgggcaatcggagcggggacgagtcgagtcatgtcaagcttctccctaggggagcgctcacccggaaaggcttccagccgacaggggttggggggcactggcggtctccaaaggggagggctggccaggagctgctccatcctccctcgacccagccccggccggcgtggaagctgcacgtggtgcccgggccagagctggggaggggagccccacagcggcagcggctccccgggcattgctaggttaccgacgtgtgcacagccggcgacgggagcgggaacgcacgctccacccgaacccctttccccgataccgaggccgggcctcccccgcgaggggatgggtgtgcttcacccaccggcgcggagggcgaaaccgggcaatcctagaattttccggatgccaccagggaccttcttcctagtcaacgagggggcgggggaggagtggaaggcgagaagaggctggcaagggggctccggctgaagacttgcggccctcctgccatcgctcgggggcgttgaaggaaagttgagcccgaggacactgaacccgaatcaccccgactcgccgcccctccggctgcaccgcgctccacacactccacggccgcccccaccccacaaatgcagaattaactctgacattcagggcctggaggggagcgcggagtggctgtcacgcatgtcccctctctgtgtagacgacaccgagctggcagcaccctctccaaccccctcaacccatccagcgccgcggggaagggggagggggctggaggaccatgacaggatcggatttggcagcgggtgcccgggctctggctgctcaccgttcgcgtggtccgcttgctgctgccgttgatgctgcatttttttcatcatcatcatcatcatcatccacgaacatttattgagcgactactgtgtgcagggcactgtgctgggcgttgaggcgggggcggaatggggaaggggatcaccaagaggtaggagccgcggtccctgcccttattctcgcttcagcaggggggtggggagggacggggacaaataacagaaaataaggataattgatttaaaaaaaaaaccgctcgccacccaagctctctctttttcaaaaatggagcaaaataaactttttaaaaaaataaaatccaatgtatatattatcttaataatatatacatgtaattttttgctgcaaaggagaactggcttgtcccctcctctagcggagagacgccgcggtgatgccggcccggccgccggggccgctcggcgctccccccatgcccgcccgtctgcccgcccgccgcggtgcccggtgcccgccgccgccgcccgcgccgccgctggctcgggaccgcgggcagccggagctcacatccggggacggaggcgctcgcccgcccgctcgctccgcgcccgccgcgccgcgccgcacgccggcttcgccctggcgacgctgcgcgcccgccgccgtcccccgccctccgcccgccccgagccgcccacggcccgcgccgcgccgcgccccggcgggtctgcagcccggcgcgcggttctgcccggcaccacttgcgcgctcggggtggccgtcgcgtgggactcggggtgccgccaccccagcctggcccggctgacctgcgggctccaaagggttaagcgcgctccagcggcgggctgcccggttaaccccctccgcgccgcacggtgcgctctccccccgggacccggaggaggcaggcggcgccagtgtctcccgcggcgctggggtgcggatgaaccgctcctccccgcgcatttctgggctgggggacagctcgggctcccgcgccggccccgactccgcgccggcctcctctgcgcacacctggaggaggccccgccccctgggagctcaggtgctagcgggcggtagctgctgcggtctccgagctcatcctcgtcaaggctcggccgggctccctggctgctccggagcggggcaggcgccccctgcttttctccggccctttctggaatcgggggggttggggtagcccgggtctgtagagagcactcactaccccaggtaactgcctgcagctggaaccgcgaatccagggcgccccccatcttctcccctgccctgcgcctggcctggcgtcgcggaaggcaacggggatggggggcaatatctccccccaccccaccccgcccccacgtgtgtttggaggcaggtacagggaagtcaaagccaaggtctttcaaaccgctcgtgttgttcaaggaaatagacggtgctgctgaaactgttgcctccagtctgggagctgaagggagtagtttattttttgataccttcgctggcttggatttagggtgggggagatttgcaaacggcagctcctgtctaaaggggaaaatactttatctagtggatgactgatatttttcatttagctttgtgctgcctgttaggagaagggcgtctgctttgttacttcacaggattcgatttatttgcttttgttcctatctgcatgttcctacggcgttttagaacgtttcagaacagtgactttaaagcgaaaataaagtaaaagctcagcgtgaattaagaaaaataagtgtttatgggaaggtgctccttacccaaagagaacacactagtcatcctcaattgttggggggcacctgggcagagagactggggaccagacagaagactctccagaggccttcctgagggggtgtctggtccgtgaggatgaaaacaaccaggctcttgtccttttttgtgctttgtttttggagactggagaggcgagaaatcgccctacggtctagtaacaatataaagctggcctgggccacctctcctatggctgcttctgatccaaaatctgaagggaatagaagacggttccctccaaagaaactagcccatccaaggagcatgtatgaaattcacaagtacacatgtcactttcagaactcctggtctaaagccttgcctcttgaggccttttc

SEQ ID NO: 315398 - DNA, 4001 bp, Homo sapiens
gccatctgaccaactgcacgttgcagggaaagggagtgaggtcgggagaggtggaaagagacatccacttaaaccttcactcaaggagctatgaaacggctaagaaaaaaataattgtggcttggctcgtgcttggctttgaggaagaaagaacaacaaaaaaataatgcttttgctttttttaagcactatgattgaagtccatttccatcacggcaaatgaaagacaataacgcatccaccagccctgaacttccattcgattcttttctccctgggcaacccccaaacacacatgtgaaaaatccagacggttgacagaggacacgtccgtgcggcacttgtaatttgccaactgatcacctgcctgagcacagccaggctgtgcaatgagagagacgacaagacggagagagagacccagagaggcggttttcctgagtttgtttttccctcatcttagagagcctacgaactggagtcggcaggttttgtggcagaaccaggggctcttacccttgggcagagctggtttaaatgacgcagagccagcctctccctttccccgaggccagacccttccccttggccaccagcagcccgacgactcatgccccagtctccaggccaggacactggtgaaggagtccagggacaggtggctcctcagacccggagacagataacagaagcaaggtggtcaccgtgccccaaagggggtctgggcactgacatagggctgaagcacagtgtcaggaaactgatacgtcctaaaggccacatgcactgaacatccactcccagccccagacacatctggctaagctcacccgtaggaggcagcccgagtttgctggctcttggggaggaggagaaggctcagaaggaccaaaaaacctgcggaggctggcagagccaggagaagctattactctgttggcagcagcagcaggcgcaggcaggggtccttcccaccattcaccttctgcccggaccccaacgccttcacctcccaactgggctctccagggtactctctcctcaggtggaggggggccaagaacaggggacactgcctctgtggcactggccacagcaagaaggtgctcgcatcatcagcatacagctccccactaaaggaaaaggcccttgaaggcaggtgtggagatgtccctcacctctggctgtaaagcgccggattcccaccagggagggaacgtggggcagatgcgcggctccaactccgccggacaggggtcgctggccgcccctctcacccaacccgggtttccctctcaccgggtcagcggcaggggaatcagctgacaagctcggaccgcccccccccaactcctcccggggcttgaagatcttgccttgcctcattcgggggatttgggggaagcaggggcaccgcggggaagtttcgcgacgcagccagagcgccgggaccgcggctgccagccttcggggcttggggccgtcgcccccgggcgcagcgggcagccggacccagcgcctctgccctggcgcggagcgcagggaaggagtagcgcggaccgggggcagagcggggcgcaaggctcggccggggtctcgcggccggccgaggccacttacgtgtgctgctgggggaagctgtaggcagaggcgccgggggcggcgagcagcggtagaagcggcagcagcagccacagcgggcgcgggggcccggacgtcgggcgccgggtgccggggccagggtgggggccgcagccgggccaggggcgcgcagtccgcgctgggccgggccgagaggcgccgcaggtccgagccggcaccgccatgtttccattcaagatgcggcgccgcggggagggggggcagtggcggcggcggcggcggcggcggggttgggggggcgcgggcggcgggcggtaactcggcctctcctccgccgccgccttctccgcgaggggcctccggggctgcacgggccgcagcgcctctgcgggctgcgcgctgctatctccctgcagcgctggctccaagcgctctgagcgcccggcccgggacctgcgctcaaatagcagccgccgccaacctgccggcaccgccctcttctctccctccctccctctctcttcccgggctggcccgcccccgcgcgcccccgccgcggccacgcgcccacccgtgcccgcgcgcctctcgtccccgcgcagcccgaatcctgccctactggctcgggcgtcctgcgccccagctgctacccgagcgccccgggtgcgcccccgcccccacacctcagaccctgccgctcctccccaccccacccgcgggaagagtcccgggccccgcggcccaaggcaggagcatatgtgacccttttgggggctcgaccttcaacaggcttaaggcctagagtcacaggtttaatggtggagtgacagcttcagcggagaccagaaaaggaggcatgctgaacttacagcccccgtggctctagctatctttaagatttctctctgtcgggggcttgcacgcccggctgctggcagaaagggcctggacctcctggttccctaagcggaaacctgggcacggctgtacggttgtggggggctggggacggcaggatgcagccctctgcagccactcgcttcgcttccctgggctgaacaggcactgtgtgcaggcctgtcccaagccccagttcccggagtttgcacagcctctgtttagattcttccagagccaggaagctcatctctgcacaacccagtcctttctgtcctggaggcccctggctcttccctgctgtgggcagaagactggggctggtgtcaaccttgactccacagcttgtggccctttcagagcctcagtgtcctcgcttgtgaatgcttgtgtgggtgcccactcccatttccaggatgaagtgagaatggggagaatctcttggtaaactgaagcattcacaatgaggggagaccatccctaggattctactgaagttaccctggaacccagctctgcctctggtgcagataggatgagagaatgctccccaccaacttgacacagggcaggaccccctcagcaataactgcccacagacctggcctatcacgaggaatgagggatagtaaccagctgggcaggatggttcggaaatgtccagatgccccacctcatggtatcagtggctctcctatcacccactcacaagtcagcccaaggagggcttgcagttgaaagggaatagtagcccctggactgaaaagggtaggggtaggggctggaaatagggcctaggacagccttcccttgctgcctagtcctgccttggcttctccaatcccagcaaaccagggcttgacagggaacagtttccttcatttcttgaagtgtcctcctcccttgacctgaatgagccttcaggggccagacaggtttgccagcagatcccaaaccatgagaccccaaaaaaagtatcagaggaaggcaacgcaggggccaggggcctggtggacaggtgggacctgatggactatgggagacgatagtccagctctttggggggacaagcagggtcctcactgagccagttgcccccctgccacctctggacacaatgggagggcaggggggcaggggtcctgctcaggagtcgacaagcgtgagctcaacagctgccttcccagccctgcctgctgagacctgttcccagcatctctgtcttcctcatgcccaaggtagggctggcctgtgatatcctctcttacctgtttgctggacatataatacctgtgcccatggccccaggggaccatcataaaggacatcattcctcttgggtgccctgtcgggggtgggcgccttcccaaggcagactctgcagtggcctgagaaatgtgagggccagcctccctgccctccaacaccagggtagcaacgctatccccaaagtgcccaggccgtcaggcacatgaagtcagtctaggtacagtgggtgggtt

SEQ ID NO: 315399 - DNA, 4001 bp, Homo sapiens
tccagggacaggtggctcctcagacccggagacagataacagaagcaaggtggtcaccgtgccccaaagggggtctgggcactgacatagggctgaagcacagtgtcaggaaactgatacgtcctaaaggccacatgcactgaacatccactcccagccccagacacatctggctaagctcacccgtaggaggcagcccgagtttgctggctcttggggaggaggagaaggctcagaaggaccaaaaaacctgcggaggctggcagagccaggagaagctattactctgttggcagcagcagcaggcgcaggcaggggtccttcccaccattcaccttctgcccggaccccaacgccttcacctcccaactgggctctccagggtactctctcctcaggtggaggggggccaagaacaggggacactgcctctgtggcactggccacagcaagaaggtgctcgcatcatcagcatacagctccccactaaaggaaaaggcccttgaaggcaggtgtggagatgtccctcacctctggctgtaaagcgccggattcccaccagggagggaacgtggggcagatgcgcggctccaactccgccggacaggggtcgctggccgcccctctcacccaacccgggtttccctctcaccgggtcagcggcaggggaatcagctgacaagctcggaccgcccccccccaactcctcccggggcttgaagatcttgccttgcctcattcgggggatttgggggaagcaggggcaccgcggggaagtttcgcgacgcagccagagcgccgggaccgcggctgccagccttcggggcttggggccgtcgcccccgggcgcagcgggcagccggacccagcgcctctgccctggcgcggagcgcagggaaggagtagcgcggaccgggggcagagcggggcgcaaggctcggccggggtctcgcggccggccgaggccacttacgtgtgctgctgggggaagctgtaggcagaggcgccgggggcggcgagcagcggtagaagcggcagcagcagccacagcgggcgcgggggcccggacgtcgggcgccgggtgccggggccagggtgggggccgcagccgggccaggggcgcgcagtccgcgctgggccgggccgagaggcgccgcaggtccgagccggcaccgccatgtttccattcaagatgcggcgccgcggggagggggggcagtggcggcggcggcggcggcggcggggttgggggggcgcgggcggcgggcggtaactcggcctctcctccgccgccgccttctccgcgaggggcctccggggctgcacgggccgcagcgcctctgcgggctgcgcgctgctatctccctgcagcgctggctccaagcgctctgagcgcccggcccgggacctgcgctcaaatagcagccgccgccaacctgccggcaccgccctcttctctccctccctccctctctcttcccgggctggcccgcccccgcgcgcccccgccgcggccacgcgcccacccgtgcccgcgcgcctctcgtccccgcgcagcccgaatcctgccctactggctcgggcgtcctgcgccccagctgctacccgagcgccccgggtgcgcccccgcccccacacctcagaccctgccgctcctccccaccccacccgcgggaagagtcccgggccccgcggcccaaggcaggagcatatgtgacccttttgggggctcgaccttcaacaggcttaaggcctagagtcacaggtttaatggtggagtgacagcttcagcggagaccagaaaaggaggcatgctgaacttacagcccccgtggctctagctatctttaagatttctctctgtcgggggcttgcacgcccggctgctggcagaaagggcctggacctcctggttccctaagcggaaacctgggcacggctgtacggttgtggggggctggggacggcaggatgcagccctctgcagccactcgcttcgcttccctgggctgaacaggcactgtgtgcaggcctgtcccaagccccagttcccggagtttgcacagcctctgtttagattcttccagagccaggaagctcatctctgcacaacccagtcctttctgtcctggaggcccctggctcttccctgctgtgggcagaagactggggctggtgtcaaccttgactccacagcttgtggccctttcagagcctcagtgtcctcgcttgtgaatgcttgtgtgggtgcccactcccatttccaggatgaagtgagaatggggagaatctcttggtaaactgaagcattcacaatgaggggagaccatccctaggattctactgaagttaccctggaacccagctctgcctctggtgcagataggatgagagaatgctccccaccaacttgacacagggcaggaccccctcagcaataactgcccacagacctggcctatcacgaggaatgagggatagtaaccagctgggcaggatggttcggaaatgtccagatgccccacctcatggtatcagtggctctcctatcacccactcacaagtcagcccaaggagggcttgcagttgaaagggaatagtagcccctggactgaaaagggtaggggtaggggctggaaatagggcctaggacagccttcccttgctgcctagtcctgccttggcttctccaatcccagcaaaccagggcttgacagggaacagtttccttcatttcttgaagtgtcctcctcccttgacctgaatgagccttcaggggccagacaggtttgccagcagatcccaaaccatgagaccccaaaaaaagtatcagaggaaggcaacgcaggggccaggggcctggtggacaggtgggacctgatggactatgggagacgatagtccagctctttggggggacaagcagggtcctcactgagccagttgcccccctgccacctctggacacaatgggagggcaggggggcaggggtcctgctcaggagtcgacaagcgtgagctcaacagctgccttcccagccctgcctgctgagacctgttcccagcatctctgtcttcctcatgcccaaggtagggctggcctgtgatatcctctcttacctgtttgctggacatataatacctgtgcccatggccccaggggaccatcataaaggacatcattcctcttgggtgccctgtcgggggtgggcgccttcccaaggcagactctgcagtggcctgagaaatgtgagggccagcctccctgccctccaacaccagggtagcaacgctatccccaaagtgcccaggccgtcaggcacatgaagtcagtctaggtacagtgggtgggttttggcagttgggtatttcagttctagcctccacagatgtgcatctaattgaggctgctggcaccaagggaaaggcgggagattttggttgacaggccgttaaaggaagacaaataaggagggggggggtaattaagagtaaacaagtggtaagtgtttacgaattataacttttgaggcttacaacatcctcagccctcttggtggctggctacagccacacgttaagatcttgggagaaaaatttgagccttcccaaggaatagggggacttccatggcaggcacattggtaaatgtggggctgcccacctggcccaagttgcctgtgctggaagacgtagggtggcaggggcaggtgaagctaccctgacagggggcctggtaggtgccagttctgcatgggaggtcagctcagcaggtcagaagagactgatagagccatagggagaaactactatgtgccaagcaggccatgggctcagttgtgccactcgaggcccgtcccaagccccagctcccggggtttgcacagcctctatttagattcttccagagccaggaaggtcatctctgcacaccctagtcctttctgtcctggaggcccctggctcttccctgctgtggggagaatactggggctggtgtc

SEQ ID NO: 315400 - DNA, 4001 bp, Homo sapiens
tgtttcatatactgtccccaaaaatgctactctctgaaggggaatgccataaataaaatacgtacttggttaccaggcagcatgcataacacatatggtacattggcccaaaaatcatattttaaaatgtttaaaagttaacttaacaatttaagctgtttgtacccattttcagagaattattccctaaaggccaattttattttctatcatcaagagaatactttgattaatcctgttgatctgctaacttgaaattctttgaacccctctaatctctcctcccagacccatttttttttctttatttcctgaaggggagaacgaaggaccatttatctcacaatgtaattttaagcttatgcttaaaatgctgcctatttgaattaaaattgatgcagcttgtgataagaacctaataatcaattctccattctcattactctccagaattacatggatgcagacccatttcttaagtttgtggactactctcataggttattacccggcagtgcagctgagtggaaagataaccacattcattctccttatctgcaatgatgtaatgcatcctagccctgggtctagatgattggggaataatgggattgtacaactgcagggatgacaaacaatagtgcagcgtctttctctgatacactgaaccccacgcctccaacgcaaggtgaaaggcatcacaaaataggcactgagtctgccccttggatgaagttagcattttttggcccgaggagcatctgctctggcactgaaacagcaataccgacacggagacgagagccatgcaaaaacactcagtttccgagccccagccaggacagtgcgagtgagtatcctgcttttctttgtggttagaatcaagtgtcatctaaaaataaccggttggtaggaagaagtcactgcatagtacaatgccaagaaacccggggatcagagagtcctccgataactgatgctgctcggggctcacgtttgtttggaaaactaaatctgcctccattttctgtgccggaaaaatcatcgcttcctgccaccacagaaaccttaccttttgcagaagctgggaaccggagtacttagcagcaatggattttatctccccaccaaaagccgaggcccagagcttcaccctacagggagaaggggcacaggaagatatgtaacacccgtgtcacagtcaacacgcacgcacacgcacacgcacacatgggactatggctgaaggagcagtgcgatgtaacatgttttaaaagaagaaaagatagaaaaagcggcttggtagaaactgccagcaccaaaactgcaaagcgcagcgcgggagggggcccgaggggggtcgcggagttaagaatgcgcaaagtctcccaggctctctaaaaagaccactgagtttcattcgaaccactgcccgaggactcgaccccccaaactgggcatcacctggcaaatagcagtcagaagaaatccacccatcccccccccaaaaaaagaagtggggcggcagtagagcaaagaggggggaaattcagcggcccatggaagttggattcggtaaccaggctccaaagttggtgccgtcacttgaggtgagcctctccagatctcactcggcaacctgcgggcaggggccagagcatcccaccccggcctcgccgcccgacgcgggtcccgaaaggcaggtgcgagcggcgaggccgacgcccgcggcgggtcctgcccagccgcacctgcaggcgcccaaacttgggcacagtgggtcgcaggcggcaaggtcccctccccgggcggcgcaggagccggcacttacacggagagcggtatctgctgctccgagcgcaccacgtcccccagcgcggcgtagagaagcgcggcagcgagaagcgccgaggccccccgggacgcgcggcgcggcgagcccggcccggccatgctgggctccctccgacgcgcccgctgcggcggcgacgagagcggccgcggggagctgcgcggagcgggcggtgggcgagcgcgcggggctgcctgctccgctccgcgccgccccgcctgcctctcgcgcgcccggctcacttggggagcagaaaaaggagcgggtggggggggcggggagggcggagaggagagggagggaggagaggtggggagggagggaggagaggtggggagggaggcgggcgggggaggaggcagcgagacgcgcctctagcagcagcagccgcccggccccgcctcggcggccccggggagtccggcgggccgcggcgggagggcggcggggcaggaggcgccgcgcgggcggggactcggaaactccagtgtccttggccgcggcggagcgcgccctgccccacccgggctactgcggccgctgagttctttacaactccgcagtccgccaccgcgggcgcgactctggggctggccccgggccgggcgaccctagccagggtgggggttgggggcgcgggagggaagccgagggcagggcgcggcgctccgcactttgcgggcggctgctaggagagggcgtagcatgcccgctccgcccctgggccgggcggggtcgggggccgcggaacctaaagggggcgcgccctccgcccccgccgcgcgattctcctgcggggagggagctggggaagaagcagaaatctcagaaaggagcacaggctcgcggcggcaggcgggatcgcacgcggggcggatcgggctggggatgggactgggtgggagctcggggctctggctagggcagcgctgcgtgaccgcccgcagctgctcctccggccgcggcgcccgacaggggaaagcacggagggcggtgctgccaccacggcttgggcgcaccagcgcggggctcccggcatccggccgcagcgcagcggccccctgcgcgcccgacccaggccccggggctccccagcggccgctgccttcggagtccgcccggctgcggtgactggtggggaccgggatgtcagggttgagcgaggaagccaacgcggcgccgagtcgatcctgaccgggggacaccctggatttcgggataaaagatttctccgagcctgggggattgcctgctccccactccggcgcccaccgcactgggcaggaggcagtgagcgccggaggaggcgccttctcgccgccctcaggggcgaggagaaaggaagccggagaagcccctgcgcgttctgggaaccaggcttctccccgcctctctcgccgctgcccccaccccgggacccagcttgcagaacccctctcccccgtgcgaggtatggggtgtgattgggaactttgtggagccctcgcgcaggctggcggtaaagaccgaccggagtgaggctgagtcatccttgcccggccaagcgcaactccggtgaccccagcaaggagtgcgctcctaacgtcgccggggctcccggcgcaccagacacctgggttcatatttgcatgcctttctgcaaccagggctttgctttctgccccgtcacccgcccttggcctcagcatcctcaggttgcagggaagtaagggcgggctccagcttccgccaggtggtgtccggctaggagccaggccggctctcctttccagtagtccctggaaaaagttacccctgcagatgttgggcttgatctcagagttggcagcgagggagaaggactgctaccgagaggctcttagtgcttttcccgagtgcgggcagacccgagctcccctgggctctggcaggtcgcgctcccaccttggggggcaacgcaaggaacaggcccctctccaggagcgccaggtgcgccccgcccgcgggcagtgtctacagcctctacggatgactaaccggttataatgaattctccgcttctgtgcataccctccgcctgaggaagcgtgccagccctttccaaaccgagccaagcgcggcctgacccccgaggcaaggggtcccaggagttgaccctcaaattgggggt

SEQ ID NO: 315401 - DNA, 4001 bp, Homo sapiens
atcatcatttcacatccatccttgctatatctcacactcaagccacatccctatactattctcttcaaagcaacaatcttccgccttacagcccctgcccacctagccctagcacgccgcccctgcctcctccaccacccaaagtgtcctcatgcactcctgtactatgcattgccatttatttcataatcagcatcgtcctcccattccacacagccccctcactccctcctccaaaaaagagggtctggagaaaagtgaacccagattccttagccatccggcatccaaacccagtgatttgcataataacagcgttttgtgcggtttccctccactgctgcggtcgcagaggttcttacatttcacgtgaaaggataatattaattacggaaagaagcggcagagagaggatggagaggtaggaaatctaagtgaaaatatcttagcagtaaagtaactgctagggagcatatatttctttggttaaaaaaaaaaagaaacgacacagactgaataataaaaagtcaatgtgttgataaagtgggtttgggtcttttaatttttttgccttttctcccctttcttaaattcttggtttatttattcattcattcactcattttttcttttttcttattctttttcctttctttttcttttcttttctttttttttaaatcccagacagagtcccctctctcttcctaggtaaatgacacgtctcagaacacatttcccccccggggatgttattgcaatgcacacggtgctgtcgctgctgctgttctcgcccgtcttggtagctcgctcccaggctctcacacactttttaaagacacacggatatgatgatggtgggaagagggggaaaagaaaaggcgacctgaaaagggggaggttaaagagatgacaagagatggagagggtcgctcaagagcgtgatgtgggaggtggctggtgggggttgtcgggagggtggaatgttcagagaggcacaagttgccagccaaaaggcgtgggagggggatgctggcgggaatggagtgagatgaaggaagctcaggtgaatgagaaggcaaaaggtgccgcgtaaggggctgactgctgggaaggcagggctgagccagtgttagaaattcgaggggctggtgcaaactgccactgccccctgccgcaccagagagtagggggagggggtggaaatcgctggggacagggagactgggaggggagagtggaaatatggggtggaatggggaagatggggaatgggcgagaagttgatgttccctgcgccggggcggggattaccttgtagcaggagcccgcagacactgtagaagcggagaacggcgctgcgtttccaaatcatggtcccttctctaaagggctggggaaggaacgagggggcaagtagatgctggtgagcggggcacgagagtgcagggctccgctggtgtcctcctcccggcgcccgccggacccaccgtccccaccgctgcggtgttcgaacccgcggactcggatcggcggcagcagaagcggcagcggcaaagcacccgcagaatggggtatcgcgaaatagtttcttctcctcctcctcctgctggtggtgcagccgcgacagcccgtcttccaggcaggggtttggagcttgccttcctctcggcgcgcacagcaagtcccagagcccgccggggctgcccgagcaggtggtgcagggatgccggggtgttggagaaggtgcgggcgagggctgcaaggagtgggtaggtcacggaggggaagggctgggggagaggaggagcaagcaagcagcactgccgctcgcgcccggggtgtctcggggtcctgggaggggaggtagaagcagtggaagcagcgctagtggcggtagcagcggcagcggcggcggcagtggcggctcccggatgctccggctgcagcggcggctgtggcggcagcggcagcggcgacggcggcagctctacgaagcaccagacacaagggcaagctcagagcggcggaggccccgcccccaccccggccagggacagacaccgccccccggccaatggaaactcccccgcccaccaggtctggccaatgagagaaggggatgggtggagacaagcgccgggaaaaacaaacaggcttctcaaggacccttcgggcaggaagaactgaagcccccattcagcacccctggcggatcttacctctttagagatgtctcgcccgaacttgcaggcgagacaactgccttcattaatcagcgctttgcactcaggaagggttcagccaatcgccaccgcgagggggcggggttagccgtgtccccagcatgttctggaattcgtggtgcctgggccaggtcctgggtgcgaggttcttctgcgcatttggactcctagagcagatggtggctgcacctgcccactcaccagctgcagtagcaatctctgacgattccagcagcaaaagggaaagattgcagagggcgtgggagaggctaagtatagggagtggaacacctacctgcctacaagaacttgtgcaaaaaaggaaaaacaagtggaggaaataattttgttgttgttgttgttcagaggttttacttagtctaggtataaatctcagtagagcttggtgagtagcagtgctggcactggcatcaggcagcctttggttcaaatagcatagctgtcgcttcatgttttataatatttgatgatttacttgaacgtttaagtctaaagcctcctcaactgcaaaaccaggataatagtacttaaagagttgtaaggattaagtgagaaagcaatcatgttagcgtaagtccatgcaatgcgtacatactttaaaaatggtgactctagctgtttattgggatttttctaattctggatagcaggaaatcttaggcaagcctctttaaaatgttttaacaatagccttacgaggggagagaggcagaagtgcacttttttaatggacctaaccaaaaggagtcacagaaactcaggaagctggaaagagccacctctataaatcaacaccctgaaatgtgtcctttagaagaggagacataaatgagcaagacataaatgaatcagaagttgtgtttctaaatgagcttaattcccaggttttccctatgaccagtttttaattggaccaaattggcagatgatggactggttcagtagtgttaaatcagtcacaccataaataaagtcggctttgtttgagagactacacaatagaaacctgcaagcaagaagacagagggaaagatgagaggcaagatcaatattgatgcccttcactctttcccatttgttgcttactttgccacaaccttttgcaaattcaacccttgccttttaactaatgacccattcatttctctgcccacctttctccccaggttctcaaaattaaggaacaaaatgtccataataaaactgcaagcacattcttgaagaaagatgtgtgaatacctgtgttattgtaggagatagttgcctactgtgagttttagctgttaggaaagtcagtcagtgagtccacagatactgctatcatttaacctattgtgaggatcaaaaggtgaaattctaatcattattgactcacgcttaggttttgtgtcagggagaatataacaaatggaaatgccaaagaagttaggatttgtttattgaaatggtagtcggagtttctgggttctaatgcacatgctgcttctagctgtatgaccttgggcatatattcaacttccttgaccctcagtggcctcaactataatatgaaggagctggacttaattacttataaagctacattgagcaatagaaaaaaaaactttaagattattatattgaagaaaataccccatttgagcatgaatatataggcatttgtaaccaatactctgaaaaagagtcttcttctgagtcttgttgataaccatgacagcaatttggatttgtacc

SEQ ID NO: 315402 - DNA, 4001 bp, Homo sapiens
cacattctcctggttaccttcatacatttattttactatcataattaatgtttttcatacttaaaaaccttgttttagataaattattctgtagcatagtgctttaaagtaaataacttaagtgttagaatatttatttttgggactataacatttaaaatgttgggcaaaacactgtatttttggtagttaattctataatgataattttacttttaataaaagagaggaattgtagtgcaaaaattattgaaattaccatgccagtatttcatctttcatgaagtatatatcagttaaaaagaattaacatgaatccaaaaacacaaaggccaaacagactgaggagtaaatagcagaagccatggggtatggtgtgtgcctgtagtcctagctttttgggaagctaacgcaggaggatctacttgagctcaggagttggagtccagcctgggcaacatagtgatatcccggctcttaaaaaaataaaaaaaaaatcagaagacttttgtgtaattaaaatacaaactctgaaattatttcattttaaatttatgctgtgttcattttacatttcaacacatgctgctgaattttaacatgttattgaaaactatcaggaataaggctggaaagttaatgttgcatgtcctggtccaattcatacattctaaatagatgtcaaacttatacacatcactggggctggtcaaacttgtttataacatttagatcttctctgactttgactttccactgactttgagagttacaagctaaagagcagctaaattaagcagaacaaaacaaacaacacaaagtgaaaaagaacactgaagtccaaatctacttgtttactttgtatatgctgcccttatctccacaatttacctgatgcacaaaacaataggcaccaaataatgatgatgaaaataatgcaggggaaatagtttactcctctgtacaccctggtgctgatagtagaaattgcagtagtattataatgcaagttttaattgtcttttgccttatcaaacaaaaggatcagatttgactattctaaaaaagaaggactgtaagaattgtggacatgtcagataaaggaaaacttgacctatagcaaaaaaatattaaagctgaaattatgaatttaacataccaaaaaaacccaaaaacaataaccgaaagcaaaaataccaaacatgtttcattgctgtttgactagagctaacatatgtttaattcaaagaagatggaaaatcaattactgcattcttaatgtttccaatatttacaacactcttgatcaattaattgtcctacttgtctttatgatactcctgtcattgactggtacacagataaaagtttgtataatcatagaatgtaatatatctctaacatatgatggctactttatgacaaaggttctgtgacttagttgcataccctaactgcctggagagctctaaatcaaaagcaaaacacattaatgttatcccacaccaagtgtttgggatttaattggtataatcagaaacattcttctgtatgtttcagaacctccacaggtggttctgatgaacagcagagaggagaactttacctaaggtctcaaatgtgggctcagtttatttgctgttactgtgttaatcaatgattcccctcctagattttcagtttttggctacaccccagaggaaagaaatgcactgtgtaatgtgatcctgtgagcacatttgtatatatgaatatacgcatatatactgaactgaaacacaagttacataaaacaataacctttcttacacttgtgatattgagaggtgacagcgtgctggcagtcctcagagccctccctcgctctcggcgcctcctctgcctgggctcccactttggcggcacttgagagcccttcagcccgccgctgcactgtgggagccccctcctgggctggccaaggccggagccggctccctcagcttgcagggaggtgtggagggagaggcgccagcgggaaccggggctgcgcgcggcgcttccgggccagctggagttccgggtgggcgtgggcttggcgggccccgcacgcgaagcagccggccggccctgccggccccgggcaatgaggggcttagcacccgggccagcggctgcggagggtgtactgggtcccccagcagtgccggcccaccggcgctgcgctctatttctcgccgggccttagctgccttcccgcggggcagggctcgggacctgcagaccgccatgcctgagcctcccaccccctccgtgggctcctgtgcggcccgagcctccccgatgagcgccgccccctgctccacggagcccagtcccatcgaccacccaagggctgcggagtgcgggcgcacggcgcgggactggcaggcagctccacctgcagccccggtgaggtatctactgggtgaagccagctgggctcctgaatttgatggggacatggagaagcttggtgtctaactcaggcattgtaaatgcaccaatcagcgccctgtcaaaacagaccactcggctctaccaatcagcaggatgtggtggggccagataagagaataacagcaggctgcccgagcagcagtgacaacccgctccggtccccttccgcagtgtggaagctttgttcttttgctctttgcagtaaatcttgccactgctcactctttgggtccacactgcctttatgagctgtaacaccgcgaaggtctgcagcttcactcctgaagccagcgagaccacgagcccaccgggaggaaggaacaactccagacgcgccaccttaagagctataacactcaccgcgaaggtctgcagcttcactcctgagccagcgagaccacgaacccaccagaaggaagaaactccgaacacatctgaacatcagaaggaacaaactccggacacgccgcctttaagaactgtaacactcaccgcgagggtcagcggcttctattctttaagtcagtaagaccaagaacccaccaagtccggacacaatattttctattatctatgtttgattcttgtcataaacatctgaactgttaaggtaattcactaatggatcacaatctgcacttcgaaaattactggacacttcttattcacacgtaatacattctgccttaacacagtgcactctaagagaattaatgaaatgcagaaaagactataggtttgtaaaattcactcagcaaagtcattcattgtgttgcttaggtacataatatttcaaaaactaagcttcactgagcatctgtattgaccactttgaagtgatagttttatagctggatcttcctacatcatgtactatctgaacacatcacactagttttgatcgtttggtctcattaactccaattatccaaattggtatgtagggaaatatacaatacggtgttgacagttcataagtatttgactattaatgtgttgtctataaaatactcaacctactcaggaaacacaattcttcaaagaaataataaaagaatgatccagcatgatctagattgtgttacattcaaataaagaaaaataatgcaaaacaatgcaacctaacctaccattaaatttctaagtaatgaccaaaatccttagctttatacatgcattatttaaaattatgaaacccaggagacttatttacaattcatccttaaatagtggaataaaaatcaatataactgttttgtcaatgcatttgacttcctgagcatattttccaacagaagcatgcttatgcaaatccagaaatgaaatgttaaaaattcagaaatcaaaatatttctttaaataaacttgttgagaaattttttactcagtaaacatttttaacatccactgagttttcttaattccactatttttctgaattgtcatttcttcatataaaaatatttgaataagtaaaactttatgttaggagtatatgtaagtatgtgtggctaccatttcaa

SEQ ID NO: 315403 - DNA, 4001 bp, Homo sapiens
ctttctattatctctacataatatatatctttcttcagcaatggttagaaataaaatttcagtttccacttgaggcacaattaatttttgaacgtgtcattgcttgccttgtagatgcaaaaatataagcatgcggaaagctatgtgttaaggcccctacaggctagtatacaagtaaaaagaggagagtcaaataaaatggctaagtgtggaacactggggatggaagtgtggaaggcactaaattggatacagaaatatgcttgcattataaaattctagtcagcttgagtcctgaaatgacttgacagatacctgtaatataatttatgactataattctccaatgatgaaatggcttttccatatttaatacttagcagcctgcgtattataattcaaattattttccattgttttggagagtaattgattactagaggttttatgtgatcaaatactgtaatgactcataatcactccattgtctattgcatcatcttagaatttatttttctacactttcttataaaagtaccaggtttcattcaaaagattttctcaccacactagactgtattcactcctgtttccagacctttagttagcctttctaattatttttttaaatacactacttgttttctatgtacatcctatccatccttcaagagccacttccagctccacctcctacataaagtggtctctgatgattccagtgctgatatgcatctccccctggttccctttacactcatatgctgtaccctggagctggtgcagtgtgtatagtttgtaattcctcattcctaaaactacacttctcatcctttcattatataaacatattgtgcttatacatttatagacatgtattcattatcaaataatttctgaattgctgtgaatgtatttattttgttcacagccagacagaaaattactgtggcaaggattggctgattttccacaacacttactggaacaggaaacaaggctaggtgagctataagaaaggtgacaataaatttgccatctcctcctttaaatatttcatattctataagcaaatacattgctatgacaatattagttgtatgataaaggcttgactttataaatagggaatagttaacacttcaaagatgagcgtatgtcatagtattaaaactagctgtaaaactagaacctggaactgaaagagaaaaaaatttcttttgctatttaagaagcaaaagcaaaaaagatttttaaatatgtagactgctctaaacagaatgaaattgaaatacataaatgataggtctatgatacagtatcatacatgtatttgaatttttcaaacccataaaaactgggacacatggagccaaaatactttttctttattttcagcgttggacatgtgcatcttttatcatgaaaacacatttttaggtttctagcaaagtcaaacaatgcaactaaaaatgaaaaaataatcataaatagaaatcgatagcttataatattcagtttttagaagattaaattttattttcacataattctataaaagcatactcatttttgagactttccatcagttttattttatgctgtattttgcccaattctcaattttatcaaggaaactaaggtacgcatgcaaaatgttagtgcaaaaaaagcactttattgcactttgaaatacttaggaataaagtgagaagtgaaacaagaaaacaaactcacaaacattcatgcaaacatgtctcagaaattggataactgaaataattgatatttgtatttgtaggaatttatgaacaatatctatacactgaaatagtattatcaccaaccgaattggttctatcatttaagagaacttagaagattgagcagaaaaatgaatgatgatgactcatgcagaataaacaggagctcacctttaactttattctttgaagcagccgctggtaccaaggaaaggttgcacaagaagagaacaaacatattagatattagacagattctctagtaagaaagcagagatgttattgctattaaagtctaaagagtacatttgtgatttcatgatcaacagcctaagaaacaaaatgactattgttacatttagttagtgttatgagtaagatccttgagtaagacaaagtaagagcagacaggagccatgtactacacattccaaacactacaagtcaccatattcctttaatggaatgtataactttaagttcttcttaactctaaattttatttaataatcaattaaaattatatatagtttaaatatacttaatactatttaacaatcagattgtaaccccatgatatttgagtaactagaaaagcaggccacttccatcatttgagtgctttctaaatgccagagactgactttccatacatctaccacttaataatgacaactgtgagaagtaagttttgttgcccttcctcatagatgtggaaactgggaatgagaaaggtcaaattacttgctgaagatgacacatctggaaagcagatttgggatttgattctaggtgtatctgactccagaatctgtgctgtaaaatattaccttaagctattggtatttaaggaactgattgatccactaaattgcaagcatcagttctacaaagccaaataaaaattatatgattcactaaactccagcaattttggtacttggttgacacataaacatgagactagaaaactgtattactttaaatggcattatttccattaataagctgaagtataagcttatatctagtggtaaacattgtttaaagcagaagtcaagttaacaagaaaattagaacagtcctacaggacagtcccttactcaaaggaaaacttctgttcaaaatgcgtaattagatacctctaaatacttctgaagtgatatagtctactttgacttactattgaaaaatgaagatagacaaaagcaggaatgggttctggctttctaaatgatgttaaggaggaaatagtccatctcctaattgggaaatgtgcagtcttgtttggtggactgacctttagtaaaatttaacatagattttagatctagtaattatgaactacacatgaaaagttctaatttcgacttcattctttcaagttgcctggagctaaaaaaaatttagaaagtctgtgtacataccaggctacttacagataatttttgttttcatctacaataacaaaaactgccttactatttgcatatatatgctactagtttattttaaaatgaacatcctagttttaaaataataaaatttttaccagacaaaaacatcttaactaaaaacaaagttattttaggaaatctggattaagtccttgacccattcaaactcttttatttcacagctctcaaatggacatagacaaagtggtagactacttacaatattattgtgaagattttttttaaagtaacttaaaattcaaagtgtaactattatctgttctttgatatatttactacttatgatgcaataattcataaaatttaaagcccactaaaatatttaatatcaaaacttaagttttaaaattcaatttcatcaaaaatctacattcctttaatgaatgttttggcttaattgtttaagtacaaaattgatatatatcaaaaattacaggtaatatagcaaagtaaacaatatcccctcttcctttccaatgtcagcaactgagataatcaatgccagcaatttcttaacgataaaaaataaaatttgcagttcttataaaaacctaaaaaaaaagtgtgcattttgtttccagaagaagattttactatacacattaatttgcagtctgcttttcccacatttccaggttaaaacacggagtgctaacttattcattttaatagttgcatatttttatgtagtttatatgaagtatggaactattttgtattatcaacaggtttgtggtttgggagcatcttgctgtattct

SEQ ID NO: 315404 - DNA, 4001 bp, Homo sapiens
aggactggcctcacactgcctctgtgtggggcttgactggcttttttgatagctcaagtgctgcaaatttatttaaaagagaacagaacgctgactttcttcactaactcactccagctgggttcctgcctgcttttcttctgtccccaccccccgccactgcccctcatcttgcagtacccctcatccctttctccagctaaagaacagctgatagaaataggcgcctttttttttttttttttaacatcaaaggcagcccagagctatgtcagccttgccccagcctcagacagaaaaagcttttgatgcctcagattgcgaagctttttgcagctgtactttatcaaggcagcagtggcagggcttggaggacccaggcgagccagaaggtggcggcgaagtcaccttgggaagaggagaatagggtcaaagacaggacggcggaggggctgacccggacggaaggaccagagggcgtgcccctgctctggggtcagtgaggaagggtcagggggactggtgagaactccagccataaggaagcagtgcccgaggacactttggcgacgctagtcggtgatcagctgacccgggcagggagaggagggtgcccttcgcagagtcacgggaagcttcgccttctgggcttgctttctcccgcctgcccctgcggttgctctctgccccagcgagcggagcgctgctccaagacgctcttctccctccacctcggcgcccccacctgccgttgcccccgcccgccgaacgcacgcccaggagggcgggcccggagttgagcgcagccgcccgccgctggagagcgctgggagccctgcaagcgagcaaggcctctctgggcgccgcgggcagcaaatcactccccgagcctctcggtccacaaagcgggacctgcctgcctcgctcaccaacgctcccgggctgggggggctcgagcaagcggcgctgcgctccgcggccctcgccggtcccagtcagctccaggagcgctccaggctgggttgggctgggcctgggcgagcccggccgctgggagggggcctcgtagccctttccccagggcgcggtctccacctctcctgctcctcctcgccagctgcgccgccagctcccattgttcaccccgcccgcctggcgacgtccgggtgctgctccctgggcctcccaggcgcacctaccttctgctgccggcgagccatgtcggtgggctgcttggcattaaaggggtaggcgatgcagcgcatcacgaacacatacagctgcagcctcttcttcctctcctcctcctctttctgcagccgctccaactcttccttctccttctcgctcaccaccgacgggctggggctggagggccggccgccgccagcgcggctgctgggttgcagccccccggccccgccgccgctgctcgcgccgctgcccccgccgccgcctgcacccaccccggctccggcgccggcgccgccgccccccagcccggcgctgccggccgagccctcgctggtacggctgggagacaggcgcgcgccggacggggccgagccgagcacctccttgccgctctcctcctccacgatctcatccgattcttcttcgctggacgaagggtccagcatagtggcgcctggggagcggggtctctggagcccccggcttggagtgcaaaaggtggggggcgctggaggcagccggggatcagctctcccgggtgggcgcttctccccaggtcagggagcgagagcgctgctgctcagcctcggccgccgcgactgatcctctgcccggcggtcgcgagctgggctcagacccagaagcgcgaagggaggaggggaagggagaggtgcgtccgtggactcgaggtgggcaagggggagaatcaattgcgagccccgagcccgcagccggatgccatctgcggctgctgaaggaggcgcctccagaaaagatgccgagtgttgcaagctgtcgatgcagccaagagccgaagaggcatcttgccgattggggagggagcggcgcttacgtgtttattggcttaactctcccgtgtccgcggcgtaaagggctgctgcagagggctggaggggggagagcgcggagcgtcctcagagcctcagtacttctgaccccaataccttgccaccctcctcccctgccggcttcgtggataatttttttgttgatatctggctctcattgcctcaaccccttttcccctcccgcggacaaaaagttcttgggggagggagaaatccagaaaccagccgagcgggctgtttggagacgctaaatcgagaggtcttacttaggaggaggaagtccgtgagatcttatacgggaaagaaagggtccatctcctttccccaggcttctttacacctggggcgtggggggcgtgggggctgggcagcgtgtttgtcccacctgtgtaaactctgattccagcaacttattccgcatgcgcccagtctaattaaaataaaagtgaatcaaattttgaatggattggtgtttcgaccaggcaactcaaccatttatgtagcgcccccgaccttgcctacccccacccccaaaatctatgatgaatcttcttcagttcccaagacctgggaatgctttctgctgaggtgagcctaccagaaaaatagaagggtttctggttgcttaaccctccctccattctggctcggtggaggcttggggaccccgcgatcagacaaagacaccctaagaactcagcggcgtcaacatctaatgcgtcgactgtcgcactctgttcacccctgcctctcgggtaaactattaatacaaagcagcagatggtgcctgccttccccgtgctcctttcacttaggccagtaaacctggtaaacgagggagctggccaacgtgctgaatgtaacctgcgacccgcacgcagatggatgaaaacaaaccaccagccagccaccttcagaacttaggctatctagagacctctccacttcatcgcctatatttatgtattttctagttctctaattatctgtagatactcgtgggagtgattttaatagtgtagcatgagtttaaagtttaaatcacttttgtctttacgtattttataatttaccatgagttttactagctttgatagtaaagtgacctgtttgagacctgcagatgaactcagaacaactggtttcacattaacctcaacaattctgtttgatcttttgagttaagtacttggatggcttatatttgacttcaccaccatacctcaaggacacaacttttgtggccatcacacatttggtaacaacacaaaatttaaaaaaaattgagcagtgcggggattgtgacagttttgcagcctcactttttaattcttctcaagaagtaaaggatgttcaaatcatgtggtattggttttcctggaacagaaaatatagtaagccaatcaattgatcaacaacctttatccagcaccttttaatgaagtaacacattgttctaggtgcttgggatagatagaatttttagaaggcattctcttaaagagtctataatctcctttgggagctacaacataaacatgtgaaaaagattgacagcacttattctgaggcaacatatcaacaaatccaggtcagtaaactgcaaaaagcttgcgtgaatgaagcaacttgaagtgaagggaatcatatatttctcaaagaagagaataaaatcttaagggaacataccatatacatgggtggtgaaaagagaaggtattgcaagtggaataagtggtttgcaatgccagagtaatagggcaagggatcaagtaaggttaaagagtgttatggaaacagggtatgggtaggtgacaggaggaggaaagagctgaaattataatccatttggcgaaataaagggaccatgtttaggacacaaattaaggagtatgtgatgatttggggaggagatgctgttgaaggccagaaacaggt

SEQ ID NO: 315405 - DNA, 4001 bp, Homo sapiens
aaattctttatttaacaaagtcatgcattcattcattcatttattctagttctcttcccagttttccccctatccaaatccaagcacctagggaaaccctgacttctggcagtacaacagataaacccccagagcagctggtagaagcctggaggatccccctgtccccagaaccagtgatgtccccgccccaccctggggattgctggggtgtctcctttccctcctccttcccccgactccccggcctctccgaaatcaggtttccagcagcctgggcttccagcaacatctcagccacatttttaaatagctctttctgcactgttaccacagcaacaacagccacagctggagctccccagacctctccctcctgactccccatctgggtcccgggagcatgagaaatggtcctgctcactctgtcccttcctggccccatctaaccctatccagcctggcccttcctctgctgaggtctgtctcatccagcaggagagggtgggagttctctcccatttatcagatgaagaatggggagactgaggttggagttaggtagaggctggctccagaggccctaatgacacctggcctggggcccccagctaagcttgctgagggcaaaggccatcgaatggccttggctggtacttccaatatgaagccagaatgggccccattcagagaacacagcctcccaacccatccacagatgaggccaaaacagagcccagcatgctttgtgacctcagggagagcactttccttctctctttttctctaagggagaatgaggagaaggtgccctgactagggcctctggtgtgagattccactcctggaacaggacctttttcccaggggaccctgcccacccatccaggggcagaatcttctaggaaaggagactcgagtgtaagctctagaggcagagtctgaaacccacatggaggcctaccaaatacaaccctcacagatccacacacatccctgtagcagacatgccacaccaagccccctccacagccctgaactcaaacacctgcctcccagatccagtacgccttgtatccacatcccgtgacacctgatcatacatgtactcccagacatcagcacacatgtccacaccacacagtgccccagacagccctgcacccgaacacctgcctgtccatccaaacatccctcacccagctccctcttacaccccaaaacacacatccacccgcacccacacaagatgacacccagacacacacacacacaccctcatataccagacgtaccctacaccctccagctcctctaccccatcccctggaagctcctgtattccaaaccaaaccccaagtccttacacacctaactccaaacatcctcagtacacaattgtacaccccctcctaactctgacttaagaccctgagagccaaataccagcacacaaaacacgtggacacccctctggaacaaaaaacacacagattcccagatcctccacccatgtctgacccacacgcctgtcctaagacagtacactccgcaagcccccccaccccatggatacctccaaatgcccacgcccttccagtcaggcccagctgaaggcgctcacacaggcccccttctctattacccactcagtgtcccataggcccgcctggcacctgctgggcctgggacagaggtggagaaaggcccagccctgcccctcagggtccagcccgcccgggagagtgcccagtggccactccttgggaaaggatacccagaggctaggggctcccaccgcccccacgcagcgcccaggggtgcagggatggggggcccggctgtacctgcggctgccccgccgcggggctggctgggaggcccgcggtggttggcgccgagctgtggccgcggtcctcaccgctgcgtgcctgggccacccgcccgcgctcttgctggagctggggctcggctcggctcggcggctctctccgcccgcctgcggctctgatgtcagtggaggtggagcctgcggcggagggacccgggattgggaggcgaggcaccgctccaaggctggggaaggggcacgggtggaggccatctccctgcttctggtcagagatctcctgctggacgcttcccgcccttggtcttaagcggggtccatttcacagaggggacaactgaggcccggagagatgattttcaaatcagcgggtggtcggaagcaaagcaggattcgaaccccgtctgtctgaagctagaggccggccaaactcaccctgtggcctggtggattttctttcagaccagttctgcgacctcccttagggctctgtctcccttctccgtgccctgaagggaaacaggccctggaactgcacgggagtctggtgggggatgggggagtgagggagtggggaaggaccgggcaagactaggcaatgaagagagtggaggtggtcgcagggtgtgggccccacttgacaggtgggaagactgaggccccggttcctctgcaagatggagctgaggcttcagccccagacacttgctcctcagagcgggtggtggtgcctagaggtattgggggcagagggaattggggaggaggaagttaaatcgggatcctgaaggaaacaggccaaaaaggaccgaggtgtcacgtgactggcggggctccagagtttgatggctggggtccaggttaggggagagagcctgcaactaggacggcaggcaagaggccaaaggtcggtttgctcaaggccttccttgggaagaaatttggtgccgagtggaaagagggggcggggggagcaactcgcaggaattggggatggggctgaactgggggcagccggaggaggcacgttgcttgggaccccactccacctccaagggcctccaagtgccactccctactcctgaattcttgcatgttccagctggtgatggggagagaacagtgcttatgcccagctcatttcctttttctctttctttctttcttttttctttctttctcttcttctttttttctttttcttttttttttaagacagggtcttgctctgtcacccaggctggagtgcaatggcatgatcacggcccactgcagcctcaaactcctgggctcaagtcatcttcctacctcagcctcccatgtagatgggactacaggtgcgtgccaccacacctggcttttttattttttgtagagatggggatctcactatattgcccaggctggtctcaaactcctgggctcaagcaatcctccccaatcagcttcccaaggttctggaattacaggcatgagccactgcacctggccaatttattatgcccatcttacagatgagagaggaagatagctgaggttcctggaaaggctttggagtctaactgatcctggtcatgctttacctctccgaacctcagtttcttactcgggaacatgggaatattgaagattgactcagagttctgagaattctatgatataatgatatgaagtgcctagaacactattcaaaacatgagagctagactcagtgtaaactgagactcagagagaggacttgatttggccagggatgaggggttaagggatccatcttccaaatctcagtatctcagactccttagttcatggaaaaatacatttcctgctcagggctgagcccccactctcccctatacccaccaagcacacccactgagctaggggttcttttaccacaaattcctgttcatcttgatgacaacaccccctgggtgataagatgacctctgtcctttcgaggacttgtacaacttcttttttttttttttttttttttttttgagacagtctccctctgttgcccaggctggagtgcaatggtgccatctcgcctcactgcaacctccgcctcctgggttcaagcaattctcctgcctcagcctcccaagtatctgggactacaggcgtgaaccaacacgcccaactaatt

SEQ ID NO: 315406 - DNA, 4001 bp, Homo sapiens
gcagactggccatgtggttggtaaccgtgtcgggggcttgtctcatcccagcctcaacacccatcctatctgccaggcgcagaagagcgtggccgagactgaggggagggcaggaaccatgagcagagccagtaaacaaagagtcggatataaaaatacaaatgtgctgaggaagtcccttagaaagaggctgaggctggggtcacgccagacaggggtgggggcgaggaacggcccggaggactgggctcaagtgggtggaaagctcatgcaagtacgcagccaaacatccctggccgcgcgcggtccgacaccggcggccgcccggtctgcagaccagactggccggaggggggcggggcaggggagccgtgcgggagggggcgggccgggggctgggggccgcgggtctccgtgtccgttccggtgtgcggggtggggctgcggcccgaggttttaaagtgcatgagcgcggcggcgggttccgggcgggtccgcgccgccgctaccgcggccgccgtggtgctgaagcggacagctccggagtgcctggcggcggcggcggcacggccctgcagcccccgcccgcgggcgcctgggccggggcgggggggcgccggcagccgcatcgccggcccgcgctcctggccgctgcgaggctgggcccggagcccgccgcccgagccggcgcgtctacactccggacggcggcttctcccccatccccttcagcacgtcgtctatccggtcatcctcgatcaccactgcgcagggagaaagcgcgtcagccgcgcggcctcggggggcggcggcgatgagaatgagccccgcgtcctagcttcccgcgcagctactgcccgtggcccagcgacgcccctcggaaccctgtgccgcggtgtcctccccgtccgaactcttctggagacccaacccgccgccaagcctagaccccctcccctcccgatggcggaacgcccctcttccaaaggctccagctattctccctcccagtgcgagccctcctgccacctgagccttcctccctctgagttgatcagaaacctcttgctcacggaatccccctcttcaacccgcacttcaacagatccccctgctcaaatggggctcaaaccgagtatccagctggtccagccctctcctcaacctgagccctctcgccgctggaacccctcttccgatcctggcaccaacagagctcccctccccatgcaaacaaccaagacaagcggacccccggcctcctgccctctcttgttagacgtccctctcgacccgaaggttcttcgtattgtccaccgactcagtatttgatcccaaagaatcagcccgttaccccgtgctcccacttccgtgcagccccaaatgccccgaccggcccctccccctcgcccgggtgccagggctctgcttccagaggtggcgagcatcgaatccggggcaccgtgttcccgggagaagggaagagggggacacacactgcagcggggacccccccctccagcccgggctggagagcggctggtgcgctggtctgcggcaagagctgcgggcactcggcggggaacggcagccggggggcgcccggcggagggtttctgggtcaggcggcgactccgggcccgggccgcgtacctcgcttggctcggccgatctggcccagcttggggggtcgcttggcctggttgcccgcgaagaaggagttggtgtcctgcaggcggcagctgaaggagaggtcggagccctcggggtctgcgccgaagcggcccatcttgtcttcgctgtagggcaggatctcggacatggcgggcgcggggtgggcgcggggcgggagcgggactgcggcggggcgcgggcggcgggcttgctgccggaccggccctacctcagcaggggagccggcggaaggatgaagtcatgcagcatccggggctgaggagccaagcggggcctcctcccccgcgcctccgcctcccgggccgctgggcaggcggcggcggcggcggtggcggggaccgggcgggggcgggggcggggggcgggggtggcggcggcggcggcaagagcggaatgacgatgagcgcccgactgcggcagagcacggcgggcggggcgcggtggaggcggggcgggcactggccaggggaaagaggcggggccgggggcaggagcgcgcccagctaccccgggaacagaggcagctggagtgggaggttcccgcactgtggcggggaatggccagcacgtgggtcttggggaatagtaccagccaacccggccgggacctcgcggggaggggcgggaccgaaggggggtgggatcgagcctggtactggaggagcttggaggagggtctgacccctaggctgggagaggcgtgcaagggggactgggagcaggagggcaaaagctggccgggcgcgttggggcgggaaggcggccgcagggctggcaatggaaagcggggagcgggaaatgcgcggggaggagactcgggtacagggtgactggggaaggcacgaacccacagcgcgggaagagctcgggccagtgggatggtgcccttgccgctgacgcgctcttgtactagttgctctgctggtcttaagtagatcgtcagggtccgtgcgcctctgagtgccggtctgtgtctctgtctccgcctttgtgtgtgtcagtccatctctaagtgtctgtatctctctgtctctgtgccccgtatctctttcgctgtgttatggcctttgtctatgcctgtcccttaagtgtctgcctttctctatctatctccattcttgactcctgtatctctgtgccagtgtctccgtctcctgaatctgggtatttcagtctctcctaggaggggtctatagaaactgggccgacgcgcgcgcaccagggcagacacccccagccctagtccggtggctgtagccccccgcggctctggagtggtgcgctcgcagtgtaggaggaatgaatggcggcgtcgcggggggcgccctgggctgcgggtgacgcggggaagctcggagcacctgaggacgcggagcgcgccagtgtgtgccccgagggagtgcggtagagatggagggtgccccccgccctcgttgctttggaccacgggtgagttctcgcctcaccgatgggaacatgccctcttctccccttgcctcccgcccccacaacccccgccctggctggccgtcacccgcggcgtcacctgcttgccagcgcgcaggagctctggcgcaatcactggccttggggaggagggggtgtctcacatgcggcgacagtgacggcagcgctgaaaacggtaatgatcaccctgtacgttcattccacactccaggcgaacgcgctttccttccttaatctggccaaattaccaaatcacacagctggtgaggctgccttgtagtgggtctccttccaacactttctcgccaggtgttaataccggagacacagggacaaacgcaatggtggctgcccagggaactggatggggggggcggtatgccacaggataccttgatgccagcctcactcaagggcccaggcctgggggcccatcactatgaagccctcctctgctctgtcctagtctccgggatgagggccacagctggaggtggaggcccagcctggagtgagaggagccctgaaactggaaggacaataaaggcggaagactggggtcactggaagagagtccagaaaattccacatacactggaagttgtccagtaatgggttccaatcctgactcccactttctcagtgaccttgaactgaaggacccataatcatggttttaaaaaattaattcgtttgtacttaaaacattttaggaggccgggctcagtggctcacgcctgcaataccagcactttgggaggccgaggtgggtggatcacctgaggtcaggagtttgagaccagcctgatcaacatggcaaaaccctgtctctactaaaa

SEQ ID NO: 315407 - DNA, 4001 bp, Homo sapiens
cctgggccaggagctatccatggtactgggaccttcgagactgcaccctcctgtatcccccaaacatacactgaacttggtgtaggaggcacagccaaaaggaggccagctccttggagcatgttggtggggaagaggccagctgctgcagccccccagtcaggacagttcccagcccgtctctctgccatcacggcagcttaggtaaagcaggtccaacatgttgaaggcagacgcataggggtatggaaatgaggctcggatgcctggctgcttccctttatagtccctcttctcagttggcccagctgtacttagaccctcccagccaacccctcccccatctgctatcctttccaggctttgggtccccagagcccctcttacagctctgcttaatcccctctcaccaacccccaacagcagatcctgccatgagtgccagaaacggcaccacaagcaacccagaaacaggataaccacacagcccttcacctccccatgcctcagtttcccctaatggaaaccatggaatctggccttctcccagggcagaggactgcttgcctgcctgtgaatggtggccagggcatggggctggagagtagggccatcagagatatgtgaacagccagcctaggagagcacctgaagggtccacaccaaatattagaaaagggagacccttgccccaccctggaaaccaacctgactctgagtggagacaccagttccccagttgaggaaactgaggctcagaagtcgctggagctgccaggaatcaactctgagggtgggggagggcaccaggtctctaaaggtagtcctgggggctcaaagcctggacttgggggtaaggggagtacagcacagggactggactactgcagactctgagcttttagtgtgggacagagggccctgatccttaggaaggaacctggtggagcaggatctgcctgggaggtgcggacaaaagcaatttggcagagctatgcggggagggggctggggctcaagagcccagggtctctgccaaacagtacaagctggggaaggcagaagctcatgctgtcactatcccagccacctccagccaggggccctgctccccaccgtgctgccaccctgacccctttcccaagtgctgctggctcgcccccgctggcacagcaacacacatgcggaaagcacacgtgtgagcaccaagccccgcacctcccagcaggaacatgtgcgcccccacccccaccgtgcacgtgggtccatgcactggacccccagctggcacccaggtgaaggcttggaagctgaattttggctggggggctgctggtccccaggggcttggagcttcctcccccaccccgcggcagccccgcccagccccctccgggttgtcgcccataaagaactctccgttgtcatggaaattagtgactgctaagcgggagggaaggggcccggggacagttgggaggggctggaggcggctctgggaacggggagggacggctcagctctcggcccctatcctcacgggggaccacgaatcttcgagggttaatcttttcacaattccgagccgcagaagcttccccccagaacccccaagccgtccgaggtaatggggaactttagcccgaccccgcactccctcccccaaatctgcaaagcccgcgcgctctgaccccgccaggacctcgagccctcgctgcgcccccgcgcactctgcatcccgcacctcgagccagggaaacaatcccccaaggccccacaacctgcgttcgggaagcgcccccagcccggcccgccccgcacctgcagcgccggttggtcacagggaggaagtgatcgcgggctcagcggggcgccgagggctccggggacggcgggcagaatccgctccgagcacgcggggcagacgcggcgccagatgcagccgcttcggctagcgaacctccagcatcgccagccgcttgccggcaccggattcgcaccccgggccgggggcgggctgggggcggggcctcccaaccggccccgccccgaccctggcggagccttaagggcagaatcccactggagagcaggagcgcgcgggatggcagcggtgctggtgagcactggcctgcttagccctggccaaggttctcaatggctcccttaggccctcagcctggggccggaggaggcctcctatgcccaatgtaaggggtggtgagtggagagttgggggaaagcctgagtcctggagctgcataggatcgcttgccagtcattagtctctagggaacggggctttgcccagctccccgaacccgacccaaaaggcaggaccaacttagaaaaaccagatgggcagtcgggctagggcaggctcccctagctaggagcagtaaacacacagaggtgtgtgtttgcaggtagtcagtgtggcatcccctagcatcccctagctacgcatcccctagctaggagcagtaaacacacagaggtgtgtgtttgcaggtagtcagtgtgaaaacagtgagggccctagactgtagtagcaaagtctcctatcccaccccatccccaactcctgcaaggccagagtctttcccaaacataagtaccagcaagggtggcagcacagtcagccccttcctgtgtggcaccaaatttcccaaactataaaagtcacctgtgacatggtgtggcctctgctttcttttcagtctaatcactgtcaaacacttcatgagttgtatcactctagtggcctggcctgggatatggggacacaggagaactgtggcaccaaggtatcccacctggcctgggtgctaatcagagggaggaggctcagaaccaccaggaggaagctttaaaggaagtccttggccatttctctgtcccttgtcagtgaggctcacggacccaaagcctgacccacacccctcacaagccctgaggaccatcctaaggccagtatctgaagaccagactcaggcctctcagtgtctggagctgggttttatcccacctcactcctcccagtgagcctcctgaccctgctgtgggagagggagttggggtcatccccaaaccctcagccatcttgaggctgccctggccacccatggctgatgacaggagggactgtccaagtccagaagctggggctggggctcagactgaaggctagcttaggaaatgaccgcctcaaacaaggttcctcaaaattttcctccagagggggtactgagcccttcaccttcctccctggcttggtgttacctcctctaggccaggctggtgccacttctggggtccctgggctctgagtggtctcgggttatgggacccaccccaccactgggtaggaatctcctggcaggctgggtatctgcaaggcagaacccgtttctcatctcagtatgctcggctgatgtctgcagaatgaatgaatggcctggcactgagtccttcctgccatctgcccactattcttgaaacaatgggtctctgagttttatggtgtagccaagctgtagcttgctgaccccacacatgccacatacatgttttctgtctttcctgagggtcatggctatccaggcatgggggtcaatgagaagctggaatggggatttttaggcaggggaaggggtggctccttagcgccctgcctgctgctggcagtactccacctcttcttggtcctaagcacgctctgtgcatgtgggtgagagcacgtggcagggtgtgtgtgcacacgtgtacgtgttgtgtatgctctcttttgccgagggagatgcaacagcacagtgtatgcagtggtgcccaggggcacgtgtgtctgcattctttgtgcacccaggcatgcttgctggcacgtgtgtgtggacgctgtagctggtccctggagttatcagtccccttcctgcctgacacaagtctcaggattgtggaggctgaatcaggctttgagagctggacatgggaagggggctgga

SEQ ID NO: 315408 - DNA, 4001 bp, Homo sapiens
tcttctctttagatttccggaagaaatcacccagcagggcaaatctcttgttatcctggggttgtgtacaggaagaaacaggttccttgtcggggatgtacccagggtcaatccaagacccctccccacctagacgcccctcttcgtgggcccccgcaggagctttggggccccagttcaacctctggctgtgacctttgaagcatgtgattgaatccctacacccaataaaaagatgagaaaacagagtcccggagatagtgaggggctctgcagggtcacacagcccagcccagcaacactgagatgggaacacagggctgagagctgagtactcttagacagtggctctcaaactttacagaagccggaatctcctggaaagcttatcaaaatacgaatttctgggccctacccagagtctgtctgagtaggtctgagtagggcctgagaatttgcatatctaacgagtccccaggaagggctacacttggagatctaccgctctaagggattccagagccggccctggagatggaactcaggtttggggaagagccctgggtaggaggggctttctctgtcctgggttgggggagtagttaattgacccattggatggtccacactctatgcccccatcagcccctgcatcccagaacagcccactcaccttatcacaactgatgtcaaaggagcccctggcctggttgagggtcactgtccccatacaccgcttcaccagctggaaaggagaagctcaaggtcaaacttgaaaccatttgccatgacctcccagccacatcccagtgggaaatattccccaggtgccccctgttcagctccttgggaggcacccaccaacacccccagcccccagcctcaccccgtccttcttgaagtcacaatcctctggtgactgctgtgtcgtcctggggcacactgtctccttcactgtgaagctcacaggctttggcgtgtctgggtccccatcctagtcagaggaggaaatggggaggcccattcttgtattttctgatttgtgtccatgacctccccaccaagagggcaggctttccacagtacctgatgtgcgacgggcactgggtgctgggcttggcactggggcattgaggggaggaggactgagccattcctaccctcctaggtgaacagtgagtaggagcagacctcagatgagctctaacaaggagcccctcccactctggggtgggggcaagggaagtcagggggcttcctgggggacaagacatgcccactggaacctaaagtctggatagagttcttccctatgtggggtaacgtggtacagaagagacttaaagcagaggaggtcactgcccagagccaatgaccccattctagtgcctggagctcgcagaagtcccaaaacctgcgtggggtcggggtgagggtatctctgccacagcaggaattataaggcaggaagctctcgagctgggaggagacacgagctctagaaggttccctggaaaacacgggaccacatttaaagggggagatgccctcctggcaggcagtgcagcaggagcagaaggaacaacacgtggccaagcccagccagagcagagcagaatgtcccccaaagctcaccatcgtgggcctggggtccaggtccaggaggcggtagaggttagcatccgaggaccgctggttgatgccatctatagcacgaagcacagcttccttgtagctgaggacctgggcaatgatggccagaggcatcaccaggcccagcagcaggagcaccagtgaccaccgccccagggagtggccatccctttgggtcttcatggtccccatgtctgcctccctctagcccacaggagcctcctttatgcccagcctgagcctgatgcaaaagcccaaccaggagccttcctgatccacccatccctggctgcctgccagggtgtgggctggggtttgctttagcccctggctattgcttcacaggacttgctgggcagtgagtgaggccttccttgtgtgcaagatgaggaagtggtttcttcatctctgacaacctcccagacctgaccggagattgtcatagccaggggtgctcaagagcgttaaatccctccagagaggaagagagccaggtgcctattctacatccttctactcctcaggagtcagtatgatggactgctaaatctccagctctaggcattgcctggcaccctgtaggcatcgattaagaattgatgaatgaggcagggcacggtggctcacgcctataatcccagcactttgggaggccaaggtgggcggatcacctgagataaggagttcgagacaagcttggccaacatggtgaaaccccatctctactaaaaatatgaaaattagccacgcatgatggctcacacctgtagtcccagctacaagctgaggcatgagaatcacttgaacccattgaacccgggaagcagaagttgcagttagctgagatcatgccactgcactccagcctgggtaacagagtgagactcagtatgaaaaaaaaaaaaaagaactggtaaatgaagacagtagccacccccaacctagagactcactcttgcaagggacaagttgccctttcagttcaaggccataccacatgctctctggacccagccgtcagccagacgaaggctctgctccatctatccccttctgcatccttcttcactgtttttttcagtctcaaaatgttcccaagcccctccagacatggcctttcaccatggcttctcccaagccaagtcttaggaaaggttgtctacgcttcttgaccccatcttttcactcttcttcatgctgaaggccactgaaggctggccaacccacccttggtccatggccaccctcaagcctggtctttgtctgcacaggcactggtgagccttccttcttgctgccccggtctcccctgatgccactctcctgctgtccctcctgcctccctggtggctccttcttggtctcccctaagggctgtcttcttaatattgagagcgtgtggggtcacctcctgggctgcttctcttccctggcctcgggtttccctggggacgccctctcccaggacaccagttataataggcagacaccacccagtctgtatctctgagttcgagactcccatgaacgtcccggttgtccccactgggcctccttgactgctcttctgctgagtgcccactgcatgagccctgaagcacctttggctccttcctcccgaaagcactcccctctggcctctccttccacccctgcctggctcctgccgccatcttctctcccatgcaatgctgccccagcctccagactccaccttctctaggtttcaggctctccccagaccacagtccaccctccacaccgttgtccaggggttcctttaaaccaccaatttggccatttcaaccctctaccttcaggagcccacacaccccctaggctggcatcagggcctgtggccttttggttcccactgccctcaccccagccctgcacactgcaagtgccagactgtcacgtatgcccccatcacataggctcatctgagcctcctgctctttctcccagctctgccccgatccttctgtttggcctgccctttcacctcatgaagctttccctgacctccaaccaggcacagcaatctcctctttgcccctacatcttccaggaagtctctcctgattcgacctcaaattactccctgtttggtgctctagctgagacaccaagctgggatgggtggctggtgttgggagagggagagatcacagccaggagagataaagggccaaagtgatagaggggtccagcgtccatgaggcaaattccggtcccagctcctctgtggactggccatgtggccctgaggcctggggtacctcttgacctcagttggcctgtgggacacttgggggcttggacagcagggctcctggaaggtggaa

SEQ ID NO: 315409 - DNA, 4001 bp, Homo sapiens
ccagagactggaccagaggcctgagagacactagcgcaaatcccctaggccactagccagctctgtgaccttgggcaagtcactgcactcctccaagcctccggaaaacaggaagaacaatcactaccacccatgggtggactgagattacacgtggggtgcacagtagggagcctgggacccagcgaacattcactaagcacctaccgtgtactcagcacaggtgttggggcactaagaggaagtgcatagtcccagtggcccaggagctcagggtctcccagggctgaaaagtgatctagcagaaacatgaggggaggcatgatgggagctgaaaggaggtacctaatcctgcctggggtcaagagttataggagctgtcagatgaagggaggaggtcaagggagagcaaagaatccccctagtgaaggtctagagaggggacagggcgtggcagattttggatgtgcacagaatcataacagtgtccgtttatgaagcaccgacctagtgcctgccatgaacctgagcatttcacatgtactatcttatttaatccttaccccaaccctcagagatgggttctgttatccccattttatagaaacagaagcacagggagactcatgggggttaagttacttgtccatggtcacacggccagtgagtgacggcagctgggatctgaagccaagaccttggatcccaggctctattaatgtgggggggctcttgaggggtactgaggaatgggctgcaggagaagagtaggagtcagaccaccagagcaggtctgtctcctcacctgtcagggggctggaatcagaggacctcactaagatcttggcctctgtattagactggcctggatttggactaagtctcccacttcctcgctgtgactgaacctacgcccttcatgtctctgagactcagtttccctatctgtaaaatggggacaaagtgaaaaaatgttcattgagtctccaaggtcttctttcagctggaggggccagaactggccatgagaccacgggccaatcccttttcctccctgggcctcagtttccccagggaatgcaggtggaaactcattggaccagatgtttccaccgttcttttcagctctattcctgtggttctgtgatgctgtgagagggggaaagaaggaaaaagggagtggggaaggagagtggcacacaaaacctagaaggtcccaccccaaccatcacctacctgtgactggaaagccagactcagcccagccccctcctttaggctgggtctgaacaatcgcaggaggggagggagacggggagggaggggtccgggtgatgttgagaaggaggcatcactgagggtgccagtgagaaagtcagctgggggttgcggtcccgggaagggtccgggttcaatgcggaggagaggcaggtgctggggtccccagggagaggcgtagggcttcactgtgggctcgctgaaggtggtgggggcgggggggagggggcgctggggcatcagctgcgggggaagaagggggccggacacacacgagggaggagaggccgaggcagggtgcagaggggtggagccggggctctgatcgggggtgagaggtagggctgaagcctgcacggtgggagacgaagcagggactggagtcgcggaggggcaggacggcccctaggggagaacggccggagctccagtggggaccacgaggcaggagtgggcctgtggggaggggggcagcttaatgcagggagaagagagaagaggcagggggctgcatggtcatgggggatgggctggcgcttcgagaggggaagaaggcccccggcttcagagcgggaaggagagaagggggccggcggcgggctgcacctgaagtccttgtcgctggacgtcatcttctccaggaggctggagatgtggaaggcggcggtgctcatggtggctgcgcgccgcggagccggccggcgggagggaatatggcggcgcgggcgccccctccctcgccagctgcgcgggctgcgctcaccagacagaaatagcagctcccgccccgccccgtgctcacgccttggccgtggcggccgcgggaggcgggcgggcctgggcctggcttggtggtcttggccccggccccagcccttgccctgctgacagcgcagcgccggattgcacacacccccagagacggggagctcactaccctgccaccacctccttgttattcccgtaggtgccagctctgtcttgcggcatggacgtaatatcatagagtctcaggttcgaatcccacttctgcctcttctgctgtgtagccttggccaagttactttacctccgctttctcatctgtaggcattcaagaaacaggagctatcaaccaaagctggtcaggccaaccaaaagacccctcacccacgatgcttgcccgcccctgagccagacaggatctggggaatgaactgagtcacacaaggccccctgcctcgcatccccaaccctcaggacggcagggtcagtttcttcatttttttagcaatgcaactgaggccgagaagcaaagggatttgctgagggtcacacagccaatgaatctgggatggagtcaggattgactgcagatcccttaatatcctgcgcagcaatccttccataaacagccaggaggctgctggatgggaaagggagtagtgtgtgcttcagagccagacaagcctggcttcaaatctctgctaggctccttcctggctgtgtgaccttgggataatgaaacaacctctctgggctatgtttttctcactcataagataaggataaaagaaatctttattcacttgggaggccgaggcgggcggatcacgaggtcaggagatcacgaccatcctggctaacacagtgaaaccccgtctctactaaaaatacaaaaaaattagccgggtgtggtggcaggcgcctgtagtcccagctactcgggaggctgaggcaggagaatggcgtgaacccgggaggcggagcttgcagtgagcggagatcgcgccactgcactccagcctgggcgacagagcgagactccgtctcaaaaaaaaaaaaaaaatctttattaaattgacaccccccttgaacacctgttattatgaggtacgtaggttctagaccaaagctaatagaacactgcaatgttgaaaatgttctacatcttcagtatagtatctaatatgatagccactagccacatgtggctattgagcacttgaaatggaattagtgtgactggggaaccaaattcttaattatatttatttttcattaacttaactttaaatagcccactatgggtagtggctatcataatggacagtgcagatctgtacaacaaggatgcaacgcagcagggtgttagacacaaacggcccctgccccctggggactttacattttagtgtaggaaatcagcaagaaggaagaaagtgattagataaggaaaataagagctcttcagaaaataaaatagagagttcctggagcgtggaggggcaacttcagcaaaggtcagggagggcactttttgaggaggagacatttgggctaagacctcaacagatgaagcagctgggcaaagttttgagggaagggcttcccagacagagggagcagcaggtgcaaaggtcccgaggtggtggccgggtgcggtggctcacacctgtaatcccagcactttgggaggccgaggcaggaggatcacgaggtcaggaaatcgagaccatcctggctaacacgatgaaaccccgtctctactaaaaatacaaaaaaattagccgggcgtggtggcgggcacctgtagtcccagctactcaggaggctgaggcaggagaatggcgtgaacccgggaggcagagttcgcagtgagacgagatcgcgccactgcactccagcctggcgacagagcaagattctgcctcaaaaaaaaaaaaaaaaaaaaaggtctcaag

SEQ ID NO: 315410 - DNA, 4001 bp, Homo sapiens
taaaaaaaaaaaaaaagcatatacacatacgcataaaaaaacacaaaaatatagtcacacaccacataacatttcagtcaacaacagactgaatatatgatagtggtcccctaagattataatggagttgaaaaattcctattgcctggtcatgtcatagccatcataatgtcatagcacaacactttactcgcatgtttgtggtgatgctgatgtaaacaaacctactggggtgccagtggtgtaaaagtctaccacacacaataatgtagagtacataatacttgataatcaacaactatgttactggtttatgtatttactatgctatactatgtactgttagtatactccttttataaaaaaaagttaactataaaacagtctctgacatgtccttcaggagatatttcaagagacattgttatcataggagacgacagtttcattcctgttattgctcctgaagacctcccagtgggacaagattggaggtggaagacagtaatattgatgatcctgacgaggtgtaggcctaggctaacgtgtgccttagtttttaactaaagaataaaaaaaaaaaaagaaacaaaaaaacttaccaaataaagatataaagaaaatgtttgtgtaactgcacaataagttcgttttaagctattacaaaagagttaaaaagttaagaaaatttagaagtttataaagtaaaagggttaccgtaagctaaggttagtttattactgaagaaagattaaaaaaatttagcgtagcctaagggtacactgcttataaagtctacaagagtagagcagtgaatgtcccaggccttcacattcactcaccactactcaccaactcagagcaacttccagtcctgcaagctccttttgtgggtaagtgccccacactggtgtagtattttttttttatcttttatgctgcatgtttactgtaccttttctatgtttagatgcacaaatacttaccactgcatgtaactgcacacaccactgagtacagcaacacgctgcgcaggcctgtaacctaggagcaacaggccatgccatacagcttaggtgtggaacaggctgtaccattcaggcttgtgtaagcgctttctacggtgttcgcacaacaacaaaatggcctaagaacacatttctcagaaaatatcacatcgctaaggacgcatgactgtatgtcaaatgctatgacaggagatggtttttattctttttaagtttatttaacgagcatgcattattttgatatatatcacaggccatttcccgctagctgtaaatcagagtcaagtgacagcaagaattggctactaactacccatatctaacacctgccccccaaagcggctcaacggtgggcatttgccagtcaggactacaggtggaggagcggcggctgcaagccgcgacccagcctccccgcagcctcagcgtcggcctctgcactcgggcttgccgctcccaacaagaggagggccgggaggcggacgagggaaaagcaaagccggggccgctagcctccgcacccggatcccgcccctcggccgcaggcccgggccgcactccgactgagcaactccgaccgaagcgccgggcccggccctaccttgtaataaaacaccgcctcggagtagcggccttcgtggtcgcgctgaaccgccagacgggcgaactgcacagcgtcccgctccagtgctgtggcgtccatggcgcagtggccccgcgccggggcagggaaggaggccctgacgcaggacggctcttcgcggactgcggcggcccggcggcggcgaggactcgggagcgccgcggaaggagcggcaaagtttactttggacggtggaggagagctcgccttcccgttgccgggctggggtccaccgcgaagccgcgcccctcagcccagacccggcttgtagcccacccggccgccccacttcgcggccccagcggccctcgccccgcccaccagccgcccgacgcaggcgcagcctggccctcacgagctccttagaagctggggccgccgaggccaggctcgcgggactgcgcgggctgtgggcggggccgggcccacgcaggagccgggccgcgggggcggggcaaaaaggcctgccgctgtgcacgtgaccgtcgcggcgcccgggattgagcagctgagggcaggtgccacgtccgagctgcccacacaccgccttatgcgtggcggtggcggtgcagggcgaggctgttttcgtcgacagtgggcagtagaggggtacgcgccttacagatcctttcctctgttaagtgtaagggatgggagtaaagagctaaggaagaatgcctcccaccagcatctgacacattaaaaaaattaccgtgaggacagaggttctttagagtcactcttcgctaacatttattttcatttgttttccacaagctgaatcatgaccctatagccccccactgtacaccaaggtcgtattgattgaattgttaacaaacaaggtaatgtatttccacttgtacttacccttaggttaacttgatgctgttgtaattaaatacttaattaggtgattatttgatttatgtcttctctcccctaaaggtctgaagtcagcagtaataaaaatgaattagtgatgggcaccaccaaattcatgctgagtcaaagaagtaagaattgagtacataatgtataattccatctataagaaacactagaaaacactacgatgttagaaagcagatcagtggttgggaaggggatacaaaggaatcttttcggatgatgagaatgttttatatctcaatggtggtgtaaaaatatatacgtttgtcaaaacttatcaaactacattttaagtgtgtacttttaattttttaattatactctaaattttttttcagtcatttggcctgcatttaaaatgggactctaatttcttagtttaagtgtatttcttcacatttagtgaagttcttaataacaacggtctcatcaggctgttataaagacacacagaatttgattttgtgcctggcccaaagatggctctcaaaggtagcaactacagttttatagctgaagcagggatgcttcctgtctttaccactttgatcccagcgttgagcgcaagccttgttccagagcaggtgttcaacaaatattttaaaatgttgaatgagtcaactccactacttaaatatatctaatgtgagaaagtccttcagtacatgagttcaggccatatgtgtttcagtcactgttttgcacaaactgacccccaagctacagcagataaatatagttttactcctcacaggacttcggttcctgctcccatcacagcttatagaattcctagtgcatcttgaaggaagccttttattgcactcccaggtagttgagatctcttcctatatttattcctatattctgtataaggaattgaatccttattccttgttcatgtattcagtgaacaccaaactattttgtgcctggcacagagctagacattgacgatacaaagccaaataggagacagtgagacaaggcaggggtaaagcaaattgaagcttcaaagtattaatatttgcagtctcaacaaaattgagtcttccaatccatgagcatcgtcaatttctccatttcttcaggacttcttcaatttctctcagcagttttgtagttttcacatgcatgggccttgcatatcttttgacagatttatttctaagcagttgatatttttgatgctattgtaaatggtatcgcttatttaactttaatttccaactgttgctagtatatgcaaatagcattgacatttatatattgaccttgtattctgtgatcatcaattatccaaaaaactctgagaacttggtggtggagactcacgacatgtgcctttgtggaatgcctgccagaatgtccagtaccacctccaccttaggccagctctgtgacagtggaatttgtcc

SEQ ID NO: 315411 - DNA, 4001 bp, Homo sapiens
caacagcaaggtgtgactgatgaagttctgttttaaggaataggaactactgtggtgttaagttctggaaatccagagcatttcagaaaacagcctgcattatttctctcagtaacagactacctaaactgcacttggaagatccagtttaaggggaaagataagtgtgtttagaacttgacatggactcttccccaatgtgccttttcttcaaatctctgggataattgaagcaagtaaacgaaatgtcttctcgttagtaggctccctaccctgaggaccaccttgtgaaaaatatttgaggacaagagaggcgttgcaaggaggaacactggagattaagggatgtgggcagtggtggtgacatcattttctggataaagaatcaaaagacggcgacagaacacgtagagtgggaaaggctatgggtgtagaaaggagacagcaatagacacacatgctagtgcacgcattgcctgtagaagataaatgtttgtattatttgacttaaaaaaagaaacatatgcatgttatctattgaaagctataatgttaaaataatgataagactccatcagtctggtatgccttttttttttctccccaggaaatacacatggaggctggtgctcaggccccgggaactgacaatctaatttgatgccactgaagcaaagttcccaagacagctggtagcttggaccaggaatcctgtgggggcactgacggcccctggggccagagctgactctgtggccctcccctccatattcatacactctgtaaaagctacctgtccccttgttaacacgtggcaagcgagtcctttctgactatatcacaggcagaaacaaggcagaggcacaagaaactaccaacagcaggcgttttggtgcgcgctcccgttcattcgcgtgggcgacccgctgccccttctaggggcactgaacaatccagttctgagccggggaaagccttgatcctgtaatctggtccctactttcccccacgttcacgcccaatgctcccaggctggagctgctccggcgtgtgcccctcgttcggcccggagcccttggcccccagaccccgccacggcccctcccccaccaggggcgctttcctcccgccctccttgggttccccggtcctacctgcgccgcggccagggctccctcgcacagaggcagctccggcccctcggccgtgggtctccacgaggatgagctctggtctgatctcaggactgcgcgcagccccgctccctatgccaaggtcacggtcttggagaggcgcgtctggctcgctgcgctcccggcgcccgccttcgggtccggccacagcagcccccgcagaccctctgggcggccgctgcggccccggccccggccccggagctccgcccctctcctgctccccgcccgcttgccccctcggggtccccaactgccgagcccagctcccctcgtagcccactcgcgggctgccttctaacccctaccccagttagtcccggttccttcaccgtctccttagcccgcagagagcttagctgactcttcagggtcgctgagggcgcgtcttcggttccccgagggccacaggccggctcgggtccccagcagacggcgagccccgcgcttaggtcctctcctgccctctcccgtgccgagccaggggttcccggctctcaaatcctgttcccgctgtcctcttccctgacccctactccttggcgatggaaagaagcttagggcgcttacgacgccaccaacgttctctgtgccgagggtggcacaatttttttttttctgatataaggccagagattcacagtaaaataaatacaaatcgcgtgcccaaactcttactcattctgcaagactcaggtcaagcgttgcctgtgccgcaagacctcggtgctggcaaacagctccctccttccactctcctgcgcgaaagggcgtgcggtccttcctggctgcagccaggtgcctgttgcacttggtctactctacccgactccacagcgcgctgcttggaggcccggacctggccttgcttatccttgtccctagcccctggcacggtgcctgccacccatcacagcactagaatattttatgaataagtggaaaattaatttcttttgtagaaaaccagtttttttgtatgtgtttgtttgtttttggctttttactctcaaataaagcatactcctttgggtgggcaatttgctaggctctataaagaaacaccaaaaatattatcccctttaatgcagtattccacccttgcggaaatttccagaacaaaataatattcgtgcggagattttttttttagcaggatcatttgttacagaaaataattttaaaaaccacaaaaagcaaacagagccaaactgtcaacagtaggaaatttgttgaataaattagggtgacttaatgggacattatacaaccattaaaatgataaacatcaagacagaagtgcttcaaattctttttagaataaggagggagtatgtatttatttataaagcaaaaaaaaaataggaaaacatgaagtaacatgataaaatgtttgcaaaatactgttaagcaaaaagcagaaaattgggtcgtttaccatgtttaagaacttcaaataaaaatgcagatttcttctctgcaaaatggcgataacatctacctcagggggtccttggagtgttaaatgaaatagtcaaggaaagtgccctgtatagaatggatactcaacaaagtttccatttcttttcttcaatggaacacagactcaaatccagcatgtcaaacacatcctcattatggccaagttctgcccatttggcttcctttccctcaaatacagggtaggagaaggagctgagcaaatgctaaagcaccagtgaagggggcaaaatctggttaataggaataaatgtgaagtcctccctcaggccgaaacacccagcaatgtaagtaatggaggatgtggctcagtagtggtgcctatcaaaataccttagattttattttagttggctacaagcacagctttgtgaacacccaaaggctgaacgagttcagttcaaaacccgaatgaggctgcaatcttaggctgaactgatgctcttcactggtcggattacacctgggcataatgtccaaatttgggcactatctttaagaaagtattactctgaagatctattattgcttccattttaaagacgaagaaactgatgcatacagtttcaggtatttagggttgggtggctaggagttggcagagccaagagctgaacctgatcagcttgacttacagtcctggtgcttgatcactttaccagtgtgtcccagtgtgtacatcttccagtagagattggaagcatggtattgggtggtacacagacaatacaattagataacagtggatcacaaggtgaaaaaagatatgccctttttacttcttttgttcctatggattatgtcaaggaaggagtatcatttttgtagtatttgtctttgcacccctctgtaacacttgctaatctcctgttttaacaaagacagaggttgcctctcactcagaacctttgctaggcaacagctcctaagtagaatttaatatcattgttttctcttccatctgttattattccttatgcagttaagttccaattgacatagttttccactgacaaagtgatgtggtttccatttaaggtaaattttcttatatgagaaaaatgagcaacttgaaagaaagatctaaaagaactaataggaccagtgatgtttaaattttggaaatacaagcccatactctattatgaccagtggatagaaggaatgacagaaaggtttcagtccacaatgaatcagggctgcctgggaagatgctgaaggacagccttgggagctcaaacgctgtggctagaagctttaaagttcctgccaaccaggagaatctgggattcttgacagcagggcttc

SEQ ID NO: 315412 - DNA, 4001 bp, Homo sapiens
ctcctccccactctcttccaccaaaaagtcttagaagtggcagcttctaatcagcctgaactttctgacatggttgggatccagttcaaggttatgcaatatgaaaagataaacaaaataaaggaaaaatgtggagactggagtacctattaggtgattttaaacaatggacacagctcctaaagaacctgctaattcagtaaaaaagaaaatttttaactaatttaatttcaaccactctgttttatcatagagacaaaaactggttgatttgctgatttttttttttcacttactatgttttggtctagcatagaagtcttggaacagagctgactgtgctgtattggcaggaagtaactcgcatgtgtggtctcttagaaattatatggagactgttcccaaatgacagggctctgtgcttgaggagtcttctctactcaagggtcttggcctgcttcttccttcctacttcccctccaacttctcctacatcttcccctccccttttgtccaccacaaagctttgtccctcagccccttcattggacacctgggaggcaggtataaagcacccgctctcccaggttcctacagaggaaaaatcctaggcatgccagttagggaatcctggagtggagatgggaaaagcaacagcaaggtgtgactgatgaagttctgttttaaggaataggaactactgtggtgttaagttctggaaatccagagcatttcagaaaacagcctgcattatttctctcagtaacagactacctaaactgcacttggaagatccagtttaaggggaaagataagtgtgtttagaacttgacatggactcttccccaatgtgccttttcttcaaatctctgggataattgaagcaagtaaacgaaatgtcttctcgttagtaggctccctaccctgaggaccaccttgtgaaaaatatttgaggacaagagaggcgttgcaaggaggaacactggagattaagggatgtgggcagtggtggtgacatcattttctggataaagaatcaaaagacggcgacagaacacgtagagtgggaaaggctatgggtgtagaaaggagacagcaatagacacacatgctagtgcacgcattgcctgtagaagataaatgtttgtattatttgacttaaaaaaagaaacatatgcatgttatctattgaaagctataatgttaaaataatgataagactccatcagtctggtatgccttttttttttctccccaggaaatacacatggaggctggtgctcaggccccgggaactgacaatctaatttgatgccactgaagcaaagttcccaagacagctggtagcttggaccaggaatcctgtgggggcactgacggcccctggggccagagctgactctgtggccctcccctccatattcatacactctgtaaaagctacctgtccccttgttaacacgtggcaagcgagtcctttctgactatatcacaggcagaaacaaggcagaggcacaagaaactaccaacagcaggcgttttggtgcgcgctcccgttcattcgcgtgggcgacccgctgccccttctaggggcactgaacaatccagttctgagccggggaaagccttgatcctgtaatctggtccctactttcccccacgttcacgcccaatgctcccaggctggagctgctccggcgtgtgcccctcgttcggcccggagcccttggcccccagaccccgccacggcccctcccccaccaggggcgctttcctcccgccctccttgggttccccggtcctacctgcgccgcggccagggctccctcgcacagaggcagctccggcccctcggccgtgggtctccacgaggatgagctctggtctgatctcaggactgcgcgcagccccgctccctatgccaaggtcacggtcttggagaggcgcgtctggctcgctgcgctcccggcgcccgccttcgggtccggccacagcagcccccgcagaccctctgggcggccgctgcggccccggccccggccccggagctccgcccctctcctgctccccgcccgcttgccccctcggggtccccaactgccgagcccagctcccctcgtagcccactcgcgggctgccttctaacccctaccccagttagtcccggttccttcaccgtctccttagcccgcagagagcttagctgactcttcagggtcgctgagggcgcgtcttcggttccccgagggccacaggccggctcgggtccccagcagacggcgagccccgcgcttaggtcctctcctgccctctcccgtgccgagccaggggttcccggctctcaaatcctgttcccgctgtcctcttccctgacccctactccttggcgatggaaagaagcttagggcgcttacgacgccaccaacgttctctgtgccgagggtggcacaatttttttttttctgatataaggccagagattcacagtaaaataaatacaaatcgcgtgcccaaactcttactcattctgcaagactcaggtcaagcgttgcctgtgccgcaagacctcggtgctggcaaacagctccctccttccactctcctgcgcgaaagggcgtgcggtccttcctggctgcagccaggtgcctgttgcacttggtctactctacccgactccacagcgcgctgcttggaggcccggacctggccttgcttatccttgtccctagcccctggcacggtgcctgccacccatcacagcactagaatattttatgaataagtggaaaattaatttcttttgtagaaaaccagtttttttgtatgtgtttgtttgtttttggctttttactctcaaataaagcatactcctttgggtgggcaatttgctaggctctataaagaaacaccaaaaatattatcccctttaatgcagtattccacccttgcggaaatttccagaacaaaataatattcgtgcggagattttttttttagcaggatcatttgttacagaaaataattttaaaaaccacaaaaagcaaacagagccaaactgtcaacagtaggaaatttgttgaataaattagggtgacttaatgggacattatacaaccattaaaatgataaacatcaagacagaagtgcttcaaattctttttagaataaggagggagtatgtatttatttataaagcaaaaaaaaaataggaaaacatgaagtaacatgataaaatgtttgcaaaatactgttaagcaaaaagcagaaaattgggtcgtttaccatgtttaagaacttcaaataaaaatgcagatttcttctctgcaaaatggcgataacatctacctcagggggtccttggagtgttaaatgaaatagtcaaggaaagtgccctgtatagaatggatactcaacaaagtttccatttcttttcttcaatggaacacagactcaaatccagcatgtcaaacacatcctcattatggccaagttctgcccatttggcttcctttccctcaaatacagggtaggagaaggagctgagcaaatgctaaagcaccagtgaagggggcaaaatctggttaataggaataaatgtgaagtcctccctcaggccgaaacacccagcaatgtaagtaatggaggatgtggctcagtagtggtgcctatcaaaataccttagattttattttagttggctacaagcacagctttgtgaacacccaaaggctgaacgagttcagttcaaaacccgaatgaggctgcaatcttaggctgaactgatgctcttcactggtcggattacacctgggcataatgtccaaatttgggcactatctttaagaaagtattactctgaagatctattattgcttccattttaaagacgaagaaactgatgcatacagtttcaggtatttagggttgggtggctaggagttggcagagccaagagctgaacctgatcagcttgacttacagtcctggtgcttgatcacttt

SEQ ID NO: 315413 - DNA, 4001 bp, Homo sapiens
gagaagagaggacaggcacttctggcaatggcacaggaatgtactctggtgggtgggctggcaggtgggagccaaccaggcagaagaagcaggttggggccagattgtgttgggtttggacagccacgtggagaggctaggcttctccagcatgggaggtgccccactgaaagaccgcaatacaggcctgtctgatccagtggccaggagctttgagcgcttgaaatgtggctagtgaaactgaagaattctagattttgtttaactttaattaaaatgtaaaccccgatttcattattgaaaaatttttgcagaatgtttgaaacagtacaggcatgcgaatcgattttcacatgtacattttatgaaatctaaatgcagaacaagcatttcggatgaaaatgtggggtctgaactgaaatatactgtgggtataggaagcacactggatttcaaacttgaagactgtacaatagctcattgataattgttttatattgcttacatgttgaaataatactattttagatatatagggttaagtaagaaatatcaggaacattaatttcacctgtttgctttcgcattttaaaatgtggctgctagaaaattttaaattccttgtggtaacagtatccctattggacagcactggcctgagattccaatgctttcagtaggatctgagaggcctcagacactggcctcttaacagcccctccagtgactcagatgctggtggctggggacccttcttggaggaattctgctttagaaaggtacctctgagccagttgtggagtcttgcacctgtaatcccagcactttgggaggcaggaggatcacttgagcccaagagtttgataccagcttggtcaacataatgaaacccagtctctactaaaaatacaaaaattagctgggcatggtggcactcgcctgtggtcccagctaatcaggaggtggaggagggagaatcacttgagcctgggaggttgaggctgcagtgaggcgtgagtgtgcgactgcactccagccttggggacagagagagactgtctcaaaaagaaaaaagaaagatccctctgggtactggctggaagttggattgaaggtgtgggcctggaggcagcagggccgctagtgtcaccaggaggcgagggaagaggcccaacttcagacgctgagagactccctgagggctagacaaccccgagctttctcttcgagggtcccgggtgccgtctgccctgtcctggccactagacctggggtgagggggtagctaggggagggctgggcatggccctcggccttggggacagatattgggcagtgctctgggggagtgagtgtacctcgaggggctgccggccctgctggaagctgccctctggggattaaccctgcacccactggagagaccgcagaaatgccccttggcacagaaaggagcccaacttggccgcccgttcctgttcctcccagggtgagagccaggagtgagtggcaggagcgtcacagtagtaaggagggattttctttgtgactcgctcctcctgccctgattagcacttaggtcatggagatgaggctaattttttgctcttgattttgctaaagatccttcggtgatttagaagcctttttttgggggtggggtggggttgggggggtgatacagagacaacagagcaacaagtctcttttcagggaaactgtgtctgcagcagataccctcccctgccaagcgcccacgtctcgcaaacctgacactctccgcccgccgaggcaggcctgcagagcctaccttgactatgtcctcgttaatgttcttggggtctcggttcaccaggtcaatctccttgcagtggatatccttgacgatctgggcctcgagatctgtgtgctcttctgccatcatcgcagagctggggggatccacaggaggagatccgagctgtgtggccggctggggctgaaaatacttggggcagagagaccaattcagtgtccccagacttatgtccctgccagctaaataggccccacccagcatgccggctgacagctgtcccacataacttcagcctgcctctctctaaagcctcctgtggcaggcctccaagctaaaattaagactggagctcttctggaaggccgatcgctccttaaagggggctgcctcagggcactgggcctcaggagagggtgcagagggcctagcgtttcctatgcatcgtgtggctgtggccaactcggcggtcgctccggggcccctggaatttgccccactgctgtcagcattttggctcctttggggtgcactgcccgtggagggaagtggggttagtccctcctctgcctctggctggctgtgtgacctttggcacacttcacctctctaggccactctgtccccatctgtaaaatggagagatgataataacaatcagggctctcctacccagggaatggcttcaggagctggaatgcgatgtagtggggcttctcgttggattgccagtgcctggccctgctgcttggtgacctggagcaggtccgagctttgtgggtttctgaggtttccacctggagcaggagttgatggactgtggtgtggggccaggctggggatgaaacagggagaggaagctgctgtggggctgcccctcgtctgccgtctggagcctgcactgggatatgcccggtggggggaacatgaagtccatgttcgtgctacccttcaccctgccctagtgacagcttccaggattttcttgggtcccagacactccacatgcatcagtggggtgcacctctcttagatacctgctcggtttttctgtgccctcttctaactcagccttcccctgggctccagcagcatgaaggatggcaactctgaatcctcaggggtcagggtctgtgcttccatttacctgtctattcactccttcattcaggatttgctaatagctggggataaacagaccaacaaggctctgtccgccttgaagtgctcccagtcaaggtggggagactaattaaaacaataagtgattataatactgtgcggtaagtgccacagatcagagatattttacaaagagctggtcttagaagtccataggagtcagtaacttactctgaggacaccggggaagacttcctgtgggaggtggctttgcagataggtatcgaatgacaagcaggagctcagcacctagaacacttcaagttacaggattgtggatattgaggagtggtatagacaggaatgttgaaaagtgtggagtggctggagcacagggtgtctggggttgaggcaggagatacagctcagctcaggcctgggtgtgcagcatcccaaatgtcatactaaagaatgtggattttgtctaggggtgctggaaagccattgaaggcttcaaagcaggacagggtcggtatcagatttgtgtgtgaggaagctccctggtggccaggtggagggtggattggagctgggtgaagtttgaggtaggagggggaaaaccagaggtgatttaggctttatcaataattacacctggctagtaacacaaaggatgcaaaagtaatagtgacttgaataaggtaggaactttttttctcacttaacacaagtagttcagaaatattatagtggctccatgatgtcttcagacatctggactcccatccttctgttctgctagcccgaaagccacctcataggcacaagatgtctactgctcctccaatcatcatctctgagtctggataagaagaaagaggaaggggcagggacaagaaacgacatctgcgaactgagtcggctctgttataaagctttgttagaagtccaacccaactacttctgtttatatctcattggtcactcctgtcttggcaaacgatgatggaactgtaggttttttagcttgagcacattttcggcacccccacagtgttactagggataaatggtgggcaaccag

SEQ ID NO: 315414 - DNA, 4001 bp, Homo sapiens
ttaaataacctgctggtactcttttgttatctaagagcaacacaacctcacagaagacagaacaaacacttccaagcattctatggccatacaccaacaaaaagcagccaatggtaaaactttacatactgagtcatgtagaggaactctgaaccttaaagagtagaaaggatgaaaggttaaaaaacaaaaaagtctttgaatccaacttttcaaaaaacacagagttgaagaaaaatgatgaattgaaatcaaaagattgttgccataacaatggttggtattaattaacagtataaataaatctggagaaaccacagacaaagtgaatagtgtttcgcacaggcaacgtcagacagaacttaccactttgtccatgagcttccaagtcttctccacggtcctgcgatctgcggcagcttgcttagggggtccaactgcatcctgaatagcatcaataatacccaaaattcgaccttttcggggatttcctcctcgaccaccagggtttctgccattcattgagtttgccatctggaattttagttctttaaaaggcagatttaaaaaaagaaaagttagttggttttgaaaatatttacccaccagaaaactagagactaacttgtaccactgcatcttcctccatcgattagagcaaaaccaaaagttccggattcatctttatcaataagcttgtgaatttacactctcaatctttacacacagtagttttaagagcagtgatcctagatttgcttttacaatactaagagttaaagatgcatcctgctcacgtttcaagtagctaaggctgaactaatactcaactcataaaaaaaaaaaaaagaacaaacaaaacttaaacaggtttcccccacctagataaaaacagaatgttcttcccctcctgccttaattccaattcaaaataccagaacaactgaaggtcctatcatacattttgggagccttacgcagaaacttcactttcactctgttagatttctccaagttacataaacataaagattatcctacacaaacgtaagggacagctctgttgtcaacaaaagcgcagggcatgtcccacactaaaaccaccaagtacggacacacgaacacctttctttaaatcaacgcggtgagtcgttattcccaagaaccaaatgaaattaacacacaaatagcccatttgaaaagagaaaagagaaaaatgacaagagcggccacggaaaggaggagttcacttctctggctcctcgcctctgccctcaacccaaagctttgtttcaggacgcctgtgtcccttccctgctcaggccccttcccggcccctcgggtctgagctgcaggaggaaggtggactgggaggggacaaagtgtccctcccgtgcccgcagcaccgtccgtctagggcgcgggagggacactgtgggctcggcgcctgggtggacgcgcctcccggccgcctgctgcagtcctcaccgccgtctgcctggacgccctctccctcctccccggcctgcgggttctggtctttaaatgccccacttcaaactggacggcggcggcaaaggcagctgagagccagggctgtcccctcttcctccttggcccgcgcctggctaccccgggcccccgggccggcaagaagtgtggagcctccccggcgaccccttcccttcttgcctttcggcgccgtagctgtccagagacacgcgtgtgcgcgggtcccactccacacgcacgcagcccagtgtgtgtggggagccccggctgggagtgggatcgctgagaacagctcgctcccgaagaaggagcaacccagcgcgcaggcctccgagacgtggaaacgcaacaattaccgtcaagacaaatccacacccgctctcccctcccgcccgactcggggaggccgcgggacgccgcagcagcactagcaggaggaggagaccgctcgctggacaccccacccctgtggcacacacaggacccaggctcggggcggggcggggcgggggcggggccgggcgccgctgagccaatgccgcgcaaccgcgcactgcccgacagcgggtgcagccaatggacgggaggcgcccgtcctcctcgcgctgccgccccgtccacgtcctccacagtacacaatggccccagaggaaggcccgctcgcagcacgtcagaaaggaattggactcggagagaaatgaggggcctggactctcccgggaacgaaagtggaaacgggaaaggaaatggacgaagggatgcaaggcacgaaggagctaaccaataaggggtggcaggtgggcgtgagcgtcgggaccgggagccaaagccatctggggctgaaaggcgggacttcctgcttcgcttaccttcctagtcttttgtttcatagcaacagagtagtggctggaagggtgttgcttctccgctctgggcgggtccaacgctggagaaattcatctccctagggctgccaaacccttctacccaggacagcagccaaacaggtctatgacgttgcttcttgttggctatcaaaaagagcaacagccactgagcttctaaaatgcagaataaatctcacagagagtaggctggggtgacatctgaatgccaactgaaacttcccaagtttccgagtttctcttttgctgttagttttagagggattgcagaccaaacatcaggctgatgaaaaagcaaatagttgacaacgctggccaaacagtctctgctaatcatgccaaagcaataaaagtaccagataatgggaattgctgataaataccttgcacctttttacttagtgcaagtttctgcctaaatgactgaggaggagacagctactgtgttttgtcggagtcacctttacatagatttctatccatttaaaaacaaccttactgtagctgccattctctaccagcattgttacctctttctgtggctcccttctttgtgctcttaaaaaggccgacatctggctagtctttaaaggagaaagctactgtgctgggacttgtctttcagcaatatcataggttaaacaaatgccttccatttatttcagtttacttcaatcccaccactcatgctaccaacaattgctctggacttcatactttggaactttctttccactacagttgatagcgtttattacacttttcagcttggacatctcagatgttctgatattttacattgggttttttgtttttgattttgttttttcaaatcttgctctaaccacgtaacctgataaaatgtttctcaatggttctaaccactttctagcaactaagaattttaatactgtaattattactatgaaggatcctgagttttcctttacagccttgaatttacatggttaagattttaatttgacgaaaacagaaaaaaaatgtgcctttgcaaccagtcaggtgataaagtgtgattcaggaagtaattttgtttccttgtcattatttctgtgccagtaattaaagagtagttccttgttttcacattgcatttatctacaaaagtgctggcctctccatatctcctccacccatccatatctcttttactcatagtcgtagtagctacatttactaaggggagactgtaaaagaaaaaaactgtgttacctttaaaataaattttaaaagaattaatgtgtagaagcatgtagcaaaacagtggcttaagggaacattataactaagtatattacttatattcatatctggataaatgtaaaatacccaaaatacatgttatagcatgtgccattccttttatatggtgttttgcaactgaaagagatgagttaatgagaaaatggcattgcctatggtatcaagcatatcatgttgatataaattacaagttttgaggtgtatggtttgacgtattttgaaatatatgtatgtgagatacggtagcatcccttaccacttatttgccatctcactttccttggttctagttacctgtgg

SEQ ID NO: 315415 - DNA, 4001 bp, Homo sapiens
ttaacattcttttacttcacacactgaaggacacagttttcacccatctaaaactacggccctcattggtctgtctctgtagccctttcacacagattatcccattagatctcacaataacccaatgagaatgaatgtgtacggactgtcattccccactggagacatgaagaaacccagctcagagagatgaagcaatgtgtcccaagtccaggtaaaaaagcaaactagggtttgcacacaggtagtgaacttcagaattcttcttcctctccattacgttggaaagatgaacaaagtagaaatggaacttttcatttgctgttaaacgacagcaaagaaaaatgcttccgaatatggcaattaataggctagtaggcccatccccaaagaaagaactaaggccctcttcttttttcccaattttttttttttttgagaccagtctcactctgtaacctaggctggagtgcagtggcgcgatctcggctcactgcaacctttgcctcccagttcaagaaatcctcctgcctcagcctcccgagtaactgggattacaggtgcctgccaccacacctggctaatttttgtattttcagtagaaatggggtttcaccatgttgatcaggctgatctcgaactcctgacccatctgcccgcctgggcctcccaaagtgcgggattacaggcaccagccattgtgcccggccctcgttcccaatttctaaggcccacccttagttagaaataaatcttttcttttttttttttttttttttttgagacggagtctcgctctgtcgcccaggctggagtgcagtggcaggatctcggctcactgcaagctccgcctcctgggttgacgccattctcctgcctcagcttcccaagtagctgggaccacaggcacccgccaccacgcccggctaatttttttgtatttttagtagagacagagtttcaccgtgttagccaggatggtctcgatctcctaacctcgtgatccgcccacctcggcctcccaaagtactgggcgcgtgagccaccgcgcccggctaaatcttttattttcgattttttttttttttttttttttgagacggagtctcgctctgttgcccaggctggagtacagtggcgagatctcggctcactacaacctctgcctcccaggctcaagcggttctcctgccatagcctcccgagaagctgggattacaggcgcgcaccaccacgcccggctaatttttgtatttttagtagaggcggggtttcaccatgttacccagcctggtctcgaactactaacctcaagtgatccgcctgcctcggcctcccaaagcactgggattacaggcgtgagccaccgtgcccggcctctttttgatttttgcacgaaacgactccggctgtatacccactgctgtcacttgctgccctgtccaaggagtgctgccggactggggagtctgtctgactcagaatcgaaggcgggggttaaagaccagctaggccatagaggaacggaacaaatcacgcctaacccaacaagcatctgaacctacaggcagccctagatacctacacgagcaacacccgggaagcaggagtcagatggactgcgggtcgctgaccactgccttgcccacccccgcgcatgcgcgacgaccgcaccagcgccagaggagtcccacgccaagcagccccagacatcgtgggagggcgccgtcttctcgcgcatgcgttagcgcccgcgcatgcgcgccctcggcagctgtctttccttattagccctttgctctcctcaagcgcgacccggaccccgaacgctggacgcctcaactgcgaccctcactccacacttctcaccttgcgcccggttttctcccgtagggccttcagccgttcctttcgccgcaacgcctcttcctctagccggcccacaccagccgtagttgcctccatcttgcccgcgtacgcccctccttttctcccgtcttgcatcgcgcaggcctaaggagagtggataaatgtctcgcggccaatccaaggacgagaatgagagactgggaggtcctgaaagccaatcaatgcggggttattatgggcgagccctccccgccttgccccgccccgccccgccccgcccttattcttccggacaacttgcctagtgggtggggagccagcaaaaaaaaaaaagaaaaaaaaaaaagctaaggctcgatttatccaacgctgatcagtgaaagagcagcaagtggaattcagacctgagagaaggagaaaagagtgcgtcgatcgctccggttttgcccaagtactaaccacactaatcactccatgctggcctcttggaatgccctgactcatccttgtccacttgacctgacaaggctcgaatgccttcaagaaaccttccctgggccgggcgcggtggctcacgcctgtaatcccagcactttgggaggccgaggagggcggaccacgaggtcaggagatggagaccatcctggccaacatggtgaaactccatctctactaaaaatacaaaaattaactgggcgtggtggcgcgtgcctgtaatcccagctactcgggaggctgaggcaggagaatcgcttgaaccagagaggcggaggttgcagtgagccgagatcgtgccactgcactccagcctggcagcagagcaagactccgtctcaaaaaaaaaaaaaaaaaaaaaaaagccttccctgatcctccacttcgatcccaccctaatacaaggtatgacttacacctctgcagctgtcagtggctccccggactcacctgacaagcgcccctaagcccctctgtgaccactctcagctcagacaaagcctgcacagtgagggggacctgactgtatggctgtttccctctggactcaaagatgatcccctctcattcccatcccctcctggagcagcaaagtcctcagggtcaagttacctttcccggggaagagcaaaccccaacctgggtccagtgggcctcaagtactgcccccaatccccagcttagaaagacttggggtggcctcgactgcaagtcgccacaagattcatggctacccagcagaagctgccagagtcttctttcctgcatgaactagagtgtcctgataaccgcgagaccacttaggctgaagtcaagatattctttcagtatgtgggggtccccaaagccacaccccctctcacttgggaataggagaccatgccgccccctctccacctccactgccaggggacaactagcctcttaggctgttccctccctgagtcttcccttcccaagctggctacaggtggacatccactcttccccttccaactcccttcagaggcccatgggccacagactgcagatctagccctcccttcactaaccctcttgtcctcactaacctgggtctgtctaagccttcttccctgtagtggatgggttgctctgccaaggcctggcatgcagtttggaggtgctcaggaaacctcagctcagagctatgatggatgaagcaggacaaaaggccagaggtgaaccaagaagctgggagaacaaaacaggacagggtctctgttgtcttggccaaccaaggtctaggagtctccagactggtcaactcctggaacgagtagcacccctctgggcccagaaaacttctccccagccccaacaaagagcctgatccctgcccaacaccaggggttgggtccctgccaccatcaccccgtgcccctttccccgtgtccagactgtgaggtaaggggatggggaagggggcacggggtgatggtggcagggacccaaaaaagagtcagtcaagcctgggtccctgcccctgctgcccaagtggtcctcatttggtcaacttgggcctcagtttctccatctgtaaaacagagccggccgggtgcggtggctcatgcctataatcccagcactttgggaggtcgaggcgggtggatcatgaa

SEQ ID NO: 315416 - DNA, 4001 bp, Homo sapiens
cgcgtagccgcgcgcgcgggcgcgcgcgcgcagggcatgctccggctccgcacacacgtgtgtgcccccagcccgccgggtgcctctggcacttatgccttggggacagagctcgcggtcgtgcacttcatagcaacccacccccgcgagcaggaccgtgcagcctgagtctttcttgctagaggagagtggcctgggccgaggcggccggacacttggcctttttacaaatggggaaactgagacctggagagacctggagactggccaggaggctagggggagggggactcaatttgtctatgagctgcctctcccttgggcgcggcctgattgggtggtcgtggccaacgggtctgggggtgtgggccaaggtagggaggtgtgtggaaggggaatgctcccacttcaggtccttcttgagttgcatccccccacaccccagcgaacaggctgtgataagctcttccctgacttgaaatgacccaccccaccccacccccattctgaggggtagacccaggacctctctaggagcagaagaaaaggttttcctctggatgcccagggtgagggtgggtccttgaggccctgagggatgtctgaaaaggttggagggaggcccgttcctcctgagctccccacccatctcagaaaatacttcaggtggagtcagaaggtgaggggagtgactcagacgtgggtgtcccatcagctgagaacctggtatcactcacaccgtctcacacacatagtcccccattttccttctgtacccacagcagggagggatcccagggtaacactcccctccccttcacccagcacctccctccctgcacctgcctggcatcatgctcctggctcaggtgtgccctgggcacaatggaccattgtgtgccctgaacagtttgtcagtggggggaattcatgctcagacacgctggccctccataaggaggctggcccactgtcttccacggacctggagtccaggccagaaggaccacagcctcttcagtccgctcaggttgtgagaggtccaggccccagcaggaggccaggcatggagtagagtccctctttggtataactcagatcgaactcgacttctgagcctctgcttcctgcctgtaaaactgacacagccctggccgggcacggtggctcacacctgtaatcccagcactttgggaggccgaggcgggcagatcacaaggtcaggagatcgagaccatcctggccaacatggtgaaaccccatctctactaaaatacaaaaattagccgggcgtggtggggtgtgcctgtaatcccagctactcgggaggctgaggcaggagaatcgcttgaaccagggaggcagaggttgcagtgagccgagatcgcgccactgcactccagcctggtgacagagtgagactccgtctcaaaaaaataaaataaaaataaaaaactgacacagccctgacctcaggggcttcctggactctgtggagaggtagccattatagctggtccagaccagagaaggctcctgttttcctggccccattgggtcccctcgccccagcttctctgcctgcatccccagtggttgtgaaggagcagagggtttgaagagaagcctaccctagtcctccttcctcggactgccccatagctatgggcaggctctaggtgcatgggcaggtaaagggggcttaaaccagctggtgagtgtgagggatgttaatgataggtcttcagcctgggtggcaggctgctgggagtgtcttggtatctcccaggacagtaactccagcatggttgcctcctgatgccccatctagctgagctctgtacatggccaccccccatcccctcaggaggtggttatggctcatatctgtgctgagcctccccctcccggagctcctcacctcgcagggcaggtatggagcataggctggcaggttgtagctttggaagcctgagcagacagtgggcagcctggggccaggcaaacaaatccaggatgtaacagcaaacccccaagccaggcggggccaggctgcctgggaagaggaagctagggccagcctcccagctcgccttcctgcccgcctgctcctgaccctgatcctggaacccccaatccagggaggagtaggctatgcaactttgagtcctgttagggacctattgtgtgtgtgcttggggagggggagtgcaaggtaaggggcagagctgaaagtgggtgtttagagaccctttagttggccagccacccagccagcaacacctgcacccctcccttcagcagtgagagctgacatcagctggcaaacctgtttccccagttgtgggtctgggtggggatggagaggggggagtaactccttcctgcccttcctcttccttaaagaccccaggtttagacccacccaccccctccccctgggggcccggctcaactgggggcctcatagtgagggagggggctgtgggtggctgctgagggaagagggaagggtcagagcatcccaggacttcactcagttggagctccttagggccctggtggggaaaccaaggcagggtcctactacgattgtcagacctcacatgcagtaggtgctccttgggtattagctgaatgactggatagaggaggtgggtcccatggcagtgaccagtcaggaagtcaccccagaggaggctgagtttgggctttgaaggctgagaggaagaaacagcaggagcagtgggacaagaagcaaattgtcaggagttggggcagggcagagctagtcaagcaggcctggtggacaggtgggggctcatctagaggactcagagcccaccagagctcccccagggtaggcataggaagggcaggagagtcttgggggactggggacagcacctgacaggctggcggttgggcagcccataaaagttaatgccacatagcatgcagatgagtggcccctgttcaggccggagcagcagtgatgttcagcaacccctccagtgaatggggtcacagagtgagggggcactgaatgtggaagggcactcagggtcacaaagttcagggcagaacaaaccctcaggtgacaggagggagcagaagctgacctgtccagctatgccactgaggcctcagaagggttcagggaggttaggtcaggctggaggcaacctcgtcctgcctacacttccctgagagttccctctccctaactgatgatctctactgcctctcagaaacctggtcaggccctccactcccccggtactttacctggtcatattcctttttttttttttttttagacagagtctcactctgtcacccaggctggagtgcaatggcatggtctcagttcactgcaacctctgcctcccgggttcaagcagttctcctacctcagcctcccgagtagctcagactacaggcgtgtgccaccacacccggctaatttttgtatttttagtagagacggggtttcactatgttggctaggctgctctcaaactcctgaccttgtgatctgcccgcctcagcctcccaaagtgctgggattacaagcgtgagccaccgcacctggctttatctggtcatatcctttttgggcttcagtttaccttcctgaaatgggtaaagggaaggtggagtcacttctttggtgcttggtcccctgcctctattaccaaggcacctgaaggagaagggcctgtagtgatagggagatgagcacacagcccaggcttgggtgggcactggtgattcctggagttgttatgacaactggggagctgatggggaagtgtggggtccccgtagaaacagggtcagttaccatggggtctatggggaccctagaaggaaattcccattttccttagtgatagtaaaagggattggtcagctcttgagccgcttgcttgaacctacttccattctgtggagtgtactttcatttcaataaatctatgctttccttgcttaaaaaa

SEQ ID NO: 315417 - DNA, 4001 bp, Homo sapiens
ggcaaaattacagagaagtaaaagataccagtgattgtaaatcccttctaaatgaaaaatatcagtggtttccaggggttggtgggaaggaacaatgaacagtaaagcctagggggtttttggggaggtgaaactgttctgtatactttactggtggatacacagcattacacatttagcaaaacttgtagacctgtgcaaccttaagcaatgaacactggccaggtgtgatgactcacacctgtaatctcaacactctacgaagccaaggtgggaggaccacttgaggccaggagtttgagaccagcttgggcaacatagcaagaccatagctttacaaaaaataaaaaaattagctgggcatggtggcatgtgcctgtgttcccagttactcaggaggctgaggtgggaggattgcttgagcccaggggttggaggctactgtgagccatgatcatgccaccgcactccagcctgggtgacaaagtgagaccctgtctcaatacagcagcagcaacaacaacaacagatgaactctaatgtaaactatggactttagttagtaataacataccagtatagttgtatcaatgataacaaatgtaccacaccaatgcaatgtgtaagatgttaacaacagaggaaatgggaatacggaatacataaaggaactgttttttgtttaatgcttctaaaaatctgctttaagtctattttcttttaaaagtaaaggctaagccgggcgtggtggctcatgcgtgtaatcccaaaactttgggaggctgaggtgggtggatcacctgaggtcaggagtttgagaccagcctggccaacatggtgaaaccccatctctactaaaaataccaaaattagccaggcatggtggcgggcgcctgtaatcccagctactcgagcccaaggcaggagaatcgcttgaacctgggaggcagaggttgcaatgagccaagatcgcgctactgcactccagcctgggcgatagagcgagactccgtcaaaaaaaaaaaaaaaaaaaaaaagtaataataaaaaaaataaagtaaaggctagagctgcatggaaagaactcttggctcaggtaggacttagagccagggagtaggaagagtggcatgcactctggagtcctatgaggaagcaagatcccacaggatatgggaccataggtgacagggaccagtgaggaaggattgagaccccttgccccatcggcctgccacttttttcattgtttttctcttcccctctccttctctttcttcttttcttttactgtgttcttttcgagtattctcaacaacagtctaggggcctggaggtgtggggaggccgcccacggatgcctagtttggcgctctgtgcactgctagcatcttcgtagggatgggtttgggatgggagcggggtgatgctctggttctcagggctggactccgggcttggaggggaactccctcttgcgagtccccagtcctgtgggggctgggcctggaaggggaactgggagatgcggaagtgcacgccgtcgggtcgcatctttcagtgcggtgcgagagggcccagtggcagaggcccagcaaacagcgcttgtcaggcggacctgagttcgagttctgactgtgccatctacgctatgactttggggcaggcgacccaccctctgcgcctcattaacccatgtactgcatggaaaataagcgtctgcctgggttagaagagggctgtgtgtgaagattcaaaggacgaaggggaagagtcctcgctgggcgcccagcacgcggtgagcgcccggccagtggcagcgcgctcgggctggggttgcgctcgggctcggttccgcgcccccggcagctgcgggctttcccagctccggcccgggcccttccgctctccccggcacttacagcggtctctctccacttctcccttctaggaccgcggcggctaggtcacctcctccggacgccgacacgcgctgccctggcaaccgtcaccagggaaacaagcgacgtcacttgcgcgttttcaacgctactctacgggggccgagggggcgccaagagttctgaaagtgacagaggcgctgatggcgcgctgggctggatccaagcgagcacgatctcgagtgcgctggagattttaaatcttctggagtatatttttaaaaaagttttgtggaccaaacgttctgcacagagatgcccattccgctctcctgttggggagttaaaaagcgaacgatctcaccatgaaatttaaagtagccattcagatatatttgaaaaatgtaaaacagtgtggggaaaggccatgttatgatggtgagtgaaggaagcaggacgcaatatagcaatgctaaataaataaagttgtgtttatttcaaactaggcactaaaacaagaccgaaatagaaatattaaaagtggttatatttgggtggtggaatagcagtgctgtgtttttatttttacactttagagaatttttaaaataatgaacatcgtttattttcataaaggaaaatacttgtttttttttttttaaatggcaccttccaatgtaagacactactatatttcagggcaatatgggggtgggaggcaaatttctaggaaagatgattcaagggagatttctttctatctatctatctatctaatctatctatctatctatgatagagtctcgctgtgtcgcccaggctggagtgcagtggtgcgatctcagctcattgcaacctccatttcccaggttcaagcgattctcctgcctcagcctcctgagtagctgggattacaggcacccgccaccacacctggctaatttttttatttttagtggagacggggtttcaccatgttgaccaggctggtcttgaactcctgacctcaggtgatccgcccaccttggcctcctaaagtgccgggattacaggcgtgagccacagctcctgcccaaatatttatccaggacttcataatttgaaaaccttggcagttgtttttctattttttttcctcataaggtgaatgaatacccatcccatagacatgcatacataagatacggcactagactgccatcagcactgcaggtataaacccgaagtttcctgataaaggaaaaatggatctttcccgttggtctccaattgctgcctggtgagctgagggtgggagacgtataatatacaggtggcagcaaagagagacaggataaagagtaggattcaggtagatgtgagcctcaaaggattagggttttttttaaatggtgtgtgtagtggggagtatcattcgtttgcctcatgaccacgatgggactatgtggcataggaaaaggaatagccaggtctacttagagggcttctggaaagcatggatcctagcagaaagccaggttttcattaaaataagaacatgctgtgagaaaattaaggatgcaagagaatttcagaaccgacattctagaatgtatgtattagaaagtttgggaaaggggtaacatttgctccagcaatccaaggattatttttgacgaggatatcatttttgcagtaacccattttttaaaaagcagggatgattttcctctaggtttgttacttttccacggtcaccactaaggctctcatgccattttttttttctgcccaaaattcttttgagaattttctttagtttataagcttgacattttatcatccaagaagctggcgaatccaatctgggtcaccagtatttcctcatgtacagtatacagatgtttgttaattccagcccactttgtttctctagccagaagtatctgtaggacactgccctttgttttttgctttttaatttgaaattatattgagatttttatagaatcacatgcagttgtaaaaaataatagagatcccctgtatacttttccagttctccacaatgatattttgcagaactttagtataatattacaaccaggatattgacatcga

SEQ ID NO: 315418 - DNA, 4001 bp, Homo sapiens
ctggccatctgtacattttctttggagaaatgtctattcaaatccttttttcgttttttaaccaggttatgtgttgttctgcttttgagttatagaaattccttatatgtattttggatattatttatcagatacatggcttggaaatattttctcccattctgtagattgccttttcactccattaatcatttcctgtgctgtgcagaagctttttagtttgatgtgtccatgctcttcttatattacccctgctcagccctggagttggtcatttctccaagaagccatgactccttagtggacagtggtacgtggaaaccaagatctaggtactagatgtgttctttgctattggggcctccaatcttttttcatatgcattttttacttagtcataatacctagatatttgcaattttaaatcctgtgttttctacttttaaatctttttcatattcataaatttttaatggttgtataatatttccttcagtggaagtaatataataatggtcttggtttgcttcatatttttcacaattaaaaaaacaaacctggaataagcctttctatctactgaaaacagcctttttatatttaggattaaaaagaaaattatttggtgaaaggttattagcaatttaataacccttgatacaaactgcaaagctgctctccaaaaggagtgtcctaatcacaatacaggagaatcagtttgctttattttacacttacttctacgaggttattatcattaaacttttaattttgctatttgagaatcatataagcatttcttagtagtcatatctcctaccaacaagtacaagataatactgcctttgtagaatgacttacagtgtgctaaggtctttcattttcacttaatccataccctgtgagttattatttgtgaggtgggaacctaaatttcagaaaagtggtttgttcaaagtcatacatctactaggtaaaatgtttaaaagaagaatggactctggcatcagttttgtgagtctgaatcttgtttccacagctgtgtaactgccaagttatttgaatcctccagccctcgatttcctcatatataaaatagggataatagtacttacctcataaggatatcgtgactattaaatgagttattctatgtaatacataaaagcacttacagtagcatctgccacataagtcctatctaaatgttggctgctgttatcattaagatggtggcaaactacgtgttttaaagggaactaaattttgttgtatgtctacaacaactgtgtgatcgatgtttttaccgggttctcttatttaaccttctcaattctttgagacaggattttatgcttatttctgcctattttgcagctaaggaataggaagttctgagcagtaaaaagtagtagactctcaatctgcaggtgactgaagctaggagaggttaagtcactcgacgcagcggcgaaggctgggactcgaacccgggcctgaccccaaagccggcgctctagactagggctacgacgatttaaacagaaacatctagagaccgagcggccgtgttacgacgggaagattaggtgttccctgcacctctgtcccagcactttaatgtcgccgcattgtctttgtcttttttcgagcagagttttacaagttcctggcccgaaaacccccctgtccctctccatccccacagcggactcctcaggtcctcagccctcacctggcccggtcgagctccagacctgaccatctctcgccgcctcagagaagcccagaccgagggaagtgaagcctcacggtaaaaagaattaaccgccgtgggctcccggaccttcttggcccgcccgccgagcttccgcttccggaaaggatcccgccgaatgccgcgcttcatagtctccgacgcgcctccactccctttctcctgctccaggcccagcgccttgggcgtacgcaatagacccctccaagcttcccggcttgtcacccaccggcaggggttgggagaagccaataaacggcgaacggggcggggccaaggcatggctggggcggggccggggcggagccgccgagaaaagagttaagcggaggttccaggacttgcggtggggaaaacggggacgaggacccgccagcgccagaggatgggacaggggtaggaggcgaataggtttcagaaggaattgagcgcgactttttgggttttcgctctttatttttagtttggcatcgtgtgccttttggaagattttgttcttgatattctataaaaataagacctcggggttgttacctttgcgtgtgatggaaattgcagaattattccctgtggccactgatctcagaacggtgttcattagttgggattttgggtttacttccatgcgtacttgtctcctcttatgttgaggtaattacttttgatgaaaaatgacacaacattcttagtattggcatgtgcactcattttaatgaggattttagtcattggtttttaaggcattgagttttgggttaatgatttaaatcaagttgaagagagataactcagtttattccatttcaactgtcacccaggcaggagtgcagtggcgcaatctcagctcactgcaacctctgcctcctgggttccagcgattctcctgcctcagcctcctgaagagctgggattacaggtgcgtgccaccacacgcggctaatttttgtatttttagtagagacagggtttcaccctgttggccaggctggtctcacactcctgacctcaggtgatccgcccgccttggcctccaaagtgctggaattacagtggtgagccaccatgcccggcctcatttctttttaatggagaaaagagctacgctttaaaagtctgttacaattaatgtcaaagcccaggaactaaaatatgtccaccaaaatatcacacacttatcctgagtgattttaggaaatgagtatttcacagatttagttttgaattagatcaaactgtgaaaacctctcctttccttccccagccctcacataacttcataacttgctgacatattcacctgaaattaaggggttttttttagttaagttgatattttttgaattcatattgatttttcttaatacatgtttattttagaaaatatagataagcaaaaaggaaaagaccacccataaccccattacccatgagttatcactttgaacagcttggtgcattcccttcaagattttttccacctacatatatatgtataaatgtattacgacaatatgaaataataggtattactgtaacatgcgtgttttctcttaatatctaatcaacattgtttctcattagtctacaattataaaatggctgcctggtgttccatgattcacttccctagtgttgggaatgttatgcccccaccccgtttcattttgttgtttgctattataaataatgttgcagtgagctgagatctgcaaatgaactagatagagagtggagagcagagtattctaaagatgtggagacagcatgatgttgagaaagagaaacccagagagttccttgctgctgaagtatagacagtggggatggaaatatatgtagggccagactatgcagtcctcatagactacatgatttggcttattatcctaaggccattgggaatacataaaagttcaagcaggggacacagtgaactgactggggttttacaaagatcaatggctgtagtgtagagcaggaatctgaaatctacagtccctggcaaaattcagtctgccattcttggatgtagcctgagaacagtttttacattttcaggtagttttttttaagtcaaaagaattatattgtgtgatgtgaaaagttacctgaaaatcatctcagtgttacaaagttttattggaacacagtcacgctaatgtgtttacacattatctgtgctacaactgccaaagttgagtatttgtgatagagaccgtctagc

SEQ ID NO: 315419 - DNA, 4001 bp, Homo sapiens
atttcaaaaaccgtaagcttggctgaatcacacggttcaagaacaggaaagaaggccaaggcatagggagtggggcagttgggtgaatattagtacctttccctcagctacattaattacccctgcctactctgcaaaaaaggatataacaacagtttcctttttaatggtccaggtacagctgcttatatggatgggcatttgtaaatcagatacttcatcactgtcttaatcatcagatacttaaaaaaatcactttatttgttaaggaagataaaaatggctgggttcaatttccgttttggaagaaatcgatttaaaaggtaaccatttaataatgcaaagggcagtttcactgcagaccctaatactggaaatttttaaaaacaaatgaaaaacttctactttttcttctaagcttacttaaccacaccaaattttccagccacatatcttcctagtctacaactgcctttaactttaagagatgctcaaaaaaatgtaaattctcaaatagcattcttattacaattactgctaacctgtcagtataggttggctttaatatttatagctttctggttcctgatcttcaaacaaaataataactggtaccaattttaaccaataatagttaccaataataactagtactcaaatattgggacacctatatgttttccttcctactcactttgtgtcctaatactctgaagtaaattcaagattaaatcaaaggttgggcaatttgctctgatgatgaaaaggcagcagctttggagtcaagtagagtgagtgagaaagggtctatcactaagatttcttccccccgccccccgccccttagacggagtttcgctcttgttgcccaggttggagtgcaattgcgcgatctcggctcaccgcaacctccgcctccccggttcaagcgattctcctgcctcagcttcccgagtagctgggattacaggcgtgcaccaccacgcccggctaatttttttatttttagtagagacggggtttctccatgttggtcagactggtctcaaactcccgacctcaggtgatctgcccgcctcagcctcccaaagtgttgggattacaggcgtgagtcaccgcgcccggctatcactaagatttctgtctgtaagctggggaaagctacttcatctttccaggcctcaatttcatcatccataaaacggagatattaatagcacctacctcctaaagccattgggaggattcaatgagatagtgcatataaagtgctggcacaaaatgtgtacttagaacaagttttctttctagagtagctgatgtaataaatctgcttacatcctttcagacctcacaactccctatgcctgcattaacaactgtttagttccagggagggcacgctggacactttcgggtcctgcgaaatatgtcacactctaaagttctgggaggactttgtgggtccctggatggaggagaaaccaggaagaggatatgtctgcatagcaaaaagaagctagggttcctcctgactgtaagggagaaggctgacgaggtgcaggtccttgtgggcagggcagaggtgaggcacggagtttcctaacccacgggacaccaggttcagatccgtgtccgagggttctggcccgggcgcatgtcagaggagagtagcccaattcagggtcctgtaagaaaactgaaccggatccccgccggagaagaaaatccagttcgggggttcctgtttgaggggagaggtcaggtctctgggtccccgagtgaagaaacaagctaggtcgacattcttgtctgatggagacacggtgaacccggagcccgtggagttacctcataccctcactcaccgaggaggccgtgacgtccaaaggctttttcctacggtccatggtcgtggcagagggtcccggtccaggaaggaccctttctacccgacacaggcctcgtaagcctacctccgtcgcaaccggaagtgtcttcgacagcgacactgagtttgcgtgagtttgcgacgcgagtttgtcagctcagcgccatcttgagaaggtcagagtgtggtgcgtattacgttcaccatcattttggaaaggtcatagagtgcggaggttgacgctaactgctaaggtcatcttgagggcggaaggtaacaaggattggtgtgggcgccatcttgagaagggcggaataaagcttttgattgcgatggacgccatattgggtggggcggatgtggggttggcgacaaagataacgccatcttggggaaggctgacgcttaagtaagtgaactcgagcgtctcgggaaaggtggattgggaggaccggaagaatcttaactgcaattccaggacctgctgcctggcacttttcacacgttaaatagttggttcttaaaagagcgtacgagataaggattattatattaatcttagtagaaataacaagaataatagctaacattaatgtagtgcttattatgggccactttacatatttcagctcttaagaacgtgaactcctgggccgggcgcggtggctcacgcctgtaatcccagcactttgggaggctgaggcgggtggatcaggaggtcaggagtttgagaccagcctgaccaacatggtgaaaccccgtctctgctgaaaatacaagaaaaaaaaaaaattagccgagcgtggtggtgcgcgcctgtattcccagctactcaggaggctgaggcagaagaatcgcttgaacctgggaggtggaggttgcagtgagtcgagatcaaaaaaaaaaaaaacaaagaacacgtgaactcgaaagctgactttctgggttggaatcgctcttcacggcttactgcttgtgtgaccttgggcaagttacttaacttccgtgtgcctcagtttccaaagggggatataattttatttacctaatgggtcttagtgaggattagatgagttaaatgagctagtcttgataaaaatgttaatgattatggtagacagaccaatcaccctcaccccgactcccagatgtctaccttctaatccccagaatctgggtatatggtgacctttatatagcaaaagagaattggcagagatgatgaaattaaagcgattgagatggggagctagcctggattgtgcaggtgggtcccctatcatcaaaaccatccttataaggggtagacaggatggccagagtcagacagagatcagagatgctttgaagagggagagtgggaccacatgcctaggtatgcaggaggccgctagaaaaagcaaagaaatgagccctcctccagagtctccagaaggaatgcagcattgctgacacggtgattttagtcttgtaacactcatctcaaacttctgacttccagaactctaccagaatacgtttgtgttgttttaagccaccaaacttgtggcaatttgttacagcagcaagacgaaagtgatcataatgattgtaacagtggcatttagtatatgtggggcatgtgtatgactctttgcatagattatattatataatccttgcaagaatcctagaagcggacctattatccaccatattagagagaagaaaaatgagactcatcacatcctcatctcatctgtctttatggagaaaatgggaaaagggaaaaggagaggggaattgaggcagttgactgtgttcagtcttatttatttattttcatttgtttatttctccaagtccgccagtctctgaaattagaacagtaagcaatatgagataatcgggcctaataatgttgtgattctcttttcttaatggagtggaatgttctgtccccacaagaaggattataccttatagacttgtcttgttcagattctgtatttacccattttactgaaacacatactaaattccatgtgtttttgttacaaatcttctgaaagaaaatgtgaaacattaaaaggtattaataataattttttttaaaaggaaaaaaaatgag

SEQ ID NO: 315420 - DNA, 4001 bp, Homo sapiens
caggcgtgtgctaccacacctggctaatttttgtatttttagtagagacagggtttcaccatgttggccagactggtcttgaacttctgggtcttgaacttctgacctcaggtgatccacccgccttggcctcccaaagtgctgggattataggcatgagccaccgcgcacagccaactcggcccaatttttaaaaattgtggtaaatggccgggtgcggtggttcatgcctgtaatcccagcactttgggaggctgagaaaggcggatcacgaggtcaggagatcgagaccatcctggctaacacggtgaaaccccgtttctactaaaaatgcaaaaaattagccgggtgtggtggcgggtgcctgtggtcccagctacttgggaggctgaggcaggagaatggcgtgaacctgggaggcggagcttgcagtgagcagagatcgtgccactgcactccagcctgggcaacaaagcgagactccgtctcaaaaaaaacaaaaaactgtggtaagtacacccttattctcaatatgtctaagaaccagctggggcttgatgtactcaaactcaggttcatctctcttttgtacatgtatttatctccatgctacctgtataggcttttaaattcccagaggatggaaatcccatctctctaaagctctccttgaagatgctagtacagcactagtaaggaagaggtattcgttctaaggtggaacacggtcattccaaggtaaatgaaaactgaaatgcacagattaaaaactttcacctctcactctctttcctattaaaggaagcataaaaggggagaaaaagttgagtgcatgcaaggaatggaactatatacaagggaagggccctggcagggtgggtacacaagggaggaacacgtgagggggagaggaccgccccgattggcatggactacctcatctgaccaccgtcgtcaactctactgcgacaatcttttttcttttctttctttctttctttctttctttctttctttctttcttttttttttttttgagaccgagtctcactctgtcgcccaggctggagtgcagtggcgcgatctcagctcactgccacctccgcctcccaggttctagtgattctcctgcctcagcctcccaagtagctgggattacaggcatgcgccaccacgccctgctaatttttgtatttttagtagagacgggttttcgctatgttggccaggctggtctcgagctcctgacctcaggagatccgcctgcctcagcctcccaaagtgtggcgtgagccaccgcagccggcctactgcgagattcttgaggctgcgatgtgaggccctccaggtgcccctcccgttcctccactgcagaaagttctagcagaaaaaatcaggtctcttactcagacttcaggccccctgtggccaccggcccgcctcaaacactaatggccggccgcctctctcattttccgcctcttctccacctggagacacgctctgagctcctagactaaatccttctgatgtctttccagaggcctcacagggttttccctactcataatcaaagagaaatcccagcgggcttctctgggtctccgctcactctggctcccggggcgtacccggtctcactcctcaactccaggcggggatctgggataggaggtcgcggacccctgcgaatcggatgaaaactgctctccaaggataagcgcggaagtgaagcctccttcaagagccagagcggccatcgccatagggaaagaaagggcaggggagggactacaagaccaacgtcccgggaaagcccgggaggaccgctggtatcctgaacccagacccacggccccatccggctcctcagcccctccccccgcctttccccaacccaccctgcccaaagccctcctgtccccacctctggctgctggcacgcgcccgacctggggctgccctgacgtggcttcgaggtggccgcgtcccgctgcctctgcaacggcacgcgcggccccgcccccaggtcctcttctgaccaatagggattccgtcctgtcccagggccccgccccgccacgacaggcagctaacggttttaactgtcctaacggcaactcgcgcggccccgcccccagggtctcctctgaccaactgggattccgtccagtccccagggccccgccctcgccgcgacaggcagctaacggttttaaccgtactaatggtctcaaccgcgctgattgtgggccccgccaagctgcctgcctggcgccacaccgctgcacgccacacccagcccacgtgcaccccatgcaacgttccctcacacccccacactcacgccggaatggccaccctcggcccacctggcatgcagatctactcacttgtcgctcgacctacactccactgtgtatgaccagaacaaggaggccctggtccccaggaatggcaaggcgccacctgtgaggacagcatgtggggtggaactggtggccaggggccagagcacagatgatacttgggtggtctgagcaagggcaggacaggcggagcagctggcacgagaggcgccgtgggcagatggggacatcgaaccgggcccctggaggaaagagaaaggaggcaagaaatcttctgaggtttctggcctgctggatgctggagtggcctgagggcagggacagtgcgggtaggcaggaaggatctatgtaactctgcctctggtgcttatagatgacttagaaagcaaaaaacatgcttgagaccagcctgggcagcatggcgaaaccccagctctacaaaaaattagtccggcgtggtaacacatgcctgtggtcccagctactcggaggctgaggcgggaggatcgtttgaacctgggaggtagaggttgcagtgagccgagatcgcgtcactacactccagcctgggcgacagaatgagaccctgtctcaaaaaacaaacaaaaacaggatgcaatcaccaatggagtataaatggaaaggagattggattcagccccaggacacaccagtttagaggactttggagatgaaggaaaagcagccaaggagttggagcaagcctggtcaggagacggggaaagacaccaggagaatgaggcattctggaaggcacttggaactgcttcaaagaggaggcagagatcagctatgacaaatgctgcggatgtgttcagggaagattagttagaattaactttgagtgaccttggtaggagcagttacagtgatgtagtgaggatgaaaacctgatttgtgtatggattcaaaaaatcaagaggagagatttggcatatccatacaatggacaactactaagcaataaaaaggaatgaacaatggatacaacaacatgaataaatttcaaaataattacgctgagtgaaagccaaacacaaaagaatacatactgtatgatcccatttatataaaattcgagaaaatgcaaattaatctatagtgacagaaagcagaggtgtggcattgcctgaggcaaatgagtgccataaggaaagattacgactaggcagaaggaaacttggggtgatgaacatatttactatcttcttcttctttttttttttttttgagatggagtttcactctcaggagtttcacccaggctggagtgcaatggcacaatctcggctcaccacaacctccacctctgaggttcaagcgattctcctacctcagcctcccaagtagctgggattacaggtgcctgccaccacacccagttaattttgtatttttagtagagacagggtttctccatgttggtcaggctggtctcaaactccagacctcaggtgatccacccacctcagcctcccaaagtgctgggattacaggtgtgagccaccacgcctggccatatttactctcttgatggcagtgtttcagaggtgtatacatatatcgaaatgcatcaaattgtacattttcaatatgtgcagtttatcatgt

SEQ ID NO: 315421 - DNA, 4001 bp, Homo sapiens
cagtggcgcgatctcagctcactgccacctccgcctcccaggttctagtgattctcctgcctcagcctcccaagtagctgggattacaggcatgcgccaccacgccctgctaatttttgtatttttagtagagacgggttttcgctatgttggccaggctggtctcgagctcctgacctcaggagatccgcctgcctcagcctcccaaagtgtggcgtgagccaccgcagccggcctactgcgagattcttgaggctgcgatgtgaggccctccaggtgcccctcccgttcctccactgcagaaagttctagcagaaaaaatcaggtctcttactcagacttcaggccccctgtggccaccggcccgcctcaaacactaatggccggccgcctctctcattttccgcctcttctccacctggagacacgctctgagctcctagactaaatccttctgatgtctttccagaggcctcacagggttttccctactcataatcaaagagaaatcccagcgggcttctctgggtctccgctcactctggctcccggggcgtacccggtctcactcctcaactccaggcggggatctgggataggaggtcgcggacccctgcgaatcggatgaaaactgctctccaaggataagcgcggaagtgaagcctccttcaagagccagagcggccatcgccatagggaaagaaagggcaggggagggactacaagaccaacgtcccgggaaagcccgggaggaccgctggtatcctgaacccagacccacggccccatccggctcctcagcccctccccccgcctttccccaacccaccctgcccaaagccctcctgtccccacctctggctgctggcacgcgcccgacctggggctgccctgacgtggcttcgaggtggccgcgtcccgctgcctctgcaacggcacgcgcggccccgcccccaggtcctcttctgaccaatagggattccgtcctgtcccagggccccgccccgccacgacaggcagctaacggttttaactgtcctaacggcaactcgcgcggccccgcccccagggtctcctctgaccaactgggattccgtccagtccccagggccccgccctcgccgcgacaggcagctaacggttttaaccgtactaatggtctcaaccgcgctgattgtgggccccgccaagctgcctgcctggcgccacaccgctgcacgccacacccagcccacgtgcaccccatgcaacgttccctcacacccccacactcacgccggaatggccaccctcggcccacctggcatgcagatctactcacttgtcgctcgacctacactccactgtgtatgaccagaacaaggaggccctggtccccaggaatggcaaggcgccacctgtgaggacagcatgtggggtggaactggtggccaggggccagagcacagatgatacttgggtggtctgagcaagggcaggacaggcggagcagctggcacgagaggcgccgtgggcagatggggacatcgaaccgggcccctggaggaaagagaaaggaggcaagaaatcttctgaggtttctggcctgctggatgctggagtggcctgagggcagggacagtgcgggtaggcaggaaggatctatgtaactctgcctctggtgcttatagatgacttagaaagcaaaaaacatgcttgagaccagcctgggcagcatggcgaaaccccagctctacaaaaaattagtccggcgtggtaacacatgcctgtggtcccagctactcggaggctgaggcgggaggatcgtttgaacctgggaggtagaggttgcagtgagccgagatcgcgtcactacactccagcctgggcgacagaatgagaccctgtctcaaaaaacaaacaaaaacaggatgcaatcaccaatggagtataaatggaaaggagattggattcagccccaggacacaccagtttagaggactttggagatgaaggaaaagcagccaaggagttggagcaagcctggtcaggagacggggaaagacaccaggagaatgaggcattctggaaggcacttggaactgcttcaaagaggaggcagagatcagctatgacaaatgctgcggatgtgttcagggaagattagttagaattaactttgagtgaccttggtaggagcagttacagtgatgtagtgaggatgaaaacctgatttgtgtatggattcaaaaaatcaagaggagagatttggcatatccatacaatggacaactactaagcaataaaaaggaatgaacaatggatacaacaacatgaataaatttcaaaataattacgctgagtgaaagccaaacacaaaagaatacatactgtatgatcccatttatataaaattcgagaaaatgcaaattaatctatagtgacagaaagcagaggtgtggcattgcctgaggcaaatgagtgccataaggaaagattacgactaggcagaaggaaacttggggtgatgaacatatttactatcttcttcttctttttttttttttttgagatggagtttcactctcaggagtttcacccaggctggagtgcaatggcacaatctcggctcaccacaacctccacctctgaggttcaagcgattctcctacctcagcctcccaagtagctgggattacaggtgcctgccaccacacccagttaattttgtatttttagtagagacagggtttctccatgttggtcaggctggtctcaaactccagacctcaggtgatccacccacctcagcctcccaaagtgctgggattacaggtgtgagccaccacgcctggccatatttactctcttgatggcagtgtttcagaggtgtatacatatatcgaaatgcatcaaattgtacattttcaatatgtgcagtttatcatgtattaattttacctaaataaagctataaaaattaaaacatggctggacaccatagctcatgcctgtaatcccagaactttgggaggccaaggtgggaggatcccttgagtccaggagtttgaggttagagtgagccatgatcatgccactgcactgaagcctgagcaacagagcgagactgtctaaaacacattttttttaagtaaaaatggcctgggcatggtggctcatgcctgtaatcccagcactttgggaggccaaggtgggcagatcacgaggtcaggagattgagaacatcctggctaacacggtgaaaccccgtctctacaaaaaatacaaaaaaaaaaaaaaaattagccggctgtggtggcacgagcctgtagccccagctactcgggaggctgaggcaggagaatcgtttgaacctgggaggcggaggttgcagtgagccgagatggcgccacggcactccagcctgggcaacagagcgagactccatctcaaaaaaaaaaaaaaaaaaagtaaaaacgtggcctggcgcagtggctcactcctgtaatcccagcaccctgggaggccgaggcgggcagatcacgaggtcaggggatggagaccatcctggctaacacagcgaaaccccgtctctactaaaaatacaaaaaattagccaggcgtggtggtgggcgcctgtagtctcagctacttgggaggctgaggcaggagaatggcgtgaacccaggaggcagaggttgcagtgagctgagatcgcaccactgcactccagcctgggtgacagagcgagactcggtctcaaaaaaaatcaatcaatcaatcaataaaaatacaaagcattagccaggtgtggtggcgcacgcctgtaatcccagctactggggaggctaagccacaagaatcacttgaacccaggaggcagaggttgcagtgagccgaggtcatgccattgcactccagcctgggcgacagagcaagacttcacctcaaaaaaagaaaaaaaatagccgggcgtggtggtgggcgcctatagtctcagctacttgggaggctgaggcagg

SEQ ID NO: 315422 - DNA, 4001 bp, Homo sapiens
aggggcttttaacacacttttgaattttgaaccatggaatactatgcctggtcaaaaccaaattaaattccaataaaaaagctgaagggccccaggtaggcctgggcagcctccctcagcgtcgccctgtgtgagatcttggcaaatgcatgcaattccactagggcaggcatgtttcatccagggcctagcgccagctgaccacctccttggagcccagcctggcatttgtggtcagaggggtgctgagagaagctcaccttcacggtgacaccttcctcatggtctgttgtgggttgaactgtgtcatcccaattcgtatgttgaagtcccaacccctactgtctcagaatgtgatcttgtttggaaataaggtctttgcagctgtaattcactaagctgaggccattctggagcggggtaggcctccaatccaatgtgatggggtccctgtaaaatggggaaatttggacacagacacacacaggcagaattccacatgggcaggaaggctgagatgggagtgatgcttctacaagccaaagagcaccaaggattgcctgcaaagctctggaaaccaggagagaggcccggaatgggttctcgctcagagcccttggagggacctagccttttggacaacttgatctcagacatccagcccccagagcttgagaaaacaaatgtctgtgactccagccccccagtttgtggtggtgctttgttacagcagctgcaggcaatccatatgccttgtttcaagggaagtaggcagatctatgactcctgcctagtgtttggtttagagctaccttaacctgtgagggagctggacaggctccgaagctgcccctgacctctgagagtgcccaccctggcccggtacttactgtcattggtcatgttcttggagactatagtggacggtatctcagacatcttggctgaggcccaagaggttgatgcaaggcttctcctcttctaaaggagatcctcacctgaggagtgacacagtgcttgagcctggtggtccccaagcccagagcttccttccccctgggtggctgacagccaccgacatttgctgagggctcaccttgtggggacacctgccggctccctgcctctcccacccgagggtccactctcacctcctggacttggctctagctgcctactttttctgtgcttagaacacatcaatcttggcctcaagcctttgcattttcggcctcctcggccaaaaaatattctcccatacccagctgggggtgctgggcttccttctcttcaattccgagctcaaatgtcacctctttagagagacctctcaccatcccatccaaagtggtttcttcctccccacccccatgtggcctttattttcttctctgcaattcccactatctgattatcactttaaaaatccattcgttgtctatttccccctaaaatgtgagctccatgagaacaggggggtcttttctgctcatccaagctcctgacatacccttggcacttcttaacttcatccattgaatgaattttcatttttgcaggggaggaagcagagattcagcgaggtgtccaaagtcacagtcaggaggggctgcctctggaaagggcccccactctaagcttgtgccattcctgccgcattcctgctgcagccccctattgggtgagcctggggttcgcagggtcgcctcctaacacccgcgctctgcaaggccccgagccacacagcgaggtgcacagggatggtaggacagatggggtggatggtagatgggtgtgtttcaagcaagtggcatgcgagcgggcagccttggaaggcgccttgcaagtccgctcccggccacgcgcgcccctcgggccctggtttcgcacccctgccgccgcccccacgcgccctcacggaccccgcgcgccccctctccccggaccgcgagcgcacccaccgaccccgactgccccggctcgctccgaagcctccgcgctgcagttctcagctccaggagcagggctcttgggtttacgtctccaaggcaaccattcttcaggctggctgtgacgccacaaaggccgcggaggctgggcgcttgagggctgggcctgcgggccgcgggacagggagggcgcggggccgggctgctgggtccgagctctgggcacgatgtcctccctgacgccgccaggacagcgcctggcccaggcctgggcctggtgaacgcgggtttcttcctctgaggttcaacactccgcacttgggttggctcctttcatcctgattggtttattcgccacgtgccaagcactgaagagggcgtgcaggatggatacttttggagcaaaaatagccctgcttctttcctggggagggatcgcactttctagaggggcggttttcaaagtatggtctcaggactagcagcatcgaaaatgctgggaactcgttagaaaagcaagttttcaatcctcgccccagaatcagaaactcggggtggagcccagcaatgtgtgtcctgacaagtccacgcgcgaccccagtgctggctagggttgcaaagccactgctctacggagcgagcgagatccatcatagtgggacaagcgagaggatgaggccatacagaccagggcaagttttgagcgcgcagatccaccagctgcttgaagccaggggcaccaggatgtctggtcccccagctcagggatcctgtctccccacaaaaagcagcagcagaagacccctctttgagttctgaacatgttcctagattttcccagtatctatggggattgagagattgataaaggctgcttggagctgaaagcacagtcagtgactcatcttttcagggacatttaggggcttctggggggactctggagcagtctgcagcccagcaatgtagtcccagtgaggatcccagctgtgccaggctctgcctaaggccggtgtagtgggtgggaagaccacatccacaacaggaactccattggagctgggggtgggagtgaggaggagctcccaagatggaaggagcagggatccctgaatcttcgctggtagaatagtgtcccaacttgcaatatccacagtgggctttgcacaagggaggaagaatgttgtattgtgttaagccacatatgtgatttgtgcatgtgtgcatgtgcacatgtgtgcacatgtagtgtgtgtgtgtgcatgtgtgcacgtgtgtgttcgttacagctgctattgtcaaatgtgctgaaagacaagttgtccctttacccttaggagagaggctccttacactgacattcaaagtcctcaatgacccggccccagcctacctctgcagccttatctccctacaaaccatcaaagcagaacaaaaacctgtccctccgatttaggttttagcaaaccacaagaagcacttcataaactggtgactcaagtagaaaagtaagtgtttttgtaatggtttatctaaatacaaggtgctctaatgagacttttaggaagctagaacataagtgacccaaagagaacaaaggtacccaggctcctgcccattcattgtcatcaacagatcagtttatgaacagtcgtgaatctccccatgaaccttacagagtgttttctatgtgccaggtactgttccacgcacttgacaccaatccacccatttcacctgcatgatcaccctgcctttgcatgagttgccggtgtggacagagcagggacacagtgagacagcggattccagctttgctcttacctagaacacactgcctctcaccaggaatcgtccttccattttatgcagttatcccagacaatgatgcacaagctttgggaaaaaaaccccacaagtccaaaggtgtacttcataataaaggcaagttatctgtcagtttgtgtgttctggcctttgtttttgctcttggtagcttacaaggttagaaagaaaaccacctagaaaacgtgacctgatttggaactttta

SEQ ID NO: 315423 - DNA, 4001 bp, Homo sapiens
acttattctttaaaatcagagacattcagtaatctatatttgaaatatagagttcttagaaacattaaccatttaattttttcttaacttagaggaatttttttagcaatcagcacctcttgtgatcaagtaatatttacctgaaattcaacaactgctttttcttctctcaaatactaaaataaatattttgtgttaaataccgcatatatataattccattataatactcatttttctcttctttctgtatatctgtataccaagatgtctgaaatgtgtgtttaatgccatggtaatcatttctacagtacagtggacactttggagaggaaataccttatgtttttatctcatacccttctattctgtttgaatatcttaaatttacaggagttgctttttaaatgtcagagtttaaaaagcaatttaatttaatgcaattgtggtgctcatttttcttctttatatggctctatacttttttaaaagagctaatatacttaatatgtacataaaaatcctgtgtgacacatattatggcaagaatactaaaacctaaaatttggatggaaccttaacccatattatgtccctagagcccgcgaagtaattagtttgttcatctccatctccgctttacaaaaaaagaagcaggattagggttggtaagtaggatctgaacccagggctggatacttagtattaattcctcggtactcagtgctagatcccttacatttcctaatattgccctcctttggggaaaaattgcagtcttctaaattacacatgagtaaataggtcagaacgtgttaaaaagcatttccattgttttcaaaaggtagagtaacaggattttcattttccttttttagagctgagaaaactttctgttccgttttacaaagttgtgtaagcatcatctgttattcttggaccttcttctacacaacatatcaccaccaaagtttttcaaaatttgctgacccggttgcaattttttatttttttattttttcgtagagacgcggtgggaggggtttgtggggggtctcgctttgttgttcaagcttgttttactcctggcttttagggttcctccgcctcagcctcccaaagtgctgggattacaggtgtgagccactgcgcccggcctgcaatttttttttttttaacaactgctatgaattgtagttagtgtaagttcgtccttgcaacgtaaaatttcttatgttaatctgtgacaactcaatcttctctttgaaaaactgtaaaccgcacatttcattcttaccgggctgttcctcttgaaaacatctcaagtcactttcagctttaaacattacagacaaaaactcacaaagaaatatgaaccttctggagtttaatttataaacgtgcgcaaataaccgttgctatgcaaacctcagaaattcttttccaagtagctctttaatttttgagcaaggaaaaagcgggcgccggaaccagcctttcctctctcgccaggaggaacgaaataagtaagaggagtgggcatgaggaagggagtaataattcgagctttataaccctaaatgtcaattatggttttaatagcatttttaaatgcttaacaattactgaaataggcagagagggtaagggaggagggcgatggtgcgggggagtgttagaggaagcacaggattaggaaaggagagaaataaaagggctggggtagtactgccaaccagaaaacgcccccaacaggctctctctgcttcctcccgcctgcttcaattgatctcacctgatcttccagtagcttgttctcctcgttcgccaccgggatggcgaacccatcctcccagtgcagctcagccaggaattcgctactcatgactgcaaacggatagagaagatacagagcaaagatccgccttcttgtacagcgggtgagcagcacccgcgtcaagcccaggcacctgcacagtgccgcggcaattgccgggggagccctagcaaccttcccgcgtccttagttaccaaacaggaaacgctccagcccgaaggcgaaacttccggttgagaactccctgcctgcaggccgaagaatctttttcttaccttgagcactgagggatgagcagcaacttgcccctcccgacgttcccgggggttgccaggcggcagcgtaactttccacgaaaaggcggctctcggatcgctcccggagcgtgtgaaaactgtggcccccggagctggctggaggaccacggggcagctggctggaagtaaaccacacgatcctccgattgcctgggggaagacgggagccaacagggattataaactaagtttcttttcaaggtgtgtttgctgtgttgtgtagatttcagctactacagtaggtgaaagtagaccgaagtgaactggtgtttggaaacaactctctctctggcatcactgggatgttctgatcgtcgcctgtttcagtcggccagccttcctcaccgcactcaccggccccatcgcggatgtcccagtcgatcacagacgcggaccgcgcggaggccgcacacttgtggcgcggtgtggtggtccctccggcaccactcccatacttgcatttttctttgcatttttgtttgctaacatttaaagtgtggaatttcgcataaacgtctgtatttcctctgcttgaaaaagggtaggtgacacaatccccattatcaaaaggcaatgttccgctggagaggcgccccctttagaccaacaaagcactttaccagttcactaatttgaattacctgcttggcacgggtaggcatttgagttatagtctctcttgtatagtatctcagaactggaaaggacaaaacaatcaactaatctaatcctttcattttctcggtaagttaaaccgaggctccttgaggcaaagtgattaaagaagggatgctgtgcatgaattaattttacgtatccaataatcatctgtaattttttttgctctttcgaattttattttacctagacattgttaaacttttattataaatattttaaatgtatatgggaatagaaagcagagtataaataactgctatatatgcatcaccttgatttagcattcatattttgccatgttagcatcatctgtatcttttgctcaagtgaaaaaataatcatagacatcatgacattacagccctaaatacatgagcatgtattggtagaagagtggttaatgttatctaacataagcacaatatcattatcacacctataaaaatcaactattcttcaatatcatctaataaccatttcagattcatatttcgactgtcctaaaaatgtctttttacagtcgatttgtttgtcactatagttctgaaatcctcctgtaggagctttgtctctttgtgcctacattgttttccataaacttaatcttgtggacttagtgcctttaaagactagaattagcaaagcattttattccccctttctacaatgattaaaggctggggagaaaggctcaacttgtagaagaaatttgacctgcatgtaatagtggaattttagatataatgacatttaatcctttataaatgatcattacttattttataatagtttagtcattccaactaatgaaaatgttagtattcagcttatgttaagatggtacatagttatttatacttgggatatgttgtggcaatgctgctttctaaaattattggtgttgggtcaaaggtggggaggaaaatggcagaacaagacttccagcaatcagccctcacagaaacatcaattggaacaaaactattcacctacgaaaataccttcacaagagctaaggaaaccaatcacatttaattaccttttaatacagcaaaaagtaaaaataaaataattggtattatcacccatgtatcttaaaattacctaatttaccatcccagtttttaatatgaatactgagctgcctcgacctgtgccaatgagtt

SEQ ID NO: 315424 - DNA, 4001 bp, Homo sapiens
gaactctcaaaagtatggatccgcctttcctatcgctcagcctccttagtcttgacagcagagtgaaaactgttttctacaggtgaaagccctaagtcttcatcaaagccataccagggacggaaaggtagaaaagtattaacgctaaaatctcacgcctaagctttaacacccttccggaacagtaagacagaactaggcccatcagaaattctacataaaatcagtgaccactagtcactagtctcctagtgcttgaaactctgagaaagcaatcaagcagtccctcattttcctgagatttttgggctggcctgagcacacacaagaccaacggagtcaaattaagttggcaataaaacaagcggttccaagaaagcaaaaactattttcaattccacatctccaagacgcctcaggctacagtattcaatcgatacaaatgacattcacaacagaagccgattttgcaaagcccttggaacttaggggtctgcgtcagcactctggaacgtctatgcttcctaggaccaaagaataaacaaagataactcaaggcataaggcgatccagcacctaagatctcagcaaaaaaaagctaggtcctgaggcagctagtggaaaaacaagagaagggaagtcaaaaggctacttgctgtcagctaaagccaggtcagtactaatctctactttcctggacattggtacaaaaagcaatgacaaggccatcagtcccctgttcccctcgctcactattgtgtgtgtgtgtgtgtgtgtgtgtgtgtgtgttttgtttgtaagaaaatgcttatagtggcttcccgcccgcgcagaacacagccaagactaaacttttaaaccttgaggaaggtgggaaagtcagccagccagacgccggcctaggaaaagtagggagagaaggagggaaagagtcatgtttcaaaacaaaggctccacacggaactgaatgtcaacccctctccacttcccagccttcaagccagccaggctgggcctcgattttttagaagcggagtaagtcagattcacccggctctcagcgtccactgaggctttgcgatgcacgagaacacgggcacagccacctacttgctggggctgctgctagccccccccccccccaaccacccccttgagaaaaaacgggcttggaacgtcggagacttgcccaacgtcccacactagaacctgaattcaattcctttcacgtccgggcaaggccaacgcagggcgggcaccgggcgagggccgcgggagccgaaatggcaacgcccctgacctgagagaacctcgggctgggagaggggagggtcccgcgcgctctccctccggggcccttaccttccttgactccaggcagcttggactggtcgatgctgacttcagccataccgggccagggtcccggttgcccctttaacgcgggcttcccggtcaccgccggcgccgagcggggccccgagcgcagcagcagcgccggacgcggcgcaaagtccggccggcagggctcgcaggccggagaacggagcgggtcgggcgggcaggggctggtgaccaaagcagcgggagacggtccccgaggcaccaagctggcggcccagctgccccgccgcggccacctgctccgcgtccccggccccaatcgataccaaatatccggagcccggaaatggaccggggccgtccagtacggagggagagaggagacagaaaggcgggcgggccggctgggggagggggagctgcaggtctgtaaccgcaattgcgagtggctggcgagcgaagatcagcgcccgctgccgcctcgctgttgtctcctttgtgctcagtgacgcgccgcctgaggctggggccccgctgtgctcccgcccccgggccctgcccccctcctacgggagggtcgcgtctttaggtgggggccttgtatcctaaaggcctcaacaaaaaggccacacgggtcacctaaaacatagtctttcccgtgagcggtgtagtcagcattctgtggtctggttctgggattgagattaacacaggatgtttactgcatgcttgcctctctctcatacactctttttgcacccggaattagaggagagatggtagatggccataaaaaccccaaatacaacgtacagaatgaagagcagctgataaaattctgggccagtttggagtagagtgtgtacacaatcagctgggagaactgagtcattcattcatcaaaatcgcatgaatgtgtctaccaagtgtgatgttaggtactgtgggtgataacgaggcgtcagacttatctctgttatagcgctgcacacattggattgtaattgtgacatttctatctctctaaaatagacaacctctcctgtttcatctcctggcaacagaatgcatcctccttttgggaaactgcctctttccccactcctcagaggtgagcttctctcccaaacgtgtgccatgtctgaacctcgagactaccccatcactcttcccccttcctccaccgacatgggttcatcgaagggtggctgggtgaccaagacaggtcaaacagaatactttcctgggtacataaagagttacatattctgtttcttgtggaaaagatctgcctctaggagatgatgaggccaaactgaagacagaagcaaagagaagagaaagggagatgaagagggcatgttctgatgttaccacagtagcaaagcaggatatccccagagcagctggcatttcagcaactcctggattctgggatctacaacccgcaaactctcaacttatcctcagttttgcttaagctagtaatagttgattttctgtcactcacagctcagagtcccagtatgagaggccacgtaggggaggttttatttgaacttgacattgaaaagtaggtggattttaggctagcaaaaatttagaagactttcaaggccagagggtagcaaagtatagcccacaggccaaatctacgccactgaatttgaatgactgttttttatatgttcaaataattacatttcaaatcactacataaataggacataatattttcgaccttgcctcttaagcctcaaagtctaaaatatgctttacaggaaaagtttacccaccccagtgctaggcagagataacactcagcaggttaaatgtgggaataagaaggaagtggtattagaaaggtagatttatgggaattttttaattgtcctgtaatctagtaattttttttaacttcctgtggtctagagaatatttataacagcagtattttctgtttccctccccaaatctatcgtttctacttctctaccaagccgtgcctttggatgcctacagataaatcactaggcccctttgacctgtggcttcctgttgtgattgaccaatgggaagcactggcagaaaatcaaaagaagggaggagagaaatatcagagtattcttctttcctttaacccaaaattttggccacagtcctgtccctctatgactacagggcctgtgtagaggcctcttttccatggcctcagctctcatgggtctctaataaaacaatttgtttccagtgtcccttcaggcctagagtgtgatggcttcccctagttccttttggctcactgcaacttctgcctcccaggttccagtgattctcgtgcctcagcctcccgagtagctgggattacaggtgtgcaccacaacgcctggctaatcttttgtatttttagtagaggcagggttttggcatgttggccaggctggtctggaactcctggcctcaagtgatccgcccacctcggcctcccaaagtgctgggattacaggcacgagccaccacgcccggcctcccctagttctcttaacccagttaatacctctgaaattgtctcttcattacattcttttcagtaaaatcacttacagtgcacctcctgtttcctacctagactgtgactgttacagtaagatatgcca

SEQ ID NO: 315425 - DNA, 4001 bp, Homo sapiens
cctctggaaactgtagcaccccggcactcggcactcagactcctctcttatccagtcctgtggttttaaaaatcatctatgaaaatggtcaaaaaaatttattttggtgatggccatacaactttgtgaatataataaaaccactgaattgtacacattgcatgaattacatggtatgcaagttatatatcaataaagttgtttttttaaaaaaaaaacagaactatactcttgactcctccagcgcagacctctctccccagggttctaggctcatttatcaaacttcccaacctatatctctgcctgaaaatctaatggggatctcatcttcccctcccaaacctttttttcccatagccttctccatcatggatgacagcaataccaagttcaaatattcagatcaacaacctcgcatcacccctgattcctcatttctctcccacctcacatccatctatcagcaaatgcccctggctttccaaatccaggatccctcctcctctcacctctgccactgctaccaaatggtcccagtgacccacatcacatctctagcctggattatcccaagagcctcctgacagatgtcaccctgcttctattccagcccctacaatttattgtcagtcgagcagtcagtgttcctttccaaacacaggtggaaccattgtctctctgctcaacctctacaatggttccccacttctctcaaggtaaaagcctgtcttttccatggcctacagggaacctacccactggctctcattcctctctgacctcatctcccactagtctccctttcctcactccactccaagcacatggaccttcttgaagttgctggaacgcaccaagttgtccccagctcagggccttcacgacagctgctatctgtgctgctcgctccctcaccttcttcaagtcctgctcaaatagtagccccttgggaggtcttccccatgcaccctatcagatatggccatcccactcccaccctagcactcctgacccactttctctgctttattttttccatgcatatatcacatgacctgcaacatgtatcccatttatttgctttggttatagtctgtctcactcactagaatttcagcttggtacctacatatagtacgtacccagcaaaaaatgtactcatctgcctaatctctggacactgtagcatcccagcgctcagcactgttatttaaaaaaataacaactttggctgggtgcggtggctcacgcctgtaatcccaacactttgggaggctgaggcggggggatcacgaggtcaggagttcgagaccagcctggccaacatggcgaaaccccgtctctactaaaaatacaaaaattttccggacatggtggcgggcacttgtaatcccagctactggggaggctgaggcatgagaatcgcttgaacccaggaagcagaggttgcagtgagccaagatcgtgccattgcactccagcctgagagacaagagcaagactccatctcggggggaaaagaaaaaaaagctttattgatatataacttgcataccatataattcacccaatgtgtacaattcagtagttttactatattaacagagttgtatggccatcaccaaaataaatttttttgaccattttcatagatgaacaaacagaattcgcaaactgctgcacccctgactatattataaaactccttacagggttttccaaagctataggaccacgtgatataactcccgtccacttctgccatctccccgcctaatctccctccacccaagctgtgctttccttggttccaggaaagcgacgagcttgaagctctttgcacatgcacatgccctgctgtctacctgcagtgctcttcccgcgcacggccacaggcctggtaggccgtccggttaagtacccctcctacggttccgattctaccctggcaggacaaccctagctcctcgtacctggcgtggcccgaccaatcgtctgccactcagttgacctctgacctgttagtacccgcccctggagcgccgcatccggtagcgagagttcaacttcctgactaggagccaatcagcggggccgcctcgctgtctacgacaaagggtggggcagacgctccgtttccggtggcagggtctggggaagcggcggcaggcgccatgtccggccgcgaaggtaagtgttccggaaccgtgaggactgcggggacggcggggtggggaccgggcggcaggggcaggccgaacgtgctcgtgtcgcccacaggtggcaagaagaagccactgaaacagcccaagaagcaggccaaggagatggacgaggtgagggcgggcgcggaggcactggcgggtgcgggggcgctgggagacaggcctgagttgaacacgctctgcctctccccaggaagataaggctttcaagcagaaacaaaaagaggagcagaagaaactcgaggagctaaaagcgaaggccgcggggaaggggcccttgggtaagtgggggccgaatggagctcaagctggccaaacgctatgagcacctattgggatgagggcgcgggcatgtctttttcctgcctcctgaactgcgaggtctcgttttccgacgtccgctgcagcgaatggtctctagccagtctaggatttgcagcggcagtaagggccgggagctggaaacgaggtctcctgcctcccaggcagtctgggcttccattccttaggaagagctgcagaaacggaaacagtgaaatgtatttacctcagacgcagattcacagttaagtttctcaaagtctgacgtcgtccgcaatcttttgccccaaattcgtatttcactgccttctagtgtttgaaccttacttgacttagaagtttttttgttttgttttgttttgtttgagacagagtctcactctgtctcccaggctggagtgcagtggcgtgatcccggctcactgcaacctccaccttccgggttcaagcaattctcctgcctcagcctcccaagtagctgggattacaggcgcctggcaccacgcctggctaattttttttttttgagacggagtgcggctaatttttgtatttttagtagagatggggtttcaccatcttagccaggctggtcttgaactcctgacctcgtgatccacccgcctcagcctcccaaagtgctgggattgcaggcgtgagccaccgcacctggccagtttttttttgtatttatagtagagacggagtttcaccatgttggccaagctggtctcgaactcctgacttcaagtgattcacccgcctctgcctcccagagtgctcggattacaagcgtgagccacagcacctggccaacttttttttttttttcgtactgcttatattatctctaatatatgcttttttgctttctgagtctttttacttctgggtatgcctagactaaaagataaagtccaggctcttcagtgtgctgttgctccatatgcttttctaactgaatcctccaccttttttacatcttttatgtaggagaaattcattacatttcaaaatatttttcaggcccagcagttctagtactttatgtgcatcataagcattattttacattgatccaactagtgattatttcctccacagttgtttatgcccccatttgagcactgtgagccatgctaggcatgatggagacaaggatggtgggagtgtcatctagggcttcccaagacctctctcccagtgggtttgatccattattgtttacctacccagcactgagatttctagctcttgagattccttttcagaatggtgtaaggggccaggcacagaatgggctgaccataatccaagtgctttgggaggcctaagcaggaggattatttaaggctaggagttcacagcatcaaagggagaccctgtctacagaaaaaatttaaaattagctgggcgtggtggtggtggcggcccgtttcctgtaatcccagc

SEQ ID NO: 315426 - DNA, 4001 bp, Homo sapiens
catttttatactgctaactttagtagccttgacaatgggtatccttttcactctatactacctaaagtctgaccgggcgtggtggttcatgcctgtaatcccagctctttggcaggtcgaggtgggtggctcgcttgaggccaggtgtttgagaccagcctggtcaacatggtgaaactctgtctctactaaaaatacaaaaattagctgggtgtggtagcgtgcgcctgtaattccagctactcaggaggccgaggtaggagaatcacttgaacccgggaggtggaggttgcagtgacccgagattgcaccactacactccagctgggtgacagagtgagactccatttcaaaaataaataacaaataaaatgaagtcttgtcagtagtgtatgtttctggtatcacaaaccgtatccacaaaggccacgaggacaaagtgtatagaaaactgacatggaggccaccaaacatactacacattgccctggactccttcattctttgtttccaattatctatgaaaatggacccaggatgagtcctcatgaattgcctttgagaaaacaagaacattgagagaaaacgaattacaacagttcaattagatcatgtgccttaacttactgtagacatagagaaactctgcagatagtgggcccagagtgagcaaactaccgaagaattcacagccaccacaccaatgtgtgaatacttggagcctccaggttacatttattttgtgccaagcaaagcagaacataactctatagtcgagttacttcttcttttaaggaacaaataaagccgtaaatattgttgaagatggagagacagattgtggtcaagctcaaaatgggcccagtgaatggacagtatctctgggttatgacctggggttcctcaggaagaatggttggcctagaaagaagccactggatgaattcttctaacttggtagcactgaggaaaaatgtccattttcctccatgaacaaaagttagcttgatccatgtactgaagtctgggtaaatgtaaatatttggctttgctttttcaaagctccttgatgcattttgatggttacgtttcttcagagttttcatttggggagaaattgtttttttctcaagatggtcagtggactttggataactgggcactttctctggttctgctgaagagatttccatgtctgtagaggccaaagtgttcttcagagttgctggttgtatgagtttgtaaagcagttctgtgatttctttacccctttctccctccagaatctctagacaatgtatcgtggagcaggaattctgaatttccagttctgtcaccttcttctttaatgccttgatgtcttctttcatagagaggatatctttagtcgttgtgcattgtttgtcttcattaacattcattctggtttccaggacctccatctgtttttgatacaagtcagtcttttcctggacttttggtatcatatggacaatgtcagtcatttggctgaaaagttcaacttgagcagttttaacatcttggagcactactggaagattcatttttccgtcataactatcatcatcttgattacaatcatcagatgtcacagtgggatatccagttgaatcttggtgccgaatcttacatttgtggtaaacatttttaagagactgtctgaccttggagagatttgaagtccacatctgcctagcagcagcttttacccttttggtgtgaagtgtgtacatctttcatggtgaaacaagaggcaaggtgttggaaaacagaatcacaggaagaaataatgtacaaatgaaatggtccttctcttactatttgttggatgcctttcctgataacatcttagaacactctggaaatcatcagccacagcaatagacactgttaggtgattagcttcttatagagcagcccaaccagagagctctgtgaaataatagtcaactgcatggaatctttcatatggtaatcattgacctgctgctgatgtcacaatgactgctggcttagaacaaacatatttaactacagcagttctcaaaagttttggtcatagggctctttttgaatcatagaaattgttgagcagcctgaggaacacagaaaaacacctgttgctacaaaaaaataaaaaaattagccagccatggtggtgcatgcctgtagcctcagctacttgggaggctgaggtgggaggatcacttgagcacagggggtggagactgtagtatgccatgatggtaccactgcactccagcctgggcgacagtacaagactctgtctcaaaatgaataaataaataaataaataaataaaaataaaaatgaaaaattattgaggatcacacagattttgtttatttgggttatatctacctacattttatagtagacattaaaactaagaaagtcttagataattagttattaatttaaatttaaaaacccattacatgttaacataagtgatatattttcataaaaaataatttggttttctaaaaaaaaagtgagaagagtggcattgttttacatatctgcaagtgttttaaatacctgaattaatagaagataactagattctcatatctgcttctgcattatatctgttgtgatatattattttgaagtatatgaagaaaaaatagcctcatggagttacgtaaatggaaaggggagagtattttcatagctttttcagataattgaggatatcattctttgctactttatgaaaatttgacaaatgattttttttaagaagttagctgcaatgtgtcattttaggccaaatcaaagaagtttcatactctgttatattaatagccgctggtctattttttattttgaatagatgcataatatcatgtattggtcatttggcaaacaatggttcactgaattatgtaggtcttccaaatgtcaactcattgtattatataatatcaaaatatcattttcattaatatctccaccaatctcaccagaaaagtctttgagtactgagaagaggccaagctcatggtagcaaatgcagatttttcaaaattctaattttagcttgaaaatcttgaaatttatcaagctggtttattgttttccttgaagtgacagattccctccatccattttttgcaaaaatgcttgccaaatgcccaactatgaacactgtagtttgttgtcagtttttttcaagaaaaaatagtgttccatgaaaaaagcacacatttgtaattcaaatacttatgtacgtttcctcatgaaaaccagtatactttgttaagctgcagaagcacttatgtttacttcccattatatcatacataatataaaaaagatgtactgaagggttgagatctaataagattaaaaattcttactgcttcattgaggacattcttgagtgaaactggtttttcttgtatttttttccttttctgattgagtcactgttagtcagtgtggtacccctgctgtagttcatgctaaggtatcaacagttttacccaccattgcttttgcaatgtaattttcaacaggcaaatgtaagcacagtggaagagacaaacggtgtcctgggattattttgaaatattgttgccctcattgtcacacttacagagtggtctcatgacacaaagcattccacactttgagagccactgccttagaatttaaaaataacagcagccatttctcatgttccttcttataggtttttctacataacagtatttgaaattcaaaccctttgaaatattaaataatatttggcccattttatatattgaggtaaaaacttaattttattctctaaacacattagactgaacactctggaatcaaaatgacgtgttactcacatgtctctcaaggagcagtcccattctactcaaaaggacattccctcttggatccatgccaattccaaccttctaccaaatcactgtttcttctatctgtgcccaattgga

SEQ ID NO: 315427 - DNA, 4001 bp, Homo sapiens
ttatactccatccactgggtttcgcaagtgccaggagactagtaggtatctgttacgggttgaattgtgtgtccccaaaattcatgaatccctaatccccaacatgactgtatctggagatagggccttgaggtatgtaataaaggttaaacagaggtcataagggtgggccctaatccgatagaactgatgtccctataagaagaggaagagataggctgggcgccatggctcacgcctgtaatcccagcatttcggaaggctgaaaggggtgcggatcacctgaggtctggagtttggaaccagcctggtcaacatggtgaaaccccatctctactaaaaatacaaaaattaaccgggcacggtggtaggcgcctataatcccagctactcaggaggagaatcgcttgaactcgggaggtggaggttggagtgagccaagattgtgccactgcactccagcctgggggatagagcgagactctgtctcaaaaaaaaaataaaaaaaaaaaaaaaaagaagaggaggaagagatagcagagatccttctccttccaggtgcaggcacagagaagagatagtgacatagagaagacatggtgagaaagcagccatttacaagccaggaagagaagccttactataactaattctgatggcactctttttccccccttaaatcaaactgtatagcctagaaactgatggcagcttaatcttggacttctagtctccagaactgtgaaaaaataaatctctattgtttaagccacctagtctgtggtattttgttatggcagccctagcggactaatacagtatctaataaattcttgaatgcatgctaaaatgggattctaggcactcgattttaaacactcttttctggattttatttcaatttggaaataggatattttacagaagtactaaatctaatttttataatgaaaaaataagagttgcaaaaattttaaacactttaggccgggcgtggtgactcacgcctgtaatcccaacactttgggaggacgaggcaagaggattatttggtgagacactctcgctacaaaatttcttttaaaaaattacccgggcgtggtgacacgtgcctgtagtcctagctacagggaggctgaggcagtattcaagaataccactaccttcaaaccgttcaaagtacaaagcttactacagataggtcaatttttcagtatcttgggttagttaataatgcaatacatatttaagatcatgattttggaattcaactttgtaactaaacagaagcacatttatgactgaattggaacagataactttaatggcaacttggtcaaaaccagatccctattcttgcattcaggtgttaataattagccctaggtctctgatatttgaacataaaaaggcaaaacctctaaatattacatcttctctaatgggcaatgacactagagcaggtactataattaatcctccctccaagcttccatacgtcctgtcccacaaaaatagtaaattgcaccaagtatgttttatcaactaaatagctcttctgcaccttcttctctcccacaaaaactctacttacaaaagtaggagaggaatggcagaagctggaaactgagttcagggaactgctacaagattgttacaatccttatccacgcatcccgagctttaccacagcagattacccagagcttcccagacaaggccggagagccgcggagagaactatgacccccctcctccctcctcctacagagcagcctcgctccctaaggccaaacccgcgccccccatgacctccaatggctcgagaaaagagctttgaattgcccgctttttccaaagctggttcatactccctcgcaaagcagggaatagggtctggggacaaaaggaggcacatgcctgccacatgaggaaaaccccatcacctggaactcggcgaactcctcacagttcacaccgccactgggcgccgccatattggacaaacacgaggaccccgctgcaggccaatcaccgcggagcaaaggtgaccgcggagtcgcctgacaaaaaatatagtacgaggggaatccttaggaaagctgagtgcaaggcttgagttcaacgtggtccgcatccacctcggaacctgtcaccctgctgtcccaacccttttaacatgtcctcctggaactgggccagatacatggatcaaagattgtcagaccttgaagggactgtttactccaatcccatcttttcacaaaagggaaacaatttccttgtggttcccctaccaggtcgttgaaggaaatctaggcaagtgaggcctttctaatacctctcactccagtgcctaacctcctccccggaccctggagcaggggggtctttgttaagaatttgggaccactaagaaacgtcaagaaaaaacggcatttctggcagtgtgggtgggtatgagtaaagtgtttaggatggagatgatcaaatgtttttagaaaataggtaaatagaaaacaaattgaaaacatacatgttaatttctcagattagcctgagggatgctccaacaagagatagggccactgagcagagtccaattatgtgttttctgataaaagcatatgttcattgaaaacactggaagagcggcatactggaatactggtttatctggtgtatttcgggagtttacagatcacgaaagttgcacatttcctttctatttcacacaggtactcccatgggtacatatccgctagggcaagggcccacggcgccacactccacaggaccatctccgaggctggctcaggatgcggcgccaggggcactaggctggcgccgcgggtctccagcgcgtggcgcacgtcctacacgccccgcactggcgcaggcctgtacaccgcgtcgcgcacgccccgccccccggcgccgcctgcgtccttcccactccaacgctgggtgacattgagctcaccagcgccaccgtccccggcgaagttctgcgctggtcggcggagtagcaagtggccatggggagcctcagcggtctgcgcctggcagcaggtgagacgccggtcgggatatgggaggtaggggagctggcccggccgctgcgggtgggggaatcctgaagccttcctgggccccggagtggctccattccatgacgcactttctcggttcctcagaatcctacctacttagtagccatgtgggagggaactaggtgagcagctgctgataggcattggagactgcccgtgaattaccctcatctccatccacccagctcccaccaacttaactgcccacgcgcctacccttctccccacccccgtcctcagcctcccctgagctcagtctgtaaagcacctactatccctagacctcccctttacccatgcattcagctttccaccctaacctcccctatctattgctctccttgagtcttccctcttccccctgctccttcctctctggagtttatcccagaaaacctccagtctgaagtttccccactcattaaatgtctgattaggccaaggatttaggtcttagagattaataataattgttttcttaaaatggaggatacattacttttaaacacttatacaattaattgattcgaatttcttggaggaagtgtgtaattgaaggatctgcagtttgttttggtggtagacatttgtgtgatgactattttggacttaggtaatgaaagcttaattctttttttttgggagaaccagcagagccttggcatagtaggggttgagaaatcagagggcttgcattttgactcttttctgggtaccagagatcttttgttcaatggcacacactacattattaaaaagttgttaattaaatttttaaaggaaaaatagccccaaacttggctattcaaataatataaatatatattgtaatgtaaatgaagtaatgcaaaaaaaaagagtgaatgttgcatagtttcacaagtttga

SEQ ID NO: 315428 - DNA, 4001 bp, Homo sapiens
ggatataatgaacacgcaatatactggaacattaaatgttatgagtctgaatactgacagtagtaagcagtgttgtaatctgattttatttggctagaaggaaatctgcagaagtttgaggaaacagctttttctaaaatatcatttaaatatcactctattacaagcaaaaagtctgttgaactaatataaattttatgtatgaatttaaaagttaacatttcagatttctgtaacacaacataccatatggagacaatattagcttggtttttccatccagtaattcagtttcaagctttaaaccatctctgtaataaaaaaagaaagttgtctctcatttttaacaaaccgcaacattttaaataaccagaaatgttcatttgaacctgacaataaatccattattttgaatttatgcaggaatcttgtacacatcgaaccagtgttttaattaaaaacgtttgcaatccaagataaaacccacaactacagggggaaaattcttgaaactcttcaatactacaagcattgttatcattaacctgaaatctcattttgttattggtaaactataaattaagttatcataccaccattttttaataatgctgttaccaaaactcctcacataagttaaaggaacaagatatatttaaccgccattcattagtttcataatgaactcatgactaaaacattctatggagtgctggagcatcgatatgactactaacaatgccatcaaggttagtaactgcttgagcaaagagtaccactttcaatatttcaaataatacatagtgatatttagtatggtgctttatacgtgcatatcagaagcaaaggcataaagtaacagtagccactgccaacaaaacttgaacgtctgttaaggtcctaaaactccactgagaacaaaaatggcagcccatacatacagtccataattcagagagagaaaattaaatccagcaagccagtcaagggagagagaggctgggaaaggtctgattaggaatgcgaaatttgcggtgttgctcaggtaggggaaatcaaattacctcaccttaactattaaaggtaaaacactggaaagaataggttttacggctttccttattgtagggttatgaacagttcgtgtttatgttggtgaaacgtcaccaagaaagaaaagagcttcaatggtaaagtaccttcaatgacgcactgcactgtaatctccttaagggacacactatcttatttatttccatatccccagattctaaaacataataacatttgctgaacgatgtgtagttaggtctgagtttggtggcttctcatcttctcaaaatatcaaacttgcgagtgatgaagaccatgcaccagccctttttatttattcacccctacttaaggagcgcctactaggtgttaggcactggtactacatcgatttcttgagaagcctggttccccgcctcgtgggcctaaaacgaatttgggcgtttcaacattctgcaagactccaaaaacaaggtggcgaagaacccggggcatgggccaggagtcctccccaggagccgccacgcttcctctaactgtctcgtcatttctctcctttcctcctcacctctcttccctcctcatcctgaggtaaataagggaccgaaaggggatcactggcagttttaatgctagtcattaagtgaaaacgtaaggtctgtggagtcgctaagggccgacccatctgcctcgatcttctacccgagaactgggctctgcccctctcggcggcgcaggttgggaacgttctccagtaaagactccaagggacaacccagacacacatgcctccctctccgctgacgaccaccttgcttaccccagcttaccccagcttacccctgcttaccccaagttcatggcctgacctcgcactctctccacagaacgctcaagccccttgtgtacgtcggttgccgccgccgctcagcaagcgctacgccaattggatataggggtgccggcgagctgagcaagtggaccaatcagggtggggcatgctggcgggtgcgctgagctgggccggggctcccgcggggacggttgcgtatgccgtttgttccccttttgtgccccgtttgtgccgtttgttcccctacgcacagcggaatttggcctgacccggcttatgagtctaaagcttcggtggcggagacctgcgcttctcgcaattgtagccttccaaagcgcgtacacagacacacacacacacacacacacacacacacacacacacacacacacacacacacacacacacctttttggggtcaccatttgcaagtaagttacagacattgtaacacttaaccctttaacattgcagacattgtaacacttaaccctttaacattgcagcatgtatctcctaagaatagatgttctgctacataaccgcagtacaattattatacctaagatcattaatttcataataattctcttcccgatttaatttcccccacttgtcctaagaatatcttataggcattttatttagaaagcaagagccaatcgcgccactgcattccagcagcttgggcgacagagtgagactccgtctcaaaaaaaaaaaaaaaaaatgcaagagccgatcaaggatcacacattacatttggttgttaagtatctttgcacacactctttccagacaaaaacaatgaaaggtattaattattaaatgcctgacaaacctttacttttttattttttattgttgtaatatgtgtgttaaaatttgctatttttagccattttcaagtgacaattccatgatacaatgttgtggaatacgccagtatatttttccaaaagctttttagtacccccaaataaaaattctgtacccattaagcaacaacttcccattttcctctcccctcaatcctaagaaacctctaatcttatttctgtctctaggaatttgcctattatagatacttcatgtcataaaagtggaatcatacaatatttgtccttttgtgtcttctctcaagtaacataatgtattcaaggtgcatccatgttgtaggatgtatcagagcttcatatctgtttatgattgaatagtattccattctatgtatatatataccacaattcgtttactcattcatccattaatagacatttgggttgtttccatcttttagttattgtgaataatgctgtagtgaacactgatgtacaagtatctgtttgaatccctattttcaattttcttggtatacacctaagagtggaattactgggtcacatggtaattctatggttaacttttcgagaaactgccaaactgttttcataacagttgcagcatcttacatttctgccagcaatgtatatgaggttctaatttcttcaccccaacacttgctttttctttttcttttctttcttttttttttttttttagagacagggttttgctctgtcacccaggccgcctacattggtacgaacataacactgtaacctcgaactcctggtcttaaatgatcctcctgtctcagcctcccaagtagctagggctacaggcatgcaccactacgcctggttaatttttaaaaaaatttttgtagagacagagtctgtttacgttgcccaggctggtctcaaactcctggcctcaagtagtcctcccacctcagactcccaaagtgctgggattataggcgtgagcctgtagccagaatgatttctaaaatgtgaatctgcttaattcactctgcttcttaaaatctctcaatataggagaacgtccttaacttgataagcaatatctacaaaaaatctcctagagaccgggtgtggtggcttatgcctgtaattgcagcactttggaaggccaaggcaggaggattgcttgagtgtaggagttcgagaccagcctgggcaacatggtgagactctatctctattttttaaaaaaatcctgtagagcccaa

SEQ ID NO: 315429 - DNA, 4001 bp, Homo sapiens
acactgaggaatctggccagagtgagacacttcctggtgtaaaaccctggtctcctgaccctctaccatgctggggtgggaggagaggctaaggatcagggagtttcttcaagatacatgctcagaaatacctcagagccatccaacctgctgccgggtccctgaaaagatttgagcctggtacattttaattcaactctgtattttctgaagccagaaacctagaattactcagctctgggaatacaggcaatatccctgtcctcaaggaacctaggttagaaggccagaaaaagacactgttaagattcttgggagtgaatgctggcattcagctcagtttgccaatgggtcaggaaaggattcctgggagagacaacacctagctaggatatgagtgatgaatgaaaaatgattagatggaaatggaacaaaaaggggaatagctaatgcaatggctccaaagtgagaaagggttaaggcatacttggtgtgggatctgggatctaggtgaaaaaacaggcgaggatagagcaacaaagaaccctgaatgttagccaaagggcccagacttacacccactgtccatgcccatctgtttctccagctgctgctgttcatgtgtggagctggagtggggtgggggaatctccctgcccaccagaagttctgttttcagtctctagacagggtactcagcaacccattttctagctccagaggcatggagacctaatcaagagtcggacttttcttcaacagaaactaaaaagctgatgagtagcaggtgccaatgacatctctctaggcaaccaggcagaccagggaccaggaagccagaccaagatcccaaagtttaaggacaatgggagccaaaggctgcaagtaggatggtgagtcaaggggacattagcggtatgcactgtcctacctaagacttggagggccacagacctcagtacagcccagatggaggtgactgagaacacctaactactcccagacttctttaaagaagctgtggacatcaatcataactaacatctaatacccaacccaacactgagggttcccagaagcaagaggcagctccccagctgcaccagagcattaaaagatcagccaggatcaggcaggtccctcgggccatgaggcccgtctgtgtagtttcttcccaccgctctaatgcagcagatgaagtcttcagaataccctggaggaaatgccctagggctctttgtttggaaacattcttggatcctcaggtgtcttgggcacttcccctccccagagaccgttctccaagcacaatccttgcacatgactttagttctttattaatgttttttgaagggatgtagttcccagagctgtgaactgtagaagagagagggacctatttcccaccctcacacgcgccccagcgcaaatatttggggtgacctgggggctcttccacccaggttaggctgggctcttgggaggggttttctgggctttcgagaagcttcggaaacagaggctcctgcccggcctccgacttcccttcacacgtgcccccggggaaggcaggagaagttgacggaagatagggcgtgagagaggcgccacacaggcagaccgggggagggggcagatcggggccctcaggctgggaatgcacgtccttagggcccaagccgtgaggcgggggtcactgaggcagcgaaatgtacagggtgaacggtgctagccctaccgggaccgcacagccccagggtggggtcgctgggcgcggggtgggggtggggtggggggtctcggccaggccggcggaggacgcgggtccgggaagagttggccgcttgcccgtccgccctgccgcctcgcgggccgcccctccgcggcgcggctaggcccgcggctccaacctaccggcgccgccgcggggacccaagacgcgcctctgcgccgcctccgctgctccaacatggccgcccgctgcgcgccggaagtgcactgcgcttccgcttccgggacccagcccgccctaccgacccttgacccctgagaccccatttccccacaaagtctgggggcggagcagattgggtaccaaggaggactgcctggaggtggtggccgcggtgactgctccaaacccgttcggccctgtgcagaagtctgaagaacagaggtgccctctgacgcggccccaggcaaggactcactagagcccggccaagactggattaggggtcatctgacaccttttctgaggggagctagtggtgcattgacatctgggaggggctcctgacaaggttcaggccatcttccaccctctgatctatctttagccactgacaatgcccacttcagtcccagacacctgaccagagggtgaaagaggagtgcctcctgacagggagtctcaggtgatctcctttgttttgcagtaagggtatcttctccgaggacagcaggccttcctctcttcctgagaatagggcctgtggcacatggcatgaaaggctggtgtgcacgtgatcacaagtggtgcacgcaagcccaagcgcacatggagtctgggggctccagtataccactgtgggcctgagtatacttgctcaggcaggtgggggcaggtatagtcactggcccagcctcagcccctcaatggaaggaagtcctgcttccagtcttaacactgcccagaacccctttccttttgcctaggagtctgggacctcagtctttttatccatgctcttgggctagtacggggtggtggttataggacacaggtcaaaatcaaccctaggggtctgtgacttcagtgagaggtcagagtggtctccacagctctgaccaaaggtcccattagtcagaggtttgcaagtccaggttgggaaccatcctgggagccctggtttcatggatgaggtagtgggggcatttgcactagggtcagagcctgagccaggaggcagaaatattgccacaactcttggactctgacccttgcagtggtgccttatttggtagttggggtcaggtggaagcctattggcaatcacaggagggtggcgggatgcttcatttagggactgggtactagccctttttcctgccctttttccaaccaggatcctctggttgctctgtattttccctgcttatacagaggggtccaggcactcctaaagacaagtgcctagtccacccagcagtgccataggcctcatctggtgcctcttagcttcccagggcctcagcactaatggtgaggtcctcgctgcttttaagtatagccaaggtatctagcaggaactgcaaaatctcctgttcctctggggtcagtgcttctagcctttttttcctggtggagagaaagcaagagtagggtcccaggggccaggatctcatggggtgcagtcaggaagccccaccttggtgcccccagtccccagctgtgggtgagtccagtctctggccgtccatggttgaagattgactgttcacttattcaggaccgattcaaccagttaccttctgcagcttctccaaagccggcagtgttggcctcctgtgtgcaggtgggccatggctgtgcaaacagaaaccccttccatggagagccagagcccatcctccagggatagcaacagtacagttatatccagacccctctctggtgatgttcagctcagaagttagggcaaatggaaaaccaggaagggtaggtccatcctccggctgtgctgtgtcccttccagacatgagaactggggaaatgatagagattagggataaggatcatgggggtacctagctccctttgggggtggtagggccgaactttttgcctcctggtgcccagtatgccctagatggaactctttgggagcgctcatcagagtgcagtctgacttgacctggactctagtggctgctgagcctacaggcacaactgggaccagacaggatgagatgggagagaacacagggtgatcccagga

SEQ ID NO: 315430 - DNA, 4001 bp, Homo sapiens
cagcctaacgggatatggatagcgctcctccacctgcagcgtcttcttcagcagcaccatgccaaacttgcccttctccagcttcaggaagctcatcagcttagggatgaggctagggtccaggggctgctccaggatctggccctcgctggtgatccttctcaccttgcctccttcctcacctgcctggtggaagagcacaatctgttggatgtgcctctccgccagctcacagtacacatcgtccttcagcaggctcatcatgaggcggtagtagccttccgaggcatgaggggctgagatgacccatactctgttcttccctgcaaagctggcaaggatgttgggagagctggaccccgaagggaaacgcaacattcttgaccgagctgaggacccctcatctctgatcatctcacgcggagagcccctggctgctggtctttgctcaggtctcacggcggccccattgatgtccgagcgggctggcggctctgttgggcgagctagtctcaacacgggcacactcctccttctctggagaggctgaaggtttggttcctccagagtggatctctcaattccgcgagacctcccagtgtgcctcagaaaccgagctggcctactgctgtccggagaaaccaaaggcactttccgtcctccgtggctgcctctaatagtggcatgggggtggggttctgatccacacactagccacatggccaacagcatagtgaaacggggtcccattctccatgtcattgtgtaatccactttgcgatgcacggaggtcataaaacaaaggggagggggaaaaaagaaagaaaattatttatctggaaacagagctggtcattttctttttctgtatctcagccaaggggaggggaaaaggttggttagagagaaggagggaggtcaggagatggaaaatgggatgagatcctgttactttcaatcccctataatttgttagtgtttaacagagacagttacattaagcaggaaatccaattcagtttcccagtcagcatgcttgtactgtttcaactaatgctctggatgctccaaagaaaatgcaaactagcatattaattatgacaacattcacatttcattccttcaaaataagcaataaagaaacaaataaacagatcaaagacagaaaagattacacacttacatggtggctcatagagatggaatgcagagggttgcaaaagaaatcagaagtttggttcccaggacagtttcctagatgaactacttttcctcccagccctctctctctttaccgagggtgagcaatacaaaaggggtgtgctgcagctccagctttcagagtaccgccacagatccacagcctgtcctgatctgagagctgagccgatgccttttctttctggctgtgtctttttaccttctggacaagtaggatgaggtgaaaggagctgtccttctaagtctttgtatctccatttgtctgcagtttctcctcggtctcgtgtgtctgtgtgtgccagtcccttgtgctgacacaggacgtcccttaaagtccagtcctggcgatttctgaatctcactctttccctctttaaagttccaggatccttcttatctccctttcccccatagtctggcttagtctctttgtttccgggcgtaaaagcactgggattaatatgttttccaggctgagggaaaacacaggaatgtgatgtcgaaaagggactttttttttctttcactgtgcttctctcctccctttatttctccctacctttttcctcctctttttcttcttctttttcttctttctcttgcctggattcagtcccagaaatgttaggactacctcagttttgctccaaaccaaactcaaacaacagcagccactggaaatcaaggaaacttcactaagaatttaacagatcagcaaaacaccgcctccttcccattttagcacgttcagagtggactcagtgaggagtgagaaggctgttctttggggtggggtaaagtttttaaactccacacatcatcataaatcactttagaagaggatgactggtgccttaaccccttccaaaccaagtcatcggggtaacttctcttccagtctgttcttacactgtactttggaaggagaaaattctcagatttctgcatcaggctacattcttttcttagagacagatactcatttgggtcagggtgcttggctgtgctgacacagacagtatatatgtatttatagtcccatgtgtatattcttatatctttctccctgctttgtgcttttagtttgaggttggaaaagcccatggaaaacatgactaggttgtttttattttatgctaattggggatcatattactgtgttcttggtcctagtttctcctcggcatggaaggaagctggtaaaaggttagaaatgcaggcaatggctgcaagtcgagattgcagttgactgttacatcagggaacaggcattatgatctctagcttcaaagctctggctgcagatggtagactaagggctcccttggaggtcccgagtgtgtgtgtttgtgtgtgtgtgtgtagtgcaatattttcctctgcagagactttagatgtctgaagggctttaggcaatccatagaagtagacttatcaggttctgaaagagagagtgaggcagctttgggattccacctcctgagtctgccataaggattcaatggagaaggaaggggtctcaggttacgtggatatttcttccggccatgctgggcgagctgactctccatgtcactattaactgccaccaacagtgacaagccagggttctcagaaacctccttgccagctcagtcatgctaatagcgtccctcactggatcaaacttcatccctagttgttatgccttgatcagccccatcttgccctggtcacatttgacttttttcacataagctacgagcatggaactgagaaagtcctgtatagaggttaactatagagttgcccggccacaccttgaagtcccaggggtaccaagaaggatggccagccctgctgtggcattctctcagacacttgtaaggataataacaaaagtgggcttcaggcagagaccctctgtccactggagtcatagattgcagccttcgtggtattcacctgttgggttgatcaacctagccttgtgctaagttggagggtcctagatgttacttcctttctcataattttctaaggcgtcctacactatccttactgagctttctcccttctggcttttcatttcctcttctcttctctctgcttataacaactaccatttattgagcatttacatgtgaagctttgggcttagtatttttgtgaattcttttatttaaccctcacagtatccttagaaagtaaacagaatgatcctcattttatagatgagcaaactgaggcttggtgagtttaaataaattgcctattgtcccacaaaaggtaagcagtagctctgaaatttgaacccaggtttagaacagcctacaaagcgtgatgctatcctgcctctctctttaattttctactcataccttcagttttttcccttccttcaattcctttttgcatttcccacattcgtagaagagtttcatttatttgttcaaccagagtacttacacttttagagtcctactgtctgggataattgtgtaactgtactttttgcttttctcaataggtccttaaagccctttattatttttcttgaataagtcatgacttacacaaacctctccatgatgtgcacaacatttgtcacctgtgcgctggtaaagctgaaatacagccactttagcaaccccgaattgaccatgaggagccaccccaaccctgggttgtgcctgtcttcctaggacctcaggctttcttccctctgtgagcttcagtcaccagatggcgcactaaacacacacaccagagaggacctaacactccaccgccgccgttag

SEQ ID NO: 315431 - DNA, 4001 bp, Homo sapiens
aagtgtacgtgggaaatggcaataagccactacgcagaacataggcaggttttaaaatcagaaatatgtgcccagcgctcaggcttcgaaagccccgtgcattttagatcgctagtggataaaacaccctcaagtttctatccgtaaagcctcgaaattttctgcagtatttagaaaatgaatttaaatcttaaaaccctctaatattttattagaaaagattgcaaagtcccccgcaccgctgtgtaacagctagcaaactcaatctgcatgcgaatcttagcgaatgggtagttcatcccttaatgatgctggcgtatgaaaggctctaaagcagctctacccacccagacctcacttttagacccagagccgttatttctgacttcaagaaatgtctttcgagctctcggagggaagacacagaaaatagaaaagcataatggaaatgggcacaaagctgaagacagcatccttcaaagacacacgacacttggatcccccgctgacgaaccgagggacctaccttttggattaggacgcagctggcttggcgtttccaaccggagcagcccggcagctgagccaagttcagggaggaccagcgggcggctgtctcttaaatagccccacccggcggcgtcggccagtcatgtatttacccaacgctgacgcagactggcagtaacacgtgctcagagggcggccactggggcgacaaccggttgaagtggctcctgggagagagggggaggtggtctagtggggtggagttaatccctcccacgcgcggtgccgggtgtccgccccctctgggtccgagaagcttccgcccaaccctttccaggtgccgctcccctgcgcattccagagcagtactctccaaggtgggaaacctaggagtttggagtctcctccgggatggagaagctgccgctagcttagttcgctttggggaccggaggggctagaaaggaaactgggggcgggggtggggggtggacactgggcaggactgagcatcagcaaggcgtgattctgaaagggagggggcgtcggccccctaccccggagcgtccgaggcgctggtcttcatacctgtgtcggctctttcgaaggagagaggaggagtcggggtcttcactttcttctcagccgcattaaaagccctcgcagttctccaggtttccgagggccagtgttctgggtcagtgaaagggctctggccacagctggctcttggtgtcctgggcctctcttgacgcagctgtaaaatgcggatgacaccatctggttttgctcagaggaatccggtttgggaaagggatgtgttttcttcccgggccaagttaccaccacccgcggcgcccactgttccccgttgtcgacaagcggcgccagcgagggtcctggggaacttgaccaccgcacccccgcaagctcgggtagaccacggcatccgcccctcgcacctttcctgagggcccacacactcacacccccaggacagtaccttccagaactcagctgcgcagcctggaggtgaggacctcacccctagtcagtcacccgtccggtggagggaagggaggcaccgaggctgccgtgcgcctttccctgcacgcggttactctcccggctccggagcgggccgacctggagcccctcagtgcgctctggtcgtctacaccctgaaaccctttgagttcgagtccgcttgctggtgcttgagttcgccgcgtccctgcaaaggcactgccaaccccatttcacagaccgcaaaccgaggcgcgaggaagagcagcgccttgccaaggctccacaacacgcccctcgccctctccgtgcaccgaggccgcccagcctgggacctggagatcaccaggccttgaaccttgggacctcaactcctctccctttctttcccccacccgtcttagatgcaaggagaaagatttagaagcgcttattttaaaatcggaatccgtattccgctctggaattccctctggaatggagggactgtggcaacgccagtgtgagggtggagtgggcgaggcggggtgggggggttgggggggcggcccagagacgcctccggttgctgctccactttctaatcctgagaggcagctgcgtttctgcaacctatgggcaacatgtttgaaagagctgaagctgattaaatgctttccagtggtttcgccacgagcctgctaaggtttgtgtagttcagttgcgaaaaagagtcttatttgtgattgtggcaagacatgtctggaaacataaacttgttatcgaaatacccccagagcttctaattcagtaggtctgaggaagggcccaagaatccgaattccttccttccttccttccttccttccttccttccttccttcctttcttcctccttccctccttccctccctccctcccttccttcctccctccctccctcccttcctccctccttccctccctctctccccttccctctttccctctctcccttccttccttccttccttccttccttccttccttccttccctccctccttccttccttccttcccccctccctccctccgtctctccttctccctctttccctctttctctctctctttctttctttcttctttatttctttctttctttcttcatttccttccttccttccttccttccttccttccttccttccttccttccttcctttccttgcctttccttctttgagacagagtctcactctgtcgcccaggctggagtacagtggcatgatctcggctcactgcaacctctgcctcccaggttcaaacgattctcctgcctcagcctccccagcggctgggattacaggcatgtgcagccatgcctggctaatttttatatttttagtagagacaagggttcaccatgttggctaggttggtctcgaacttctgacctcaggtgatctacccaccttggcctcccaaaatgctgggactacaggcgtgagccaccacgccccaccaagaatctacatttctaacaagttcccaggccatactgaaaatgctagtccgccaagcacactttgagatcatttctatagaaattccctaccttataccagttactcaactcctggccttgatccatttaattcatgtttattcaacacttactttgtgccaggccccagggattcagtatgaacaagagctgacaatacaataggggagctgaagcaaacaagtggacaaacacttctcaacaattctgatatttggggactatggagtggagatggtaggaggtaatcttggagaaatgttttggtgaggggagctaggtggtaatatggaagatgcccaaaaggcagagggactggaaggggagggctggataggaggccctcggggatgggcaagcaggaacaatcaaggtagatttgttttagaataataagccattatgaaacccattaattattaggaaacataataaacattatgcaagtcataagtgttcatcagagaacattcagaaaacaaaagtagagaaaagaagaaaaattccagcctcccagggaacaacctgttgctgctcaggaaactggtagagggaaccggacttggtgactgagactgaccttgagtttccaggctgggagacaagggtgggtggtagagtattatccaagacagggaattcagaaggaaaagcaggcttggagtgtggccgtggtggtagtgggccagtggggagcgggtaatgagtccagtatgggattggttgatcgtttgtgcattgacagtctaggaggagtttgggagcctttgtcctgagcagagagacactggaggggtggacccagagtctggcatgtgggtggtggctgccagcctgggagttatagggagagttgaggaaggcagctagcaatgggtggcagggtgcctctagacagaccgctgaggagtgacagcgtgaaggagtgggtggaggaaa

SEQ ID NO: 315432 - DNA, 4001 bp, Homo sapiens
gggtggggcaatttcccaaagacaggaagaaatacaacaaatcactgatttgttctttccttctgaagcctctgggtcagagttccagtcttcccttcatgtgaacccacagaagaactctgcagagccaaaactcttcatcttatccctctctggtcaagccaggggttaaggttcaaatccaggccctggaacaccagttgggtaagagagcttcatggaaaaggcaacacacctaccacatcccttccagcagtgtttgctaagttctttttttttttttttttttttttagacagtttcactcttgttgctcaggccagagtgcaatggcacaatctcggctcactgcaacctccacctcccgagttcaagctactctcctgcttcagcctcccgtgtagctgggattacaagcatgtgccaccatgcccagctaattttgtatttttagtagagatggggtttcaccatgttggtcaggctggtctcgaactcctgacctcatgtgatccacctgcctcagccccccaaagtgctgggattacaggtgtgagccactgctcctggcctgctgaattcttttaatgtccagctgtgtttgtactgttcagcacactgctccacagccggtgttcatcattagtgtcactggggataaagttggcagaaaaaagctgccccaatccaaagcatgattcctatgggtcacaagagatgaatgggcctccctctgaatcacacaaagaattggaaggagcttaggggaaagctagcctcaggtcagaattgcctgcatgccactcggctagtgagctgctgaatcaccttattcctggagaaagactttgatgctgagaaaactgacttgctcagctcttgctacaactgtgaccatctctgcaacagtaaagtaaaaacaaatacctctcttgttgggtaataatttgtaagtcattgcaaggagaacacaaaactgctgctgattctttccttctgttacatactttggtggaaatggacacattgtcactgcttttttaaactgttgtagccagatctcaggcattctcagcattgaccccttcctgctagaggatttccaagggttggtatctgggtggctccaaggtcctttgcgttttcagtagagggtattcactgtatctaggaaccctttcctaggcttcaataattatcttttaatggcttggtaaaatggtgttgaacttaatcagcaacactgctaaaaattagttcaaagaaagcttttcaagaaggttccccttacttataaattaagtcctccataccccttctcagattgctacaaaggaccgccagaaatcatgttgcttgtttcctaccgagagaggtcatccccatcaggctagcgctagagaagagggtcagcatcgggagcctgggaacaagggcagaagtgagggatggggaggcagcattcttacctttccgggcctgctggatgtatcttgccagcagggcgcccaggtgcgctcgggactcgccatccgttctctgcgataccctcagctgcctacggggcgcctcctctgcccgctgcagcccggagcccgcgggatctgcgggaggcaccggctgcgtcagggcgccagccgccagtaccgccatcagcacgcacaggcacacgccgctgttcatggctgtagcgagcaaaggaggagggcgcgttaactgaaaggctgggcaacagagctcctgcggcgggccgggcacccagaagcgggcttaggacaaacacaggtgctccagacccgccaggccgccgcaagcacgagggctcgccaagcgctgaccccagccgagtgccatggcgcgcgcccccgggcgcacctggctggtctttgggaactcctcacccagcgccaaggggcagagaccctgttttctgccgtgttgagcagaaggaatgtttttgctttcctaaagtttgaggaagtgtttgcagagtgcctctcttctaaccgaaagaagaaaaataaaaccccacgagattaaaaatagtgtgaaaaaaatatcctaaagggaagactccgtgggagaaatgagaaccctggggaaagcacttttccagatagctaacaagctttcaatatggaaatacagtaaatgatgaaaaagagaagcacagtttaaaatgtaggagcaataaataaagccgtatttataaagtttttctcaaagtgtacgtgggaaatggcaataagccactacgcagaacataggcaggttttaaaatcagaaatatgtgcccagcgctcaggcttcgaaagccccgtgcattttagatcgctagtggataaaacaccctcaagtttctatccgtaaagcctcgaaattttctgcagtatttagaaaatgaatttaaatcttaaaaccctctaatattttattagaaaagattgcaaagtcccccgcaccgctgtgtaacagctagcaaactcaatctgcatgcgaatcttagcgaatgggtagttcatcccttaatgatgctggcgtatgaaaggctctaaagcagctctacccacccagacctcacttttagacccagagccgttatttctgacttcaagaaatgtctttcgagctctcggagggaagacacagaaaatagaaaagcataatggaaatgggcacaaagctgaagacagcatccttcaaagacacacgacacttggatcccccgctgacgaaccgagggacctaccttttggattaggacgcagctggcttggcgtttccaaccggagcagcccggcagctgagccaagttcagggaggaccagcgggcggctgtctcttaaatagccccacccggcggcgtcggccagtcatgtatttacccaacgctgacgcagactggcagtaacacgtgctcagagggcggccactggggcgacaaccggttgaagtggctcctgggagagagggggaggtggtctagtggggtggagttaatccctcccacgcgcggtgccgggtgtccgccccctctgggtccgagaagcttccgcccaaccctttccaggtgccgctcccctgcgcattccagagcagtactctccaaggtgggaaacctaggagtttggagtctcctccgggatggagaagctgccgctagcttagttcgctttggggaccggaggggctagaaaggaaactgggggcgggggtggggggtggacactgggcaggactgagcatcagcaaggcgtgattctgaaagggagggggcgtcggccccctaccccggagcgtccgaggcgctggtcttcatacctgtgtcggctctttcgaaggagagaggaggagtcggggtcttcactttcttctcagccgcattaaaagccctcgcagttctccaggtttccgagggccagtgttctgggtcagtgaaagggctctggccacagctggctcttggtgtcctgggcctctcttgacgcagctgtaaaatgcggatgacaccatctggttttgctcagaggaatccggtttgggaaagggatgtgttttcttcccgggccaagttaccaccacccgcggcgcccactgttccccgttgtcgacaagcggcgccagcgagggtcctggggaacttgaccaccgcacccccgcaagctcgggtagaccacggcatccgcccctcgcacctttcctgagggcccacacactcacacccccaggacagtaccttccagaactcagctgcgcagcctggaggtgaggacctcacccctagtcagtcacccgtccggtggagggaagggaggcaccgaggctgccgtgcgcctttccctgcacgcggttactctcccggctccggagcgggccgacctggagcccctcagtgcgctctggtcgtctacaccctgaaaccctttgagttcgagtccgcttgctggtgcttgagttcgccgcgtccctgcaaaggcactgccaaccccatttcacagacc

SEQ ID NO: 315433 - DNA, 4001 bp, Homo sapiens
ttttttcaaattattttaagtatcagtgttcctatatgaactttaacacctaaattaaagtccgttttcttttgcatccgtattcacttgaaaggaaagatgttttgatttgatgactggtgcacggtacagcagtagcaagagatactatgttcaataatgccaatcttacctttttcctcttaactggcggaggtggtggaatacattaatcacatctcttattcttctaggtgcttcttcgatttttgatgcaagattaatacaagccatagcaacaatctgaaagaacccatgagccacaaaagccattgttagattaaactcactttgaagaataaaatttagaacacaattgggacaacctttagtaaaattagagaagacatctctatgccgtaagtctaccagctatgctagtactatactttttgttgtttaactcatcttaattttggttccagagtcaaactcaatcttacaggagttctgcatttggttgaaaactgtacttttcgttaagagggcacttaggctcgtgatcgattttgaaccacattctaaaggtttccacttcctggcgagtgagaagtaggtacaaaggcctaaactaaaccactccctttctggaaaagctggctgctgacactacccctactctgcccatttccggatgaagaaatcccttttacccgcctccgctgtgcttacctcgaaactgtgtttgacgaaagatttggagtagaaaaaacgatgaaacaacacctgccccgttgccatcgccacctgcagacaagagaggagaacggaagcgcaggggtcaggcgggcccgctccaggcgccgccgccattttgtgccgccgatcgcttccctttcccctcccgccgccgccgccgctgcgaacagcccgctgccaagtcctccctccgcctccgcagccccccgccccggcacgccccggccgcggctgggccccgaacgggaaagcctgaaggaaccgtccccaccctcccggggcacggtgatactgagatgcggcgtaggggacggaggagaggagaggagcgcccggccggcccggggccggagcactgacctgcggcagccggaggagaatgccggcggcctggatgagctcgcagcccaggatgcgtaagtccgtctcactgggcaggtcgagcccatcctgcatggatggggtgggcgagagcctctcctccggaatcagagagtggtcgatggtaagtgaaacttccgagtacaggcgatcgccgatcaggatccctcccgtcgtggtcgtcgtcgtggtcgtcgtcccggagctggagccgcccgcgcttggggcggccgatgaggcggctgcggcagcagtagctgtcgaatgaggcccggacgccatagtcttagcgagccgcacgcaagcccaacgcagccggaacccgaaacaagactaaccagcgttctcggcgcgacggatattcccgtgaccgccgggttctgggccgcttcacgccgcgtgcgcttccgccctgacgtcaccacgccgggcagccgcgcgccaactagtccctccaggccgcgcctccgccctcggcatctgggcctgcgaggggagtgttgggtgctgcgacagaccttgggatcctcagaggctgaggaggccttctctagccaaggccggtcgaaaccaccttgtttgtgatagccacacgaataacggagctttacaagatcccttatacccaaaatagaggtggcagcattggctagcatctctgcgccccttcgccctgcattccggcctcttcctttagcctcggcgcggcttgcgttccgcgtgtaccaagggaagtggcggccgacctgagcgcgctttggcgggtggaagtggtgactttgttgtcctgtgtggacgaatgtgtaatataaagtgaccctcaaggaatctggagagggctgctttacagtatttgaagaacacagggctgtggaccctatcggttcccaaatgaaagctccccggggagcgtgtttttgccagtatggggaagtagggcggaggcataggaatgaccgcgagagtggctgctttcatagctccgcttgcgaaactcctgcccggcctttgacaccgccacggctttcagtaatctggaaaatccctagtttccaaaaatagtcttagggcgaggacttgacagaggtaatttgattatgcctgggagtctctattcatacatggttacctaccgcgggtagggtgaggtcaacctcgtgttttttgttttttttcctgtgatattagctagcaatttccagcgtttcctgaaccttgaagtaaaaacaatgatactgatctaaactactagaatctaggttggaaggaaaggaatgcatcacgttttactcttgacgctcagaaagcgataccccaaagacagaggctttagaagctgcctcataatgcaggtcccccaaccttgacttgttgctcccacttttcccaagtgcagggaggtactctctgaaatttcctttcctgactagagaagcctctttgtagaagaatcaatcgcattcctcccctcgctgaaatctcgtatcctatttcaaaaagactcagaaatgcagccattcctggagggactttttcacaagattactcaaaagaaaattatttactaatttctgtccattcattgttcctaataatcatttgctgctcctcaaaataaatgtctacatttctcatctaccctttcccctatgaaaaaaagatataaaatcttctgtactccattaagctactgggtaatcatcctcctgcttttaccccggtgttatgtatcccttttctcctgttaatcgcctgttatcagttgattttttttttctttttttttagatagagtctcactctgtcgcccaagctgaagtgcagtggcgcgatctcggctcactgcagcctccgcctccggggttcaagcgattctcccacctcagcctccccagtagctgggattacaggcacacaccaccacgtccagctaatttttgtatttttgtagagacggggttttgccatgttggctaggctggtcttgaactcctgacctcaggtgatccgcccgcctcggcctcccaaaatgctgggattacaggcatccaaagcgctggaattacaggcatgagccaccgcacccggccttatcagttgattaagtgaaccttcagtgggcaaagttgttttaaaatgtactgatacttgagccttgcctgcagaggttgatgtcactgatttaaggtgggcccagccagtggttcagttttgcctgtcttcgagtgattggaatgtacagccaagagagtgtaattatggtgctggcagaagtattaacctatctggatgtcactgtcttcactttctgactaggctgcttccagggaatctttccacctcaatatttatgagatatctataattttataacaaacttttaaaggagcctcggtttccttaaacacaattgatgacaccagttttctggttttcttccatttttgtttatagagccagggtctcactgtgttgcccaggctggccttgaactcctgaactcaagggatcttcccacctcagccacctgagtagctgggactataagtggcacaccactgtgcctggtcagttttctggttttgataatctatggttgtgtgagatattatcattggggaaagttggaggaatacataggagtagtctatctttgcaacttccatgtcttatttccaaataaaaagtaaaaaccctcattgattatgtacttcattaaaacactggacttcaatgaaatcatcacctatatttgtaatgacttgagagtaatataatttaactttttttttgacttctgaactttttattggcctcctgctccccaaagggtaccctgcttctgatggcttaatgtctcagaacttgggtgtcgttggtct

SEQ ID NO: 315434 - DNA, 4001 bp, Homo sapiens
cctccatctccagagagatccaatcagccctctttctggagagagtcaggctaacggtcactaacaaagctgtgttggcagtttctaatttctgcagccacagccattgctgatgagggcagacagttcggtttgatagtcagcacttttcggtgggctggcaggttaacagtggaagtatgcaaatagcttggaaagcacaaagagcagctagtgcaagcctgatcccatgagtccagtttctgggaaggtttggcaaaggcaaaggcaagttgagtcaacattgtcaggtggcattttaaaccgagtcacctccatacaccccctacctccaacccatttgttatttccccaacttgttaagccccaggcaaccactccaaggcatgctgttcctaaagggaggtgatctggggtggggcccgagaagagaaaccaaaggaccatgttgtcatctaatctgccagccctgctgtagtctactgcagaagtctgcctcaaggccactgcacagtggtcagctatagccctggatcctggaccctccactgctagtgtcctccagcctgggagttggtgaagtctctgagcagagatagagcagtctgtgatggtgaaagacacccaggcctatggtgcgctggctggcttatactggtttataaatgccaattgcgtgcatctcttccccactccacattcagcatgttggtagcttgaaactgaccacagtgggggcatttataccatgaaaatcaacaaatgttataaagcagggatcttttcttcagaagagtcagttgttgaacatttaccagcacatcactgcccaggccccacattctgaacagtccagcactgtcccactgctcggtgcgggaactaaaggatcagtgagtggcacatagcctggtgccaggttgtgcaaacttttgggagtttccatctcttctttgaaatctgggacccaccaagaccacctatgaagtagatacctatacggagccaccatgcccctctatcttcagaacaaaatcctgacctgtgtctttgttagtagagcagaacagatgccccccaagatcacctggccagctccttgcctttgggtgagtgaaagcctacctcttccaaagatagcagtgccaattttgaggatccttggttctagtcttcttaagagataggttcagtatcaaatcatccttgcatctgccaagatttttctagctaatatttccctcttgctataatttcttcatacaccatgtttggttttcctttacatgggggaatttggcaagcaatttttttttttttttcagacagactcttgctctgtcgccaggctggagtgtagtggtgcaatctcagctcactgcaacctccacctcccggattcgagtgattctcctgcctcagcctcttgagtagctgggactacaggcatgcgccaccatgcccggctaatttttatttttagtagagacagggtttcaccatatggccaggattgtctccatctcttgacctcatgatccacctgcctcggtctcccaaagtgctgggattacagccgtgagccactgcgccccgccaagtaatttcttattgaataggtttccacagaaaacaccttttgtcccttagtactgactgactttcttaatcagtaaccaaaagccaatccttcaagtaagcttcctttttagcaaaaaagcctatatttcatctgagcacccagctttataaatccaccattctcagtattgctacagtattaattgccttggagatgcatccatgggctacttagacatttgcccagcctactcaaagaattccccctacctttgaggagcccctagctgcatgcatgtctttgaacaacactgccctccacagtaacagataagacagaaaagacaagtgacacttactctggttccaagggactttgtccgtgaagtctttgtttctggggctttctgggtttttatgaattcaagtttcaagatcctgaccaagtaggaagtactcagcttcctgtgtgatgatggagaattggctccagtttcacagtctttcaaaatgacaagaaagggacaaagttcttctttttgtgtggtttggtgctcatgaatggccacaacgcccaccagtggccacttcctggaagccaagttaactgcgaggattttctctgctcactctgagcctcttgagtcttggccctgggagctcagccttaagggaattgggggcaggtgaagctgagttgggtgaggtgggtggcagtgagatgttcccagaatgtttggagcaattgaagtgtgggatgtgtgtatgtgggatgggggcagggcatagagctcttgtggtcagcggcagacttcttttttttcttcttcttaaagattgtgaatggaaggatttaaactggaaccctgagtcctgttcctcaaaactaactgacatgggtgctcacagaggcagcagcttctctttggcaccctatgcccctcggcttctgggagctcattgtccctctgctctctgctccccaagtccctccccaccaaacctcagagagtggctttgccccaggaacctccagcatgaagggaatataggtctgttggttacattttgaccttccctttctgatgccccattcctgttttacgtgatggtcaaacatgggccaagttcaaatcccagctctccacctgtgacatgggcagatcactcacctttctaagtcttggttcctactctgctaaatgggagtattgaatgcttacctcagaggagaagcacgaagtcaacttgtacatgaaaaatgtcagagtgcctggcacagtgaaaaatgtctgacaaatgatgagtactgtgactctcctcacaactgccaacacctactctgcctctgcccttgtgtcttctataaagtggggacacccctaaccttcctcacggcattgctacaaagcactgtttcagaaatcatcagtgtgaatgtgctttgaaaagatcacttgtctcttcatggttcagttttcttatctgtaaaatgaagaattcagacaagatggcctaagcttgacatctgatcatcactcagcttcaccccaaagaaataaatgggggtctgcatgtgcctggctatttgcagtactttgctggtggatcagtttccaaagagaacagaggcttgtgaggcctgccttttccttgatcctgtctaaagtaagggacatggtcagtacctcatccttgaccaggcttccagctctgctctaggtttcattccacagaggggatgtaccaggcaaatctgcttgttcattgaacaaatatttattcagtactcacaatgtgccggacattgtgttaggtgcttgggatatagtggtgaagaaagaggctggatccattctttgagagcttatagcttaggaaggatcacaaacaattaaccaagttaccacaatgaggaacagcttttgtagtggcctgggaaataccctgggctaaggaagggtgcatcgagggtgggaaggggtgaggaagtcctttagagcagtggttctcaaagtgaggtccctggaccagcagcattcacattccctgggacattgctagccatgcaagttctggggttacatgccagatatactgactcagaaatcctggggatgcggccaagcaatccaggttttgacaaagactggcatgattctgatgcatgcttaaatttggggggcatggatctagattttctcaatgcttttggctcagagtcccatgtgatctttcttcagaagagttaggctggaccagctatgagctaggaagccttctttctctctttagctcaaggcctaaacaagaggctgctcagttgcctgctctgtctcccctcccacacccacactcaggtctcctatggccttgcaaaccccttagtgcacacacccctctcaccacagcagatgtgt

SEQ ID NO: 315435 - DNA, 4001 bp, Homo sapiens
attatcatgtcatttgagttccacctcatagatgcctctcagattcatcccctctgcactgctttcaactgtcactttcttgcttcacacactcctcactcctggctttgttgtagtctttcctttgctcatggctcatctcaagccatgttccctctcaacctatcttctcttaagttgaaattgaatagtcactcttagcttaaaacctccagtagccctatgacttatatgtggtgggcttcaaagataatgtccagactgcccagcacaacatcttttctgagtttgcctcttttcagcctcacctccagtcccttctccaatcccaaatcctgtgcttcagtcacagccatcttctcttcattttccctaaactcaccatttccttcatgcttcagtggttttgcaggtccttgcccctctgcccaaaatgattggtgagcttctattcacccttcaatacctcctgctcaaatcccccttctctgtgaagcctaatctgtatcctctgtcatattactcttatcacataacactgcatgcatctagataagcacttattatgttatctgctacacacagcatgttcctcaagatcaaggactggattatgcttctattttcagctcttatgatagtacctggctaaaggaggcaccaataaatgttcactgaatgagtacataaaactctttataataagaactataagccctaacatcatcaggacttgattctcaagaattttttttctggcagtgactgtgaatttcttttccacccacctgtatactttatccttccatttctcttgcaattgacacttttcacaagtcttgtatttcatatcactgagccagattcttgaaatctggagaagctaaataagacctctgatcaaagttggaaaaaaatgcatctgcctaaagaatcacaactgtggtcattaattgagtgctcctgaagctcagatgctatgttaaatgctgtgcacacattacttaatttcatttttacaactggctagcatgtagcttctactacagtgaacaatgagcaagatgcctgaaatgtgctgtcctaggtgtcatttcaagtgtcagaacatgtcacccagaactgatagaaatctatctttcagaaaataaattccttacttctgcctctgtggatctcctgagttgaggcaagggacacattttggttcagagcttggatggtcctatatttagactaacagttccagctctttaacgtccttgggtgctcagaggggcagagtgagcccctgggtgtgtggactggtgactgagcagagtggctgtcctggcctcgcttgctgcccactctcccccatcacctgctgcacgctgctcttcctcagggtttctctaacatctcctggtgcacatgccatccccacccctgcctctcatcttgatcattccccccaagtgtgcaggctttgcagttccccagggtgtacccagacccggcatttccagctttgaggtgcgttgagcctatgaatcagaaagtaatggaaaaaatgcctacaactcaccagcttgtggcttgtctcaggcagtcctggtatgtcaggcttctcagcaactgaaccaaacagatctagaggtagaaacttggcatgcagaagtaggaaataaagtttcctgcagaaagtgaaggcggagatacagggcaactaatggtaaagatttgaaaaaaaaaatcagaaaaatatagttcttcttttccagtcaggaacattgtacattgggttgaggtctccagaataggattaattttgaaatcttgcttatgcaaccttgagtgtgagtcaggcaaaccctgtacatctgctcctgtttctaacgactctgagcttctttatcttgtgggtctttatacctggaacatttccactctctgctctcctactagtgataatttgcatgatatgagcacaacagaatgtttcatgttccagagaataaagggtattggtgatagtggaggaagtataatgaggttttactgcgatcatgtgtgctggtttcagtggtatcatggattcagaatctggttagaaatttcatttagataagactttaaaatttttttttatttaattcacataataattgtatatatttatgggacacaatgtgatgttttgctacatgtatacattgtgcaatgatcaaatcagggtaattacatatccatcctctgaaacatttatcatttcttttgaaataataatgatattgaaaaccctctcttctagctatttatatatacagaattcattattaactaccgtcaccctacttggagcagagcaccagcacttgtttctcctatctcatggtaactttgtacccgttgatcaactgctgcccattctcacctcctctctttcctccccagtctctggtaaccactgctctactgtctttttctaagatagcaactttttttttttttttaaattgggtttcattctgtcacccagaccggagtgcactggcacagtctcagctcactgctacctccaccttctgagttcaagccatcctcccacctcagcctcctgagtagctaggattacaggtgtgtgccatcatgcccggctaagcaacttatttaaaaaaaaattccacataagagtgagatcacgtggtatttgtctatctgtgtgtggcttatttcacttaacatcctctaggttcatccacattatcacaaattacaggatttcaaactttttaatgaaaaggaaatgctaaattatctcttgtgtcaggaacgtccttagcaagaagaacctcagttattttaaatgcccctccttggaaagacgttttgttaaaagataatgtaaattttgcaatggggacatcagactaggagcattcctaagattgtgcagagaacatggtgtcatctaagttggcccctggcactttctggaatccagcagacaccggaggcaggatctcatgctgtggacttggcaagtttctaagtttccatttcccaaatatgaaatatgaataacaagactgggggtctatgagggtaaatggacctaaagcagctagagcagggtctggcaggcactccacaggtaacaaacagaacagaacagtctgagccctgcagagtgccagaggttgaaggatgcatccactgctagagccaacaacaatcaaatgctcagggcagtccaggtgtcctttccagatttcaagaagttggcttttttgctgttgttgttgttgttgttgttgttgtgttatgttgtgtttttgctttcttttgcgacaagatcttgctctgttgcctaggctggagtgcggtggcatgatcatgcttcactgcagtctcaacctcaagcaatcctctcatctcagcctcccaagtagctgagactacaggtgcatgccaccatgcctgactattttttgtagagatggggttttgtcatgttgcccgggctggtctcgaactcctgggctcaggcaatctgcctgcctcagcctcctgaagggctgggattacaggtgtgagctcctacacccagcccagatttcagtcagttgtaaccatgtgtcctgtgtaagacctggtatatgtgctaagtaagacctgagacttgaagggtctcaggttttttcttggaagacagctcattgcctgttcaggaacatagcaagttccccagttgtctctcaatgtgtctctgggccggaattggagcatatctctgagatttcaataataagacaggtcatccctgacctggtaacactgagcttgctgccacttctggaatctcctgaccctggcatcttgccacctgttcctatgattcaacccaggatggggaagagcaagagccagaaattttgctctggctgattaggaccgctctccaattttgtcttcacattgtgatctttgtctccagccctgtaatttcataaacaagg

SEQ ID NO: 315436 - DNA, 4001 bp, Homo sapiens
acgcgcatgaaagatagtacacttgtatatcattttgtattctgataccttaacttctttacctttcacctagttccttgtggctaaaaattacttaaaaatgtaatttgtaatgactccaacatattgtatagataatcatgcttatttaaccattgcctttttgttgtgtgattaagttattcacaatttgctctgctataaataatactgcaataaacatatttgtgtgcattttaaaattatttccttaaggtatattacacaaatcacaatttctacattgaattatatttcgaagtctcttgatgcattttgtcaaattgcttccagaaagtgtgtaacaatatatatactcttggcactagtaggtgatggtgcccatttcagcaagcatccatcaatatggagaagatctaaaagaaagaaaaaattacttggccaattagatgggcaaaagggttgccattattgttgtaattaacatttatttcattactgattttttttaactacaagtattagtcattcatatttcccttcctgtgatttatctctttgtgccctttacccaatttattctgctgtacagatctgcttttttcttattaagtcatacaaagggctcatatttcttctcccagaagagctaactcatcctgcgtggttcagtgtaatcatcaccattttctggaaagagctgcacttcaaaaatatacttcaacttataccacatccatgtggaagaccccttattcccaccactctcacttgaagtacttgtcaaagttaacactcatcctctgtcaatccaggcgtttccagaagaatcggtaaggctttctagctctaccctctaacacagacaatctcattcacccagaaaaaaagacaccaaatcaatcaactgactcatctagtagcttgatttagtgtggattttcaatgaaaacttcaaataaatatatatatttccacacatacatacttaatgcacacacacatatgtatataatcagccctctgtatccatgggttccacatttgtgtattcaaccaatcacggatcaaaaatatctgggaaaaagctccacaaagttgcaaaaaccaagccttgaatttgccacgcagcaagtgctatgttgactccacatgaatgaagcgctctgtatgcgttgtattaggtattacaagtaatctaggtacttgtatttaaagggtactggaggatatttgtaggttatcagcaaatactacatcattttatataaggaacttgagcatctatgaattttggtatctgcaagggtcctggaacaaatccctcacagatactgagggaggactttgtatatataaaaatgtatgtgtgtgtgcgtatatatatatatatatatatgtgtatatatatatatatacacatatatatgtaaaattatatttttgctatttcttacaagtcaatataaataaacacaagctattaagtgtaagctctttggagtagtcatatgcacatagttgagaatttgtgaaagtataggagggtaacatgggcacagatgttgactaaagaggtataaagggccaagtttgggtgagtgctacacgcaaacttatcattgtgtggatgggagacagaaagggaaaattagaaaaagcaagaagaaaatggagatatgtggccatattttctcccactctggccccatactacctctaaattgctgtgtaccttcctctcctccctcctagatccaagagcactgctggaagttactacttccacctgcctggacccctccttgttccacctcccttttcctggaaaagcgacacctacctgaaaatctcttctaagtaaaaacttctattgtatttcgataagttcttgcccggataagcacaagaagaccagtggtacctgctaatttagtgaagtccttgatatgtccagtgatagcttaggcgtcaccactcctgaaacagagataccatcagatcacagacattagtaaagtagtaaacaatgtaagtatataacttcctgttttaaacagactagcttctcagttttgcaagttttcagaaagatactttcgtgcagttcttctttttcatgattgacaccacatactaaccagtcacctgagaaatccttgcaattagtgctgctttaggggctctccacccattggcattgctcatttttagtggtggggggttgttataattttttttttttttttaagacaggatttcattctgtcacccaggctggagtacagtggcatgatctcagttcactgcaacctccacctcctgggttcaagggattttcctgcctcagcctctggaatagttggtattagaggcacatgccaccatgcctggctaatttttgtatttttagtagagacagggtttcaccatgttggccaggctggtctcaaacttctgacctcaagtgatctgcgagtctcggcctcctaaagacctgggatttataattcttgaataagcattgatttgactcatcgggagacaggatgaagaatgaaataagaatttcccggcaaaggaataaactaattattctgcagggtccagtagacacttggatggggcaaaatgtggctgcaaaggtttagacaagtctaaaagacttgagtttgagtttcagttgtggcatacacagctacataagctgggggtagtaatttaaacttgctggacctcagctttttcatctctaaactggaaataatgatatttaagtcatagcattgccgtggaaccaactaagataaatatgtgaaaagtctctgcagaatatacagggctaaggaaatgtaaagtgtgggtagaatgccactgtgacataagcgtcatagggcagagccatgtctcagggcaaagcgtcacagggcagagccatgtgcctgctgtatgtgctgatgtgtcccttgggacctagcatggcactgggcacagagcaggtattcacccaatatttgtgggaagaactctgactaagcatgaagtgatctttgatacactgactaactcgacaaatgagtgtaatgcaccaaagtgtttatcaaacgtttgatatgtgtgtaggactgtgctgtatgcttcatgataaagaaaacataggaacaaaagacaaagaaagaggaaggaggataagagagacagagagagagagagagcgcacacacatgtgcattagagagagagagaaagaatagggagagaatttgagagaaagagaagaaagggaggaaggggctcagtttccaccttaaagagtctataaccttgttggtgatcagagacaacagagacctgataaaatatcaagaatgctcaaatatagttaaagcataaccaaagaaacatttcactatttaatctacagcatattcaatatagcatattcaaattggctaaaacaaaattttcgactgatagtaagatctcagactttgctgctggacacctgaatgcaaaacctacctttaccgcttaatagggatatcaccgtgggcaagctacataacctctgtgtgcctcagcgtgctctactgcaaaatgatgtagcaatgcctagcttgtaggatctgtgtgaggagcaaataaattaggactacgtggaggccagtgtgtggcatgtggacagcgtcatgaaaatacttatcatagttgtcatgacagaccctctcagtgagaaagaggcagccactcagggtggtctgaaatatagtataatatattgtgctctgattcagcatgtgggatgtcaaatgcaagttctacagggtttagaaaacaggaccatgtgggctgaagggactgggaacggcttcatggaagagaaagggcccgagggatgaacagaatttggccatgtggaaggggtagggagagtttccaggaaaaaggaagtagagctaccaagaccaagaggtgaggtgagcttggtccctgtgcagggg

SEQ ID NO: 315437 - DNA, 4001 bp, Homo sapiens
acaaaaaccaaggaatacagtgggggcaggaagagctccccaaatgccttgatgccttctttggtgcaaggcttggggatactttcatacagatagtaattgctgtatatgctttcatcgagggtggtgtctgctatatccgtggggttcattttttaactctacaggctcctcaaggcaggtctgggcccaaccagaagcagctaatgaggggaagagcaaaggagatttctgtgagaacaaaaataaaccaaagtattgctaaatgcagagcatggctgcgtactgttttgctccaggtctgtatatgcctttcccaagatgaagggctcgattactcacagggccctgcagccagacgaaataattttgggctttggaggcagaaagatttgtttcagattccagcttgggcactcactaattttcttacctctctgccaggagcttcagttctctcatttgtaagtgaggatcgtaaaaccccctttcaagcaggtgttctttgaggatgtgtttcaaaaagatatttcatagtctggggttactgaaatcactttcagggatgacaaaatcagttgaacaattctcaattgggtgtattttatatgatcatgatcatcatcaaactgcacgtaaaaatcaattctacgcacagaatcctattagagtgggaattcacctgatggatctagaaaacacacatcacagccagaaataaaacctctacctccccaaccaccttcacttcctatctaaattggcagataaagaggttgaaatcttcttaaaattaatcacatgctgacatgtgtatcagagcaattcagggctgaagggctttccgactcaaggccactcccttgcttccttcttgaggcttttgtgggaccctcacattccttgttaaaatccttttcacattcgtcagtaaattcacattcgatctctccccacacccccaccaccacacacccaatgcccaaactgtgtttctcaagaaagggcttttgaagccaggtgtgcagtggcccacgcctataatcccagcacgtcgggaggccgaggagggaggatcacttgagccaaggagctccatgccagcgtgagcaacataaggagaccctgtctctacaaaaaattgttttaaaagttagctgggtgtggtggtacgtgctgatagtaccagctactcaggaggctgaggcaggaggatcccttgagcccaggagttcaaggcgcagtgagctatgatggcaccattgcacttcaacctgggcagcagagtgaaatcctgtctcaaaaaaaataaaaaataaaaaggaaagaaaagaaaaagaaaaaaagaaagaaaaaagattttggtttactcatgcaaatagatactgaacacctgttacatcacagagtctccaaaaaagtttgttgaatgactaacaattctagtctttctccaccattttaccagtgaaaatgaaaggcataaacaaggctgaggagttaggaaattatcaggagaacaaaaagccaggagacacagctggtaagtgtctggaattattctgtaggccttgcgtgtgtggtatttcttgcctgggagtcttgctagaagcaagaagcagacaagtgtatattttttatgaaaatgatctatttatttggggcatgtggactcaggccagatgtgtgcaggaagagagtcctgcataaattagtgcccatcagatgagggctcagagggtgtggggacaggtagaaggtgtgtgggctgcaaggtaggtgccaagtgtaagccctagactcgtgaggggcctgagcatctcagccaggtccagaaagcagtgtgcgacccaagaccctgggaatgtccccgtccctgcttaccttgcttttctgaaagcggctctgaggaaggtctgtgaggcaatgccaggcttgctcaggaagcacgatgctaagaaggacccggtgcctttcaagggtgcgtggcttcctgtgagcacgagttatctccctcacccaactgtactaagttcaagtggggttttttgatagaagtaggaagcagaaaatgattcttagtcatttcccaagaccgaaggccaagaagatgtgccaaaaaaagattaagaaaaaaaatgaagtcattttctttttaaaaaagatttttagtttttttaaaaatacaaaaatgtatttgttggtttttaaaaaagagatttttttaaagaaacagggtctcactctgtcacccagactggtgttcagtggtgcaatcatagctcaccgtaaccttgaactcctgggctcaagtgatcctcctgccttagtctcccaagtagctgagactagaggtgcaagccaccatgactgactaattttaatttttggggagataggggtcttgctatattgcccaggctcatcttgaactactggcctcaagcaatcctcccacctcagcttcctaaagcactgggattacaggaatcagccactcctttttcgctttttagtttaaaaaaaaaaattccatttaactggccatatgcggtagcaatgatctctacattttggatcagcaacctgtttgctagtttctcatcatggatatgcaggggccagcaatcaagatgtgcaatgttctcctgacaactgggatctgagaggccagggtgagaaggaaggccagagatagtcaagaaaaaggatattcaagaagagagaagagaaaaatttgtccaaatgtatgtgtctgtgagtgacttggaaggcatcagccaaccacattctttgattcaatagttgacatggcctcaaaccagtgtgaagtggcctggcaacatagcttcaagtccttttgagtcaggaagacccctcacccaagcgccttctgcttggggattgcggagcttcattggcagtggtcttggctgaggtcttgatcttcactttggatgtgggtagcagtcataagcgaggggctgacatgagccctaagtctctcatagcctcagctttttggcaacttccagatgctttccctgtgtttcaactgttgcttagctctttgattcagcttaaaagagccataaagatcattctttctaaggaattggcataaatagaaattaaaacactgagctagaatggtgttagggaaccccttcttttttttcattatcacttgccccaaggagtcttttgagactttttttcctaacactccctcataaaattttaatgctacaaacataccatatatctatttatacagtgtatgtatatctgtgctttatacataaaatgagtatgaaatttttctccctccaagagccaagttttatcttgggggcaatattgcctctactgagaatgcacgagttagagtagagagtagaggcactcaactcaggctccttgcctccttgaggcatacagcaatatctggagacattttagcttggggtgggagggagttactactggctttttttttttttttttgagaaggagtcttgctctgtcaccaggctggagtgcagtggcatgatctcagctcactgcaacctccgcctcccgggttcaagcaactcccctgcctcagcctcccaagtagctgggactacaggcacgcgccaccatgtccggctaattttttgtatttcagtagagacggggtttcaccatgttggccaggatggtcttgaactcctgacctcaggtgatctgcctgcctcagcctcccaaagtgctgggattataggcatgagccaccgcacccagcctgctactggtttctaatgggtagagtccaggaatgctgctaaagtcctacaatgcacaggacagcccaccacagcaaagagttgtctgaccaagaagatcaatggtgctgaggttgagaaatcctgagctagagcaatgagctagagcaatgttccccagagtataaactgtggaaccagattcatggatagcctgcaaaagagaaatgggga

SEQ ID NO: 315438 - DNA, 4001 bp, Homo sapiens
gccaatcactgttctaagcatcatacccattcattcatttaatccttagggcaaccttatgaggcaggaaatatttttcacattttgcagacaaggaccttgaagcacagagagggtgagtaacttgctcaaagccacacagctagtaagcaaccgattttgaatgcgggaagcctgcactcttaactaccatgctaccctccctctcagtcctcgaaaagagaattaaaaggcaagaccatcagatgtttggtgacatgatgtagtcagagtgaaatggccgggtgcccaagtcccagggaaggtcatagatgacaacagccaattgtaaaatcctcacattttctgtgaagtttgtgtttgtagtttctgagttgccacaattaagagttgtcatacatacccaagaaataatataataaaaaatgtttcgtctgccaccacagatgaatgtcatgcattctgggtagtttagtcttataaccagctgtcttgcctagtctatttaagttcagctgctctagctgagaattttctcttattaaaccctgtgagtctcaaactccctgcaccttagactaggcagctgagagaagcccctagaaaagctcatttttaattttgaaccataaagaattatatactaactgtgccatgaaactgatatattagaggaaaattttatttggcgtttgtaatttaatattaattttgaccatttttaggcttccctcttgtctggaggaaaaagaaaaaagagaaccagacttagacacaacttcttgtgggcacatattcagaaggcatctcactggagagggtttagttctccttagcagaagataagatttcaagatttcagctaagactcatctctctgcaaatctttcttttgagaggtaaggattgttagttattaaaatactattgctccctttaaagtctttcactcacaatcatgttttgtatctttgatgttataaccgtctgaaactcattccaaactgtgaccctttccttatcttaaagattatattttaagataattgtatgagcacttggtgtttgccaaatgtcttctatgggtttcctgtaaagtcttttactcatctcagaagctaactaacaggccaagcagctgagaggttacttaccggggagagtttcttgtaggggaacggatgtctcagctcttctggccagatgagctgtgcaaatcaatcatatagacagtataaaagtaggaaatgctgtttcttttgaaggagggtggagttaaatcattaagtgtattgaaggcgaaaagaatcagagaacagttcttctttttaagttgagcttaaaataagctagagaatagatctctggtctgaaggtttatttacgggcttttctcactggattattttgtttttgttctctgctcatcccactacacagaatctgttagaaaatataaagaataaaggatatcagagctagaagaacatttacattcatctagtcaaaagcccacattttagtaaaagaaattactatccaagaagcaaatgatttgtacaagatcacagggcttttcaacagtaaggctaaaaggttaagaaaattctgattatcttaagagttgctattaattaaagccaacttaaaccaactttaaatgtagagggggatcctggacttcacattaaccctgtgtcccctttttctccactctccccgtatcccctatcccaccccaacccccacacagatgctcaccacccaatattattgttctctgtaaacggaaacaacctgttgtctaaagagttttaactatgggctcacgggtgagctaaacaggtttcccatctttttctggacccaggatcttagtggggattttcactctgttcactattttgttgcccttcaaaccagtaagcatttatgaggactcacactatgccagatacataggtggcaggattcttcactccagatataatctatctgaagctatgagaaattttccacatgacataagtatatggtcaagttcaggttctttatgactatactatatacagtcatatcaagctctcttggcggttggtgacatctgaaaatctcaagtattgtcagcagagctgagaagacagcagagagctactcccgagccacaagatgccctctgggcttccgtgaccttggctctagaataaaaagctttggcttgtgatctctaagaaggcaaatgagaccccaaacagcaaaattacgtgcccccaatcctacagaggcagactaacccaggggctaagccagtggcctctgtagtcagactgccaagcttgaaacctgtcttaccctcagctttctcgtctgggtattgggctgaatgacagtagtcatttcatgagttgttgggaggattctatgaggcatccacggccagcatctagcacatactatgcactcagtaaacatcaaactcttagttactctttcagcagtcctttgtcagagagagtttatttgatcaaatcctaataaaattggttcaccggagtctctgtctatagcagattagtttcagcaaactagaagctgaaaaggtaaagctaattgctggtgcttggagaatagaaagaaatgactgcttgggaaaagccagaacagtatagaaatagcccagcgatcaagacacccccacccccgccccatatagggacatatgtctgtgctacaacagagctcagtaacataatcataacaaggacagcgaatcatcgagaaaatgttctagttcatcccatatgtgcaattcaaaaggcattgattaagaactgcagtcatgctgctgggtttaacctccagcttcattactgctacttggctctgaccaaattattgaagctctgtgccttagttttcttaactgtagagtggaggttttaaaaaaacccaaatacaaacttactcaatatgcctgtggtggagagggaatgataacaagtgtagagccttttgggcacccaccctcgggggactgtttaagcagggaaatataaagtgtgcttttgaaagagttcaaaaataggtaacaaataaattaatataaaattttatagaaaatagatagcataaatacaactttggtttttcgaaagatagatagccttgtattcactggtaatccacttgtgcagaacccccggaggctgccggaccaacactgtatttctgtttgtggcaattgctggttcttactttcaccatgcagagctgaggctttgccatgttctgtttgtctgtcattagggtattggaggatgtgaagacatactcacccccagagggcaatgtgggctagcggagcaggctcggagtcacacacgctgtgctgctgacttgctgtgtgacctcggcaagatacttccactgcccaagcttccatttcctcatctgttaaatgacgtgctagacctggggcagcttccaccctaaatactacatgattctatggccaagttagtttgaaaaatataggctagatgggaaacaaggtgaggattcacaggctgaaacaaggaagcacagctttgcagtgtgcgttactccacttttgtgtttctggtccagaggtgtgttctagtaaccactcaggacaggggggttcagcccaaggattcacaagaaagtggggacccatgggaaattcttcagcatttaaatgaaatgttgttctggatacaataatgacaacaagctagcagcttatcatgctgtgacttagttgcttggtgtctgctactctttctactttgtccctctcagtttgcatggctcttgttctctttttattattaagtacattcggacaccccataggaaatgaacttttgatcactttgtcactctagactccatgcccatattggagggtgtttcgtgccatccctcctttttggggcctttttgtctttaaacagctgccccatgtctagtcactgcac

SEQ ID NO: 315439 - DNA, 4001 bp, Homo sapiens
tgcttgaggccaggagttcgagacaagcctggccaacagtgcaaaaccccgtctctactaaaattacaaaaattagccaggcatggtgccacatgcctgtaatccaagctacctcgggaggctgaggcacgacaatttcttgaacccaggaagcaggggttgcaatgactcgagatcaagccactgtactccagcctgggtgacagagtgagactctgtctcaaaaaaaagaaaacagaaacaaaaccaaaaaaggcagggccctaatctgatagaactagtgtccttaacagaagagaaagagacacaagaaattttgctccccttgtgcatggagtaaagaccatgtgaggacacagcaagaaggctgaaatcagcaagccaggtagagaagcctcaccagaaatcaactgcattggcagcttggtcttggacttccagcctttagaagtatgttaaacaacactttctgttgtttaagccactcagtctattgtattttgttatgtaaaccaaagggagtcagctgagatgagaaaagccaaaacttacaaagaaaatgtaaatacccatagttccatcacctagaattagcagctgctaacatattctcacaatgctttgggttatttttttttccttccttccttctttttttctcccttcttttctccctccctcattccctctcttccttccatccctctttctttttttatttctgatgcaatagagatgaagctaatgttccctttaactacacaacttatccccataacagaaacaacaactaaaaccaatttggtatgtatcattccaaacaatttccccctgtacttttacatatttatatatatccataaacaatatatatttttgtgtgttttaacttacataaatgatatattgttttaacttacataaatgatatattgtttttccctttgtattttgcttattgttttagagatatatctgcatgatattcatcagtttattcttttaattgctttcctaagcaccagaaaaaaaataactttataaatgcaatagaaaaatgatcccaattatactagcaatgaaaattactagcattactaggaataaaactaataaaaatgcaattcagttacataaaaattataaaacttgacaattcttctcaaattgatatatacattcaatgcaatttcaatccagacatatttttccaaggcatttgtttgctttacattcagacacccctctccactctgctacttttctatgatttgaaagcacaagcaagcaagcaagcaatttatttatttttttagagacagggtctcactatgttgcccaagctggagtacagtagttatacgcaggtgtgatctcacacaaagccctgacttctgggcgcaagcaatccttctgccccaggctcttgagtagctgggactacaggcacccaccagcaacttctttagtcatatgaaagtttgctcgctggcttctttccttaagaacagcacccaggtgtccttcagttacctgatagaagccctgtacccagcacaaggacagatcttcccagatgcctggtattataaaggatcttctcttatctaccttcccactcttgtaggagttttcactctctcctaaaggcctgcagagaatatggcacggtttgctctcctcagccagagcatgggcagccactaagacacatgcatgtttgtgggctctgaggaaatgcaaagatttaaaaaaaaattttacttcttgtgctagacctctgaaattttggtcttccctttgcctatcctctaaagatataaaaatgcccctgcctactcatgcccttcttccccaaggatgcttgtagcacataccttagtgacagcctttgttctggaggtttcagtgttgccaattccttcttcacaaagtctgtatcctcatgtgagtgcagctcaatgagcagcagcctctctggaggtatcctcccactacaaacagcagatggagagaaggcagtctcttgagggctccaccctcacacctagtcacctaaagggaggcaatgagggttaaatgagatcgtaaggctgaggccctaattcaataggactggtgtctcctaggtagaggaatacacaccagagctcactctcttgcctccaggtgctcagaggaaaggccatgtgaggacacagggagaaggcagccatctgcaagtaaggtaaataggcatcaccagaaaccagacttgtgggcaccttggtcttctagcctccagaactgtgggaaaacaaatttctgttgtttaagctactcagcctgtagtattttgttatggaagtcctagcagactaatacaggggttaatgggaattttctgtgttgtctacctagattttctgtaaacttaaaacctctaaaaaatagtctattaaaatttttaattgaaatcagtattaaaatgaaatcataattccattattattttgaagttatacaatttataccaggactggctttcctccatggtatgtagcatacacaaatgtgtgtgtatgttgtatgcatgtacatatattaactctttcaacaggaatgccatttgaaaatcactttaagtcagtttcccctatcccaggagagtgaacatgagtcccagaattgttgggaggaaatgacagaagttccagaatctcctcatctccaacccactcattcctggagaaatgcagtagaaatatctgctggatgccaggtacggtggctcacatctgtaattccagcattttgggaggctgaggcaggaggattgcttgagcctaggagttcaagaccagactggtcaacatagcaagaccccatctcatacggtttggctctgtgtccctacccaaatctcatcttgaattataatcctcataatccccatgtgtcaagggcgggaccaggtggagttaattggatcatgggggcagtttcccccatgctgttctcatgatagtgagtgagtctcaagagatctgatctgatggttttataaacacctggcattttccctgcttgcactcactccatcctgccgacctgtgaaaaatgtgcctgcttctcctttgccttccaccatgattataagtttcttgaggcctccccagcaatgcagaactgtgagtcaatttaacctctttcctttataaattatccaatcttggtctttctttatagcagtgtgacaacggactaatgcatcatctgtacaaattttttaaataaaattagccaggcatggtggcatgcacttgtagtcccagctacttgggaagctaaagtgggaggatcacttgagtccagcagtttgaggtgagctatgattgagccactgacctgtctctaaagaaaaaataaaaggaaatatctgctggtacctgaattcatacctcggcaaattcccctcaccatcattcatgttttgacgcagtttggggaaaacccagttcctttatgagagttttgtatgtgataagcaaagatcaatggtgagccgatggagaactcagggccctcaggtattactagtccatgtcatgatggtgggaactatgggaccgcctcatcagtgagggcaggtgtgggggaagccaccttcccctccaaagcccagttaagcaaggcctgagggactaaggtggaattccccccaagcccagtttctagtgcaagctgatctaaaccccaaacagtctctatcttcagttcctgaggattcttttatcagctgctcctccatacttggcacagtgcttagtgcacagcaacttcttaataaatagttgaacagagagaatgaggcaaggtggagatgtggagtctggtgaagagttggaggaaaggactgaacagccagaatggaaggatgctcctctttttgtgtttcctgagccagatctgagggctggtgtgggcccctgcaggactggacacttgcctgctgtcacctg

SEQ ID NO: 315440 - DNA, 4001 bp, Homo sapiens
atttggcttaaacaatgtgtaagacatgatccatgtcctcaagaagcttgcattcaaatacactgagtaagtcatggctgcaaataacaacaaagggaaagtgctatgagttgtggtaggaattggaagaaggaggtcatgtctttagctctggggagaatccaggagggcttcattgaagaggtgacatttttgcgggtccttgaaggccgaagagcatggagacatgcaacgaggggagggaacattgctccagggtgggaaaacatatgcactaaggcatgaaagtcagaaagcatggggtatgtgcagggacctgggagataaaggaagggagagagctgctaattctccaaaagagaaaagtgcctattagaaaagttagcttggaacctattattatccaatcactatttttgtattctctaacattcttacgtagccaacatgaaaatcagcatggggttattgtgcacacagcatctccccacacttatagcctctgatgcttacagcactaacatcaaatcagatactaacatgagtcaggaatgcaggtccttactttgaactttgtacaatttgctacacggagcttgaatcatctcttacattttttcatagctctgctttttgttccctacacgaggcagggtctctgagccatctatcagatccatccactcaccatgcctggatcagatgcctgccaaccgcccagcaggggctgcacagggcccaggggctcccaacacaagcctgtgagtgaggcctacacaaagaggcttcagaacagataagcagatattggaagaaaaggactccgaaattccagatgctgaaatagtaaattagcttttgctcgttcaggaaagggagtaaggagatgggatcccacagactggctgctgcacagcccttccggttcagcacacagtgaccactctctggatggacttgccagccgtctatggagtaacagctaattcagaactaaagagggtaggtgtgtttgaaaaggcaaaccagcatccactgatgagtcatttaaaataactttttgctttactctgatcataaaggagtatttttacaatgcacaaaaaatccccaaaatgccaacatacataatatagaaaataaaaactcctgaagcaccctttcctagtttagccattgttaagtttctgagatacttcctttctgactttttctctgtaacacaacctcacacacacacacacacacacacagacacacacgcacttaatagaaaggaaatcagactacacatataatcttctatcttgctttctaattgcccatctttcatggatcaccttccatgccaattcaacatagaaccgtatcatagaattggatggctgctgtgtattccattgtctagatacatcacaattcatttaaccattcgcctcctgatgcatagtttccttgtttccagtttttcactgctacaaagaatcctttccatggggcagtgtctcagactcaaggacctcatgggtgtgtcctttacccctggccaccatcttgtcccccagcacctgcttctccttcctttaaggtataaatcacagactgccttaagcctaagcttcatgtatgtgaagggggagggagttttattactcgccctacaagaaacctgggttgggcatcaccaattcccatttaccttcctggaagtttctagaaaagtgcctggtgcccatgacctctgaacaaatgagtgcaagcccaggttttagaagccatcatagcagcacacaactgagggccaagatgacactgggttgggggcaacaagaagaagagcaatactcactgtggagggcgatgcaactctccctgggacagcaggcaccaccagctctcagtgtctggggaaagagctgggttgctctctgcctgggatgaggggcaggctttgtgggttctgagcaggcagctacccgataacaacacgagaaaggaagccaggccacccctgcctgtgttgtcactggtggggtagcccaagagggtggggagtcacctgtgtagcttccagcaatcagcggagtcaatcatttgcaaccagaaacaaaaagctgaaaactgctgggataaggggaaactgtctcatctgaagacgcacatacagactgatgatctaagagcaaattctcttcctagacagcacagctgcttacagggaatggggaaattggaggatcccatcgagagaagtcagccttgtcaggcttgccagaggtgcacactgatgagatttctttaggtggtgtcacctgagcaggcctgtatcagattaccacccagtggcagatgtagcactatccatcgcaacataccttttctggccttgacagacgtaccagaacccggagggctgtgctatccaacacagtagctactaggcagatgtgcctatttaaattcaaattaattaaaatgctaactagggccagtgcagtggctcacctctgtagtcccagcactctgagagactgaggcgggcagatcactaggcagagcctaggagttcaagaacagcctggacaacatggtgaaacctcatctctacaaaacacacaaaaacaattaggcaggcatggtggcccatgcctgtagtcccagatactcagggaagctgaggtggaaggatcaggaggcagaggttgtagtgagccaagattgcaccactgcactccaccctgggcaacagactgagaccctgtatcaaaaaagaaaaatgttttaagtgttaactagtttctcagtcatgccaggtacatttcaagtgctcaatagccacatgcagctagtggctatcccaatggacaatgcagatacagaacctgtccatcgtcgccaacagtgctattgaaaggcactgctttagaaagtctgcctgtgagatgtagctaggaacacatggagtgctggaaagccacagacaccttcaaattggggcaaatctagtaaggttttgcacatcagatacattaacaaagataatacaataaattgtattaattacaggtgttttggtaaaactttgaaaaaagctaaatatacaaaatattgcatttttaatgaagatcacagacgaagtcttcccatccactgctacagtggggacttcaatcctgatgtgattaatgatttcctgtcattgttatgacaaagatcccttttatatatttgttctgggggaaaatcatgactacactcttgtggatgttaatttccacctcttggtgtattgattgtcccgaggactcaatgccgctctgtcatggcgtggtactcccaggcgcatgtccccttcatcaccctcagttcccgtagagcaaagggatgcagaaggtgcacttgggtttattgtctaaatggaaaaaggccaacaaataggtcatctgaaaggtagagggcatgcacagtaagaacgaaagaggtgtctgattcatcagccttaaggaacggcggtgcgagggagccgtgaaattcccttccctcggcgggcgctcattgcaaataaatggtgtctgaaactatacatagctgagaaccagccagatgctctggcatctcactcctccctctcacttggcaaataaagacacaaaaggaactggtgctagagggaagaagatgttcccttacttgactttcttggctgaatttgtttctcccccgtgtttgattgcgtccttggaaagcttgcagcgaggtgagacacgcactattgcaattgccatgggtgaggaaaagcctgtgcttctcccttctcttgactcaggctgtttcctcatcaggtaagagcatacaaggtagacactgcttgcccctagacgttggagtgagtctcgggggaggaaggaaggtgaggctggccgtcagggaagaggagaaggggtaaatgcaccggtgtgggaagattccctcctctgcacgggtccccgtggtccaggtga

SEQ ID NO: 315441 - DNA, 4001 bp, Homo sapiens
aaatcaacttacaaattattttaaaatacattaaatagatgttttaaaatacatttatttcatgtcgtttgtccccagggtttggagtttgatgttctggaccaagcgtaggctctgagcaaatgctaccagggctggagaatcagttctgccacttcctagttatgtgatcttagacaaatttccgcgccttagttttcttctcagagaaatgagactagtcctatccacactatggacaagtggtaggaggcgaaggagctcacgtttgtaaagagccttgcacggtgcctgagacaaattcagtgcttagcaaatgttagctcacctctcccttttcttcctgtatccgattttgtatacaaatgtgtagaaaatttacatgaaataatgcagaaagatgaaaatccatgtttattcttcttgcatttggtggatgctagtttacacttcggtggaatggtcaggttcttccctcgatgtgccttgtgcagactgccccctgggttgaagtggggtgttactacgcagatggaaacagcggcagaggtatttgctaaatgtcccatcaagaaacgcatacaggagagggttgatgcagcagtgggtggtggcgatgagtttagtgatgtgaacacttttgtccagattgtagctgctcttgcagtcactcagggagaagtgttctttgaaagtggacaggaaaaatgcaatattgtagggcgcccacatcagaaggaagactaccattatggcaaaaacaagcttgaaaaggctatacctctgctccctgaaccttagtgtttttctcatttgcacatagagaaatgtaaaaataaatagggggaggacaagaaccgaaatgttcatttttaaagtcagaaaatgcttccagaatgtctcatcagctggcaggaagggagttctgctaaatgcacacttgtatttctggtcttccatctgaggtttataaaccacgaattcaggcaaagtggccagaatggctgttacccatgccaggacacttgtaatgatgccacagggcaccctcctcctggctgagaaaaagtttcccttgtgcaaaaacactaggtacctttgcacagtcagaaggcaattgaaaaatgtctcactgtacaggcccacgaagtacagtccaatgagaattttacacatgggatcgcccccagcatgagcccagaagggcagggtaagcaagaaacacaagttagaaactgccaagtttagaagatagatattttccacgcgtttgagtcctttatattttaccaggataagcacaaccaggagattgtccaggacaccgatcacaaacacagcagagcagagtgatggcaccagctgggctgagagtgcctgggcgtcatacttgtcacattgctctgcctcatcgctctccagttcaccttctatgaggacatcatattcatcctctggtgccagcgtgtaattggccatcttcagactgccctgtggagaaatgggagatgattttcccctccgacagctgccttatcctggaggaaacaacaaactggacctggattcatacagccccactttccctttctggagctacattttagccagagtaattccctatttcagaagactgaaataaacatttctttaacgtgtgcccacttccccagagcagcaccattcccaatctagttgttaagcatgtaagtgcttagcagtgtgccaggtgccacgggaaataaagctggcatgacaccgccttggtagaacttaccttcttttagcagaaacaggacttgcctacatgaacacaatatgtaagaaaatatataattaaagagaaccaagtacgatggcttacttttaagaaacgggtgtagatcataatttctgcattttaaaaagtttgctcaccccccgaagcagcttcctgtgacagctgagacgtttttctctcgaagggtataaataaatgtttgcaaaagtgaaaccatgctcagcatcaacatggccataaggggttaaatacatagatgacacacagatgacttaccactgggctgagctcctgcaggggaagggcgcagcctccagacccagcatccgggagctgtgggaatggccccggacagtggatgccctccttttgatcagactgctcctgaccctgaggggcacgagaaaccactgttgattcccctggtggctctacccgccccactcaccgagctcagggaccaactgaaataaagtactcaaaagctcccccaggcctccagaggatctctgaagcgtctgaaagcaaccgggaagttgtttcctcctccctctggccctgtaccccgcctttgatttccctgtgacctttgacagccgtcttctggccttctgagataagggaactgtgtcactgccgctctgagtggtagcaaggaagtgatgtcaaggtgctgagaactgccaagacgctctggcttgtggcatgtgacactctgagtaggtaacaggtaccagctactgtcagcagggaggaaggtatgtggtgaccacgagtccagacctgagggtcctgaccctctaatgcggcctctcaccagtgttcgcagaaacccacccgctgattcaatacggggaccaggaacctgccatgacagtcacggtgtgtttgggtttttattgtcatttttgaggggcactgtgtgctttggttaagactgaggcctcaaaagagaattttaggaaaatggaagccacagggtgatgtcagctgggaaaaggccaggggcagaggtggggtctcagcggcagtgagcatagggctgccctgggtgtcaacactgaggaaagcaaaggggtttgcaagcagccagaagtgattggtgctgtgactcatgggggagctgaccccactcggaaaaggagaacccagaggaggaaaatcccgtggtgatgacacagaggcgacatcaagttgggtgggagagaatgtgaggaggacaagtttaaccccaaactgaggctgggggctagggtaggtttgagtccagagagaaggaaattgagagaacagcccagatttggaatggtgggaggaggctgtggggaggggaggctgtgggaagagagtgggacggggagggcacggtctggaagaaggacgaaccgagaagaggaacttgaaaataatgaaaaaatctagatgagcttctcttgggtcaacgactcagcagctgtgactaacctaatttggggatcagacctatttgcttagaatttatatattgattaaatgacatccttttcccaccaaagatgtgtctgaggtaggattgaatacaaaatttgtacctgtcaaaatagaaatagaaaattaagaaactagcctggcactgaggcgcattcctacagccccagctactcagaagtatgaggtgggagggtcgcttgagcccaggagtttgaggccagcctgggcaacatagtgagatcccggatctataaacaatataaaaattagccagatgcagtggcaagtgcctgtaatcccagacattccagaggccaaggtgggatgttcacgtgagcccaggagttggaggctgcggtgagccatgatcatgccactctgcactctggcctgggtggcagagcgagacactgtctctggaaaaaaaaaagaagaaggaggaggaggggcggggagaggaagggaggagagagaactattaagagaaaaataaacacagaaagagcccagacaaatatgtgattgagcattaaatttaactccacgtgtgccgacagacaaggcagaaagagaaacacaatgatgtttgatggcagaggagttggtgctggtgggaacctaagctgtaagtgccctctcctctcttgtgtgggtctcctgtgagtgagtgagtgggggtcatggtgccctgggacactcttcccaccccctacagcctgggatcagcagtggcccctcctcctgggtctct

SEQ ID NO: 315442 - DNA, 4001 bp, Homo sapiens
ctctcccttttcttcctgtatccgattttgtatacaaatgtgtagaaaatttacatgaaataatgcagaaagatgaaaatccatgtttattcttcttgcatttggtggatgctagtttacacttcggtggaatggtcaggttcttccctcgatgtgccttgtgcagactgccccctgggttgaagtggggtgttactacgcagatggaaacagcggcagaggtatttgctaaatgtcccatcaagaaacgcatacaggagagggttgatgcagcagtgggtggtggcgatgagtttagtgatgtgaacacttttgtccagattgtagctgctcttgcagtcactcagggagaagtgttctttgaaagtggacaggaaaaatgcaatattgtagggcgcccacatcagaaggaagactaccattatggcaaaaacaagcttgaaaaggctatacctctgctccctgaaccttagtgtttttctcatttgcacatagagaaatgtaaaaataaatagggggaggacaagaaccgaaatgttcatttttaaagtcagaaaatgcttccagaatgtctcatcagctggcaggaagggagttctgctaaatgcacacttgtatttctggtcttccatctgaggtttataaaccacgaattcaggcaaagtggccagaatggctgttacccatgccaggacacttgtaatgatgccacagggcaccctcctcctggctgagaaaaagtttcccttgtgcaaaaacactaggtacctttgcacagtcagaaggcaattgaaaaatgtctcactgtacaggcccacgaagtacagtccaatgagaattttacacatgggatcgcccccagcatgagcccagaagggcagggtaagcaagaaacacaagttagaaactgccaagtttagaagatagatattttccacgcgtttgagtcctttatattttaccaggataagcacaaccaggagattgtccaggacaccgatcacaaacacagcagagcagagtgatggcaccagctgggctgagagtgcctgggcgtcatacttgtcacattgctctgcctcatcgctctccagttcaccttctatgaggacatcatattcatcctctggtgccagcgtgtaattggccatcttcagactgccctgtggagaaatgggagatgattttcccctccgacagctgccttatcctggaggaaacaacaaactggacctggattcatacagccccactttccctttctggagctacattttagccagagtaattccctatttcagaagactgaaataaacatttctttaacgtgtgcccacttccccagagcagcaccattcccaatctagttgttaagcatgtaagtgcttagcagtgtgccaggtgccacgggaaataaagctggcatgacaccgccttggtagaacttaccttcttttagcagaaacaggacttgcctacatgaacacaatatgtaagaaaatatataattaaagagaaccaagtacgatggcttacttttaagaaacgggtgtagatcataatttctgcattttaaaaagtttgctcaccccccgaagcagcttcctgtgacagctgagacgtttttctctcgaagggtataaataaatgtttgcaaaagtgaaaccatgctcagcatcaacatggccataaggggttaaatacatagatgacacacagatgacttaccactgggctgagctcctgcaggggaagggcgcagcctccagacccagcatccgggagctgtgggaatggccccggacagtggatgccctccttttgatcagactgctcctgaccctgaggggcacgagaaaccactgttgattcccctggtggctctacccgccccactcaccgagctcagggaccaactgaaataaagtactcaaaagctcccccaggcctccagaggatctctgaagcgtctgaaagcaaccgggaagttgtttcctcctccctctggccctgtaccccgcctttgatttccctgtgacctttgacagccgtcttctggccttctgagataagggaactgtgtcactgccgctctgagtggtagcaaggaagtgatgtcaaggtgctgagaactgccaagacgctctggcttgtggcatgtgacactctgagtaggtaacaggtaccagctactgtcagcagggaggaaggtatgtggtgaccacgagtccagacctgagggtcctgaccctctaatgcggcctctcaccagtgttcgcagaaacccacccgctgattcaatacggggaccaggaacctgccatgacagtcacggtgtgtttgggtttttattgtcatttttgaggggcactgtgtgctttggttaagactgaggcctcaaaagagaattttaggaaaatggaagccacagggtgatgtcagctgggaaaaggccaggggcagaggtggggtctcagcggcagtgagcatagggctgccctgggtgtcaacactgaggaaagcaaaggggtttgcaagcagccagaagtgattggtgctgtgactcatgggggagctgaccccactcggaaaaggagaacccagaggaggaaaatcccgtggtgatgacacagaggcgacatcaagttgggtgggagagaatgtgaggaggacaagtttaaccccaaactgaggctgggggctagggtaggtttgagtccagagagaaggaaattgagagaacagcccagatttggaatggtgggaggaggctgtggggaggggaggctgtgggaagagagtgggacggggagggcacggtctggaagaaggacgaaccgagaagaggaacttgaaaataatgaaaaaatctagatgagcttctcttgggtcaacgactcagcagctgtgactaacctaatttggggatcagacctatttgcttagaatttatatattgattaaatgacatccttttcccaccaaagatgtgtctgaggtaggattgaatacaaaatttgtacctgtcaaaatagaaatagaaaattaagaaactagcctggcactgaggcgcattcctacagccccagctactcagaagtatgaggtgggagggtcgcttgagcccaggagtttgaggccagcctgggcaacatagtgagatcccggatctataaacaatataaaaattagccagatgcagtggcaagtgcctgtaatcccagacattccagaggccaaggtgggatgttcacgtgagcccaggagttggaggctgcggtgagccatgatcatgccactctgcactctggcctgggtggcagagcgagacactgtctctggaaaaaaaaaagaagaaggaggaggaggggcggggagaggaagggaggagagagaactattaagagaaaaataaacacagaaagagcccagacaaatatgtgattgagcattaaatttaactccacgtgtgccgacagacaaggcagaaagagaaacacaatgatgtttgatggcagaggagttggtgctggtgggaacctaagctgtaagtgccctctcctctcttgtgtgggtctcctgtgagtgagtgagtgggggtcatggtgccctgggacactcttcccaccccctacagcctgggatcagcagtggcccctcctcctgggtctctccacctcctgcagctgggcaggacactcaggatcttgaatgagtaggtgcgggcagctttactctcgatactcatggatcagttccaggaaaaggaaggaaagtcaagtcagactttgaaacttgcaaaacgctgggagtacgcacactcttcctcattagtagaggacaaaaacagcagtcaggcacctcatgtaccgcatgtcacagagtcatgtgagatgtgaaatttcccaagtaaaaacacagaatcatgtgaggtgtgaaatttcccaaagaaaaatgttttgtaaattcaggatcaccctggcttactaatattagcatga

SEQ ID NO: 315443 - DNA, 4001 bp, Homo sapiens
tttattttcagctaaggcaattgtggagacagatactggcattccaattctatgtgatattttttaaaccattaggcttctctgacgtggaaatccaggctctaccagaggccatgatgaagaatgcagaatggacaagctctcatagagaaaatctgtgttttaggacaagagagaaagcagatacataccaaaccatatattgtggactgggagccagcaatgttaagaaacaaaacacagtgattgaggcaaaggaaatcagaaggaaagccttactcttaaatagatacgtatttttattttacaggttttttttttcctcgagtctgtgcagaataactgaaaatacgaccaatctgaaaacaacagtatttatatgtttacagggaggtgaccggggctaaaacaaatactagatttgtgagcaaaagaaatcattttacctctctgagactccggaaaagtaatagtaccaatctaatggttaaaaagactaaatgaagtagtatataaagctcctagaatactgccagtagaaataagcactaaataaatgttgctcttatctcacatagttattatgagaattaggcaattaaagcacttagtatagagcctaggttatagtaaatgccaatacgtgttaggtagctaaaaaaattaatcgatcaaatcatatagggggaactacagtcctgaaaacaaagaagcccacttataacccttgccatgcagtccagggttcacaaaaacctgggtcttaccagacagctgcccacctggtagctatattgcccctattcatgcctcttcctcagcaagtttctatgtccaaatccacattaccccacatgtagtcacaaggacttggaaatatcagcctttccgcctgtttatgtgtaaaacgaggtaataattcatttttagaaggatagttacaaagaagattaacagcatctagcttgcagtagaccgtagctcacagaccaccattctcctttgttaagaaagacagtgaaatcattggctatgtggtcttgccaacaaaccatacatgaaaaaattatcttgaggcattcactgtatttggattcttataccaataccattgtatttggatttcatataccaatgggatatatgaaaaccttctccgttttttgtcttgtaagctggttccgaataaacaaaatgtctgtttctctagatacccggggttaacccttcaaagcattatgatcacagagcatttcagctctctcaagtgtagcttcagctttaactgatccttcatggcttcccccaggcaagggctaggagggagaaaggggctgcataacaaagaggagacgcaggagctctcccggagaaagcgagcctggaaatctgtatctccgccgcagcttttggtgccaatatggaaccaatacagcatttctctttcccttttgggggcagtttaaaataggctgtgcctccccagttttgggagctggagccagtgagccgagccgagcctgcccggaggatgcgccagcttcgtcagcgcggatcaagagcccccggagccccggcctggtgcatctttttttcaggcaattggaatggagaatctggacgccagcagctgcctgtaaaccaccctttggaaggcaaaatccgtttctcagcaagagaaagcgcttagagaaaagcgctgccatcaacaccgctgatctagtccccggaccagattgtggcaagagccgaagctccgcgccttccactcgccgcccgccccagggccaccggctcaacatcgcctgccctgcgccctccttcccaagccccggccccgctcaccagcctctccatccttgctcctggaggcgcgcgcgaggtggctgactgcggatgtgcgcctggagctctgctaggcaggcgggaggagcgtcacctgtgcccctgccgcacctcccgcctcttcctcctcgctagcccccttctcccactccgttttccccacgccctcacaggagcggaggctgtctgtgtggggggaattaaatgatgtttatattcagctttgtctattttcagacatttttcccttttcaaaggtgaccgctggggaaactgacaaagtgtttggaaaaaaaaaatcatttttttttttccattttcctgctacctggactgagaaaggaaatgaggtgggaggttgtggagatcagttgttgacctgttagctcttgatgtagtggcaaaggattcaagctgaatttaaccaatggacttttttttttttttaaagaaaaaacttacatttattatttttaaatccagattcaaattatatatttaagcaattccgtaatgatttcacctttcatgatgtgatcaattctttggtgaagagtttccttccacttgcattaatgatgaggattcttttttcccttctccttctccttcttctccttcttcttcttcttgagacggagtctcgctctgtggtccaggctggagtgcagtggcgctatcttggctcactacaagctccgcctcccgggttcccgccattctcctgcctcagcctcccgagtagctgggactacagacgcccgccaccatgcccggctaattttttgtatttttagtagagacggggtttcaccatgttagccaggatggtctcggtctcttgacctcgtgatccgcccgcctcggcctcccaaaatgctgggattacaggcgtgagccactgcgcccggccctcctcctcctcttcctccttctccgtctccttctccttctccttctcctccttctccttctcctcctccccctccccctcctcctcctccttcgtcttcttcttcttgttccagagttcttggctcttaaaaaaaaaaaaaaaaggacaaagaaatcatcaagtgttcacctcctgaaggcttttgtgttttactactaccaccctctcataaggagctgggacaaagctttggggttttgtttttgcttctttttacagacaaagtctcgctctgttgtccaagctggaatgcagtggtgcgatcataactcactcctgggctcaagggatcctctcacctcagcctctagagtagctagaatgatagttgtgcagccactatgtccagctttttttttttttccagacacggggtcttgtgttgcccaggctggcctgaaattcctagcctcaaatgctccttctacctttgcctcccaaagcagtgggattacaggcatgaaccactgcacctgacctattctcccacttctttttttggggggggggcggtgggagacgggggcggagtctcgctctgtcgtccaggctggagtgcagtggcgcgatctcggctcactgcaagctctgcctcctgggttcacgccattctcctgcctcagcctccgaagtagctgggactacaggcgcccgccaccacgcccggctaattttttttgtatttttagtagagacggggtttcaccgtttagccaggatggtctcgatctcctgacttcatgattcgcccgtctcagcctcccaaagttgtgggaattacaggcgtgagccaccgcgcccggcccctattctcctacttctaacaccatagactaggctcacctgattttgaattttatatgaatggcatcgtagcatatgtcttcacttgtttctgggttttttactcaacagtagattttaaaaatccatccatgttattgcctgtagtgtggcttattcattctcactgatgtatagtatcctattctgtaaatactgtctattacaatttatttatctattcttctattaattaacatttctttgtttttcaaattggaagcatttttcatagtggtgctataaacattcttatacctgtcttttcacaagcatatgtacatcattctattacatttatttttcccatatattttcctatcactttatttttaaccttcctctattagagaaatat

SEQ ID NO: 315444 - DNA, 4001 bp, Homo sapiens
aacctttcaacctttaaaattgaaaattacaaattatgttttaatcattttttttccttttcccaggagtaacagtgcaatttgacataaacagctccttgcctatctggctgccccagccaagctgggtcctacacaagttgctataagagctttctacaacaagatctgaactactgaaagattcagatcacttgactttttaggtgagtaacagtctattaaggctaaaactaagtattggcttgacttttttcactgatgctcttcagtgaaaagcacaatggttaaataatgaggaaaattgcccactcaaatgtttagtggtgcttactgatgtatatcattactgattgtgattctggcacatactagtcatatctaaccttggccaaatcatttcacctctctacgcctccatttctacctttgtaaaatggagaggtgtcttccatgtctacttcactgggttgctgtgcagatcaaagggaaaaaagcatgtgaaaattctcaatagaaaggtgcagtcaaagagtgtagttattttgcatgtgttcactagtaagattaacatgtggaaagaagattttttgtggaagataagcagcattttaaagtcattcagaaatgaggaaaaataccttttcttctttcaattatcaaattataacatttaaaaccaactacactcttcccttgcagctgctctgtctaccaaaagtgaaacctgaaaactccctcccacaccaactcctaccaaccttctacagtgaaaccaggacacccccacagtggcccaagttctctataacttctataggaacctagatgttgaagagtctgttctctaactcgtagtgtctcttacagcccacacatcttgaagataaatacagacatacatcacagacgcaccactgtaactgtaggcatattatatttttgaagtgcctaatcatcgaaagtgacagaaagcaataaactgtcctaatctatgccactggcaatgtggacctaaatgagttagcgttcttatcttaaaaaaaaaaattaagagagaagaggctgggtgcagtggctcatgcctgtaatcccaatgctttgggagtctgaggtgggagaattgcttgaagacaggagctcaagaccagcatggacaatatagcaagactctatctctaccaaaaattttaaaaattagccaagcatagtggcgcatatctgtagtcctagacactcaggaggctgagtgggaggactgcttgagacctggagttacaggctgcagtgagctacgattgcaccactgcactccagcctgggcaacagagcaagaccctgtctcaaaaaagggggttggggaagagaataagataaagagaacctaactgactttgattgctgctagtatgtatttgatttatcctgccttgttcaaaaaacaggaggaaataaggaaatggacagtaagacaaattatagagatctgtatattgtagtaggatacaaagtacaacaagcaagacaccggaaaaaaggataataaagtaaactagatatgggagtaacccatatttagcaaccccctatatttattattgcaattgatttgtattgccccagaagaaagacaaaaaataaactcaggaagagctgagaccaggtttctcactgttctcccaaagagaattcaaacttaccggccactaagaagatagtcaaaatcaacagtagccctaggttagcagttctccaagggcagagcatttctgttttctctttttctgcccttcactcagtacttttcctccacacaggtacagaaggaactgtgcgcatggtgagaccctctctggtcaacttctcagtacaggatcctcttaccccatcaacagtggggcactcccttccttctagccccttccttcacgtctatgtggtttagcctggttagtaacttggacgaacagaagcttttctctggaacttgacacagcaatagatttcctgtatgaagccctgaagcaaagacggaggaagcagattgattgaattatctctcagctcattggttctcctctcacttctgctgtacacagacaaactttacagtaaggcattgaacgtgtccaagataaacagatttgtctaaacttgcaccaaaaagtaaaacagaatattgatctactttggcccatccttgtaaatttcccaattatgatgacttttagaggctttctccaggttgaagagctttacggccttagtatttgagtctggaatacaatatgttttcttgaaaattattgtgtgaaattcctgtctataatgggagtcaacacacaaccctgtaaacatcatatgtgtattagtttcctattgctactgtaagaaattaccacaaactcagtggcttaacacaacacaacatttattatcttacagttctggtgatcagaagtctgaaatggatcttaggggactaaaatcaaggtgttggaagggctgcactccatctggaggctcgggcagaatttgctccctgccttttccagcgatttgagaatgcctgcatttcttggcttgcagctacatcattcggacctctggtccactgtcacatcttctctgactgtgacccttatgcctcccttttataaagaccttgtgattatttttggtccacccaaataatccaacatgatctaatttcaagatcttaatttaatcacatctgcaaagtcctttttgccacacaaggtaacattcacaggtttcggtaattcggacataggtatctaccttgttgggggtgagggcattctgtttatcagaactcagtacttattgccattcagtttcacctttggaaaattagactgatcattttaaccaaattacaaataatcacccatctcttagttgccacacatctggaattcagactccccctaaccaaaaaaaaaaaacaacaacaacaacaaaaaaacctcttccttactgttgctagttactatgttactatgcttttaagttatgtctgagagagggaaaaatcttctatgtgctgagaattttctgccccaaggcaaaactgtacaggaaggggaagaaaacattgcaaacaggaaaaagattaaacagcatgcattttttttctcagttagcagtttcatcttccttcttgccaaacattataaatatttccccccttccccttctcaagcttttttttccagttaattaatttgatgaagacagtgaaaccagatccttgagggcatggaacacttaagggtatgagctgtgacaatgggaagaccaaaacaaaaatgtcttctcttctgtctaatgtttcaccaggtgtcggaaaattagtgagaatacatcatttaaaatacagataatattctggttttccactacatagaagtgaaagttggccgggagtagtggctcatgtctgtaatcttaggacactgggaggccgaggcgggcagattgcctgagctcaggagttcgagaccagcctgggcaacatgacaaaactccaaactccatctctacttaaaaaaaaaaaaaaaaattagccaggtgtgatggcactcatctgtagtcccagctacttgggaggctgaggcatgagaatcgcttgaacccaggaggcagaggttgcagtgagcagagagaagttaaagttaaaattcacactcgcttaggatacagatagacatagggttaagtctctgttgtgcaattactagtccagtgatactgggaaagtttcttactcaagtctgtatctgtttatattatattgacattagctttttctcatgtcatcaaaaattcttggagatcatttattttaatatctgctcaatgacatagccaaaactaaaccacagaagggctaaatggcctgtggcctcaaaacaacttattggcacggctgggaataaaatgtgttatatttcgtagccctgtgttcttttcactca

SEQ ID NO: 315445 - DNA, 4001 bp, Homo sapiens
acaaagaaaagcattacataatgataaagggttcaaatcaaaaaaagaattaactatcctaaatatatacatgcctgacattggagcactcagaataaaaataaaaagtatttctaatcctgtggaaagacttagccacttaataatagttggagacttcaacatcccacagacagtgttagatcatcaaggcagaaaactaagaaaggaattctggtcttaaatgtaatatttgatcaattgggcctaacagacatctacagacaactccactcaacaaccacagaatatccatttttctcatctacatatggaacgtgctctgaggtcagccacatgctcaaccacaaaacaagtatcaataaattaaaaaatgtcaaaatcataccaaccatactctcacaccacagtggaataaaaatagaaatcaatatcaagcatgtctctgaaaactatacaattacatggaaattaaacaacttgatcctcaataagttttgggtagacaataaaattaaggaagaaatcaaaaactgtttaaaattaattaaaacagaggcatgacatataaaaatccctgagatccagcaaaaacagtattaagagaaaagtttatagtgctaaacacctacatcaagaagttagaaagatctcaaattaacaatctaacattacacttagaagaactagaaaaggccgcgcgtggtggctcacgcctgtaatcccagcactttgggagctgaggggggtggatcacaaggtcaggagttcaagaccagcctggccagtatggtaaaaccctgactctactaataatacaaaaattagccaggtgtggtggcgggtgcctgtaatcccagctactcaggaggctgaggcaagagactctcttgaacccaggaggcagaggttgcagtgagccaagatggcaccactgcactccagcctgggcaataagagctaaaatccgtctcaaaaataaataagtaaataaataaataaaaagaagaggaagttgaagaagaactagaaaaacaagaataaactaaccccaaagccagcagaagaaaataaatcactaaaatcagagcagaactgaatgaaattgagatccaaaaatctatacaaagcatcaacaaaaccaaaaggtgactccttgaaaagacaaacaaggtcaatagagtactagctggattaacaaagaaaaaaaaagaggaggttcaaataactacaatcagatattacacaggtgacattacaattgatctcacagaaatacaaaatgtcctcggagactattataaacacctctatgcacacacactagaaaaatctagaagagattgatgaattcctgaaaatacacaacctcccaagattgaatcaggagaaattgaaaccctaagcaaactaataacaagttctcaaattgaatcagtaattttaaaaatctaccaacaaaagcagcccaggaccacttttaggtcacaaaattttagtttcacttcaatcccagcccccaattactctgaattcagccagtcacctagtcagtacaccactgggataaggcaactcagaaggagttttgctggataatgtacacatttatcactgctgctaggacaagtcaagaaacaccttataagtaagtagatcaagagtatcctcataatcattgaaagaaagctttattttcagctgaaaatgtcacagtatcagacttaccagacaccatgataatgatggaaatcagtaatcttggagctgacatcttccctaaagtatgcttttggagtggttttctacttaaacataaatccactttaaatcaatcaacagacttggtgaatctgtttctcttggtcacttttgcttattctgtcttcaacaggattgcaaaacatatttcttcattatcttgcttatctttaatttttgctgtcattctatatgtttttgactgattaaccactgatgggaaatgtcagtgagttttgctgtgtaataaagcaaaaaagccaatgcttactactcattgcttctcccacaacattgaagtagcaagataaactatataacaactcatttaaaaagtagcattttgagagtataaattacatatggtaaaatgaacaaatcttgagtgtatggtttgatgaatttctacctatatatgcgcttatctaattacttccaaaaccaagatgttgataattattattcaaagtgtcctttgttccaaagtgtcctttgttccttctctgctgatatcatctcctccagagaagttgagtaaacactactcagacttctaatagctttaattcattctgacagtttttgaacttcacatgcatgaaattctttgcaaatttcaatttttaatgctgtatagtaaattttcaataactatatcacaatttattcatcaatttctctgtagatttacattatcccagtttggggctaacataaagcttctaagaacattcttgttttgtacataatttttggtctatgtgtacattcattttcttggatatacacctaggaattaaattgttgggttataagatagtcatatgtgtgtctttaataactactttcagtcatggttgaatagtgcaacccccgcccaacatttatttgttgaaattctaatccccagtacctcagaagatgaccttatttggaaatagggtcattggagatataattagttaagatgtggccatgctgaaatagattggtccctaatccaatatgactggcgtctttggtttattctttttttcttcttttgcacttcttagctttttatggtgtccttataaaaagaggaaaactgggcgcatacacaggaacaccatgtgaagataaaaggcagagatctgagtgatgtttcttctacaagccaaggaaaaccaaaggttgccaggaaaccactggaaactaagaccgaagcaaagattctacccttctgttttataagattaaagattcttttgatgacaggacacaacatgaagactcttggataggtgaaaggcaaacctctttgttacttatagctccaaacaagagaagaattccatgtagggccacacagtggttgcacacagggacagggtaacaacacactggagctgtagagagtaccttatatatggtaattggagtagaattaggtttcctgagaaccctgtgccttagctaatttgaataacttcacaagctctaggacatagctgtccatggggctgtttgtagttgtctggtacttagccctgggcaattagggcaggtatatagtgacatacagtgtgagaaccagataagggaagaggctggggggacttaaatcagatattcaagaaggggagctaactgttaggggctcaaaactgggactagaaggcattttttttttacatgaaaactatattaaaattgacttcttgatctccacattagtgttaagcttgattacttgaattatttgggtggcctaagttgtagagcagagttttagtaagtagtgcatacattgccctaaatagcacacacacacaaaaattttattattttctccttaaaaaggaggaaaacaagtaggagtataaagagtccttgtaggctggttcataaccaagtttcacattgtatggccttagccaagaaaacagatccgggatttccaagatctctaacaatatcctgattgacttaaagtatgttaaaacatgagctatatttttgtgtgcgtgacggtaatctcttggtacattccagggttcaaggtggcaggtccaacaattatatttttggagagtatgaagttagttaagtaaggtatatgtaaagattaatgacgtttgtaacctagaggaagaggtagcagctgtgggtcatgggtgcagggcaggatgttgtggtggcaaactggaatggaaagtgtcagaggaggtaatgggcaatgggaggtcctctctccaggg

SEQ ID NO: 315446 - DNA, 4001 bp, Homo sapiens
cttcatacatgtccttttgaagctatatattaaacacatacaaaaacatattttataacaaatactatcctgttttacagtccacacttaacacaactcaactgcataatgcctgtattttgctttttttttaggttaatattaactaagtaaaataaaatactataaattctgaattcgatgactctagggattcgaacacattaaaattgtgtgtaaacgagtgctaattacatgatattaactattactaaagaaggcctaacataaatcctatcactcaaagtaccattccaacagttctaaactacgtgatttaaatctaacctacctgttttaaaaatagtatatggtttatactttttactttttaggcagtttgaataaatgatactgtatcacttcatatctggttcaatatgaaggcgttctgaaattattatgcgattatacaacacatctctgaaagcagtattattttagctataatgatagtaaaggcaacaagcatactaaacgtgatgacaggaaacactaacatcaaccatttagataacggagacctggattcacagtcccaacatccaggatgctcggggagggaggaaagtggtaagcagagacttaagggcatcttggaaatacctaaagtcacaagcctttaggaacggcacaccgaggctaataatcagtttaaaatcgaattaatttagcattctagaataaatgtaacaattgctgtcactggtgctcaagctgaattctgaatcttataaaagttcacaaaaggctctatggatgtgaagtgtgacaggcactcactgtagagctacgaatgtttctattccttgctcagtttttacagacgaagcacacgttttacaaaagcgaaatggattccaaaagctcggggtgggggtgggggggtggaggttctttggcgtcgaaaaacaccaaatcccattctgctgcacatgttttgactggaggttactgtcttcctatttcaggcgaaaaccagattacttttaaaacggttcccccaaataaagtgggaaaaacttcaacgtacaatttagaatgtatgcaagtggctgatggggcgtgagggtcacgagaaaggaagagtttccagcaagcttatttttaggattaaaaacgacagcaaaaattacacggccggaagattcttctgattgaatgctgagttgaaaatgaaacttaattgtgtcctttacgtcctcttcgctcctatgttcatgtgggaggcaaacggcagaaaccccttctcaccgacttcgccaaaatgcgcacttccatcgcaagaggcccgggccctcccactctccctccctcaaccccaaatgcgtctaagcactgagaagggagaggggtgcgaaagaaggggatccctagcagctgcagccccttgcctctgatcgcgccctttcttgctagttaatttttgcgcgaggtgcgcggtttggagtcttcctgtgtgtgtgcatttggagatggagaaccgggtggaggagatgagccccgctctcacccagggggaagaagacgaccagggaaaggaagggaggaagaaggggggcgcccgattccccgtggggccctcccacgtctgcacttcgggcgctcagggcccgagtgttctgcgccccggccaccctcttcagggcgccgccgggctggctggggcgcagcccacacgcccgcgggggcgaagcgacagcagccgcagggctgggagcgaggagccactcaccgcagcacgccgagcccagcaacagcgccgctaccaggggccacatctccgcgcccgccgcggggtcgccgccgccgccgcaggtgtccggagcagcagccgccgccgccgttacaggcaggaccgaccgccgccgcgcgtcacaggcaggacccactgcccaggctgcacggccgcgcgcacgcgcgctcccactgcttcccgcccgctcccccgcctgctccccgcccgcgagagccgcgcacgcgcactcggccccgccccgcaaccgctgctgttgacgcggcgccctccccagtcgcaggctccagacccggggcccgcctgcccgctccacggaggccggatgcctgctccagggcggtggcacgcgccgcgcttccaggtcacgtcctgtcgcacccgcccgcccctggggtccgcgtgctcgcccgccgcaggaggctgaaccctgtgttcccacgctcgccggggacctcattgcacccgttcctgtccgcgggtcggttcctgcctttcgcgcggcgctgggccccactgtcctctctctctacttttctcctctttgctttcactcccaccctcgcgcttcaggggccgggtcccgtcccgccccagcccgcgtctctccctggacccgacgtccggctgcgcgcgtggaccaggacacctaggctttcaccagcgcccgtttcctccggacgcggccgtctagcgccgaagcggtccctgagcccgaggccgccacgcccagggcagggcggtggtcgggtacctgcccgcagggagcttccactcgcccctcgcgggctctgcgttcggctcgtctactcgctctgctcttccctatgcggttctcttccctctttctcacttggttctttagtgttttcatcctctgatcagggttaatcaaacaagttccattcacggtggtaaacattgttacctgtgaacaccgccaccaccgggactagcgagcattgtcgcaaacaggcattagcagcgtatccaacacatccccaccagcaaggttattgagcttggtttgtgactgccccatgtgcagccctctgcgctgcgcttgggtttaacatgcttgaaaaatgggttcgaaatgtggccgcaagccacaatagggacaaggcttttgaatttatcgctgaatcacacaggccacatcattcatcctgaagcaaaagtcttttaaagatacttttaaccgttatcctaactgatgtactctcttatcaaaaagtcaggctctggtggctgctctaatggagtgcacatcctgtccacctccttgattgttttcctcctacctcctgggaaagaaagcaatttcccaccacaataccccacttctccaaatcctctacacagtgcggctcctcccaagcatcccattgccacagaaataaaatccagcgtatgaaagtggcactgtctatgacactctgtaccagtgtattgtatactatcgagcttcttcctgtaattgcttttttgtgtgaacctcttccccacagcattatcaattcttttaaatccgagagcattttaagtattccctcctccaagactttccattgagctcggcaaacagaaggggtttaataaatgtgttgatgcggcgtgaggcaggcattgctctagtgaaatttgattgcttttttaatgattgaaaaataaaaacaattgcctggcagacatctcactaaaacaatggttaataattatggtggtaatgatttgaatggcagccttgacaccccgaggcaaccaaagggactcatcgattctcctccaactgctgcttatgtggatacaaaagaatcatccaccagactttgagcattagggacattgtgtatcacagagcagctggttggctaaataaggctgtcagctgtccctgataccaaccaacccccctaaagctgaagagtgactagaaaggactgtccccaaccttcagaggtggagatcgggtgatgttctgttttacactgggagctactgagctatatgcttaacgtctttttgtgcagaaaatggaatgagaggccacctgggtgaccactgctgctcttgggaatctagctggggtatgttttggtggtggggcaaaagcaggcatatcccaggagagacagtccaaagcagcctgcctaggtttgattatcctctctctgagataaccttaagctcttttcagtattta

SEQ ID NO: 315447 - DNA, 4001 bp, Homo sapiens
agaagtgagaaagaccagccagcaccaagagctgaaagaaattgaggtatggacacttggatggtgatgttccctgcctccgtgtgtggcccatggcttcagatgcttagggtcaaaagtgaaagccaacaatttggacccaagtaagaccagggcacttcccaggtgcaaaacaggcagggctgatgacaatccaattgctcacgtagaagaccctccagtgatgtttacaaaacacacagagattggagggtgttcctgggtctccaaaggttgtggatttagtttcacagcctgaaaaaggaacaaataaaagtcattcaggaaggaaggtgtgcctactttgagttgcaaaactctcgagttgcctgctaaaattaattggagagcttaacctaagcaacctctaaagcagggcgtgaccctgaggaaaagcgaatggaaattctgtgaggggaccagttccaagaaccaaccacagcccttccatgaaaaggctttctacttaataggtggggtgaagatttggttagaaacaggagagctctaaggaccctccatatctgttagccaacctgcaaaagttcaaatcctcttctgaacataccaagaaacatagagcagacagtaagggtgtattttgtccaaggcaggacctaagttatgaaacaacttctttcttgacatattaacataagaaaacaagtatctcaattctttaaaccctctactcaaataatatatcataaaggggtatgagatctcaataaccagaaaagtctatccataaaaagggagggaaaaaaagacactgcagacgttacttatcaaaattatgtactccagggccaggcgtggtggctcacgcctgtaatcccagcactttgggaggctgaggtgggcggattacttgaggccaggagttccagaccagcctggccaacatggcaaaaccccatttctaccaaaaatacaaaaattagccaggtgtggtggtgggtgcctgtaatcccagccacttgggaggctgaggcacgagaattgcttgaatccaggaggtggaggctgcagtgagccaagatgattgcaacactgcactccagcctaggcgacagagtgagactccatctcaaaaaaaaaaaaaaaaaaaattatgtactgtcatgtgaggtggctagggattaatttttccagtaaatatgtcaaaattgagaaatgaaaataaacactgtgctccactgtcaccccttcaggctgctaccaggacacagccccgtgctgctcagagaatgcttgagtgtcctctttggagaccaccctagagctagagttccagccacgccatattgttttattagccatcatccattttagacaggattagttaaaagagacttattcaccagaatttgtttttcttaagatagaatcttgctctgtcacacaggctagagtgcagtggcgtgaccatagctcaccacagtctcaacctcccgagctcaagcgattttcccactttcactagaattttactggcttgagaaattcaaatacggcccacaaaaacaatatttgctaggatctaggatattttaaaataatgggccacaattctcactatgatgctccaaatatgtcgggaagccacagcctcctgtgggaatgagaccctaagggttcctttgagggcaagcctggatccaggaggtggtagcagaggtattgtttgtttaaaaagcagtgaggttgctggtaactagttctaccaagctatcccatagtaagataatagtaaatgtacttacttgctgaagaaaaattccactttttctttaaatcctttgatttcagggtaagactccacttctgagatgttctcttcttacagtctataaagcaatgacaaatcactttttctttgggtaatcttcagagaggcgacatttccccttctaacttctgttactttacagagggtttgagttcactcagtacttgtcagtgccaggagttggacagggtgtttgaagaagcgccctctgctgccgtcttcttctagttgcttttgtagaggctgtggctggggcaaatcacacagcagcctccctcaccaccgtgcatggactaacaaacatgaaacaccacgagcaccaggcggcctaggggaggagaagaatggtgcccgagaagagtgaggggcatctggctagccttgctgtgtgatgggaggccagcttcatgggctggctgtttctgtgctggtctcaagttttgttttagcacccagagttactcctgagtccctgcaggaataagctgtcaacctcatatgtaggggacacttttgggagagtgctcagctcacaggaccacccaactctactcccacctctgaatcccaccatcttcagagagtgggctcctgccagccacgctggacagtgaattctggtcaccctagccacagttgagtgcgcctctggtgggatgaggaagactttagtcatgcccatcactcccatttccaactaggttgccacccacccctgtgtgtccctttgtaggattctggagcccctgtgagtgagcagctgacccatgctggaccagtgtacttgtttgcacaggtggaacctgacagcaccttgcatgggttgcagtgagccgagatcacaacactacaatccagcttgggtaacagagcaagactccatctcaaaaaaaaaaaaaaaaaaaagacgccatccttcccacaccagccagaaagagagcaaaccgtgtgggtgagaaatactgactacagcggcggcttccttcatctcagcaacaagtttgtggcagagcttagtggataccaccctattcacctgagatttggaatactgaagctttggaaatcatgaaggcagaacttgctatgaaaggactccactgcactgtctccttctgtattggcagaaggggcctagtgagcacccttcttcacctgtgtcttgttctggtctcagatgcatattttgaatagttgcaaggaatatggatgtgacaattcctgccttacctctagtagatcaacattacattttcaagtaaagggaacatagattggaggtaagttcatgttttctattttcttgaacatttattcagatcaaagaaatgttttcactgattttagccacttctacttgatacattattacaatgcactggaagtgattttttttccaggtatttaaagtaatagaaagttatagatgtcaacttaaaagagcaaagaaatacagagttttagaaatttattttctttttttttttttagatgaagtctttctctgccgcccaggctggagtgcagtggtgcaatcttggctcactgcaacctccgcctcctgggttcaagcaattcttctgcctcagcctcctgagtagctgggactacaggcgtgtgccaccatgccaggctaatttttaaatttttagtagagatggggtttcaccatattggccaggctggtctcaaactcctgaccttgtgatccaccctcctcggcctcccaaagtgctgggattacaggcatgagccactgcacccagccgagttttagaaatttcatgagggactacatgaatacaaattttgacgatcacagacaccctcaaattttaagaatcccagtgaaatcctaacctgccttggagaaacacacattaaacaactttgccattagcgctttgatgtgacttaatcaaagaggctggaagaaaggaacaccaggaaggtactttacagagtttccccaatcctgattgtaaaattcagaaggcttctcttccaagattatgtactaatgggatgtgtttaattcctcttcctcctacaatgtgtctaggagcatgacctgtggaccacagatttctaaggtaaatttctggacactggaggtgagatggatgaagacgggcaaaggaagccgaacccgaatacctatattactgga

SEQ ID NO: 315448 - DNA, 4001 bp, Homo sapiens
gtttttaaacacgtaaattgtttctaagattttccttattagaaacaatagcaagaaaaatatccatcactaaaactttacaaacatgtattattatatcttagaataaattcctaaaaggtgaattgcttggttaaagggcatatacattttaaaggcttttgatatgtatcactagattattgtccagaaagatgatatcaccactagtgcgcaactagggtacaaataatcctcccttcttagcaagatagagggttcttgattgcttgctttttaaaacttaatatttatctctttgatagagaaaaaatgatacttcactgttgttttaatttgtatttatttcatctcttatgagaacagacattgtttaatggctattactggttcatgaccaatcttcaggcactgtgaaacaaaaggaatcttaacaagttcaatatagacagcagcctatggttttttagacctctgcagacagtgctagcataattaagtagtatcccctctatggtaccacaaaaattataaattttgaaattctttttttcttcatacaagtataacgcttcaaaattccactggagcaaaaggaatctttactggaaaattaaattttaatcttctgaaataaaagcaacaaagctttttctcaaaccagtaagcactgggtagatgaaagttacttcgattttcaaagaacagtaattataaatacatagtgacggccgggtgcgcggtggctcacgcctgtaatcccagcactttgggaggccgaggtggccagatcacaaggtcaagagatcgagaccatcctggccaacatggtggaccccgtctctaccaaaaatacaaaaattagccgggcgtggtggtgggcgcctgtagtcccagctactcaggagactgaggaaggagaatcgtttgaatccgagaggcggaggttgcagtgagctgagattgcgccactgcactccagcttggcgacagagcgagactctgtttcaaaaataaataattaaaaataaataaatacatagtgactggcgccagctgccaccacccaagagaagggcgggtgtgactccttccaggaagtctccacagcatggagaaaccttctggcgcaccacgaagcgggcaggaaagattttagctctaccccttatgaatagtgtgaacttgggcaagttttttaagccacagttaccccatctgtcaaaaagaatgatgatgtctttccaaaagtcattgtgaagaataaaattcaatgaaatagcactagtaaagtacccagcacatcatgcatgttcaatacatggtaactaatttaatcactctacctccttccactacccaaccctgcccagaatctcccatggcctgattatgacatattaactgagttttgcattttctccttatacctcttttttctctttctttttcttgatctctctccctctaccttctctatctcattcctccaccctcagaccaaactgaccctggtagacaaaaaacatattccctgttatttgtcattcttatgcagatattttaaaaattcctgattcttcactaaaatcaatgactgtaacattcagtatttgaataacagatttacaaaaccaaaattaggcacctaaaaatatatataactaccaccaatgaactgctttgggcattgcaaataattcttgcctttatgtgccaaagatcttttgtagaaaaagaaagcttctccacttaggaactaagtgaaggacacacatcaaagcaccatcttcaacctcagcctttcactgcagtcacaactcataacttctctgcaaagaataagaattattactcaccactggggatccattttggctgcttctgctgtgacctaatatctggaaatgaccccactcatccgtgtgtctgtgctagtccctgttacagcagcagagaagcaaagctttcaccctgtgcaagccttcctcggcaatgactgtatacctacccagctaactttctttaagagaagctgttcctcttttctctacagattttgaccacacttgaggaagaaatttaaccctttccttgcagtttaaactcattgacgtaggtctatatgtattaaagaatatataattcagtagcttgagttccagacatgacgttaagatgagcctgaataaaaaatctcccctcttgaaattccctcaaaaaacctagaaaataaaataattagaaagagaaaacaaacctccgcagcaacaaaatagaataaagaggcattctacagattttgataagataataaaaagtgatttattgtggatgtggattgggagtgagtagccacctaaccctgccaatttccacaaccaaagtgtggagagtttcactgagctggggtggggggatgggagatggggagatgttctgtaaggactgcataaccaaggagggcagacagaagctactgcttttattatttcattcctactatagccaaggattacattgatgaaagcgaatattctgaaacagaagtctgaaaaaaaggcagcattataaaattaatagatgtccctaagagacaaacatagaattaatcaagcagaaactatactagaagatatttcctcgtatgaattaaaatgggcatcatctagaaactcaaactgtttagtgtatcaaagcaaaagttatgaaaatcgattctcatccagacaaatcattttgaacattttaaattccaaaggcaaagctaaaaacaaaatgaaaacagaatgactacagagaaacaaaaaacaacttggcatcttactcaaccctaaatggcaaaaaacaacagaacaatatctgcagaattttgaattagcattatctacctagataagatgccagttaagtgtcaagtcaatagaaatatgtcaccaagcaggcaagaaaacaacaactgcaacagaaataccaccaccaagacagccttcctaaataaattatttaaggatatattccagaataataaatgaattaaaatagccttaaaatggagaagccatggctgaaaacaccagtgctgagctttaaagcaagttaaacatggagaaataaggctaaataattataaattagtttagaccaaaatgctaaataagaaaaacttattagaagtagattacatatattatttcaaggaagtttaaaaatagcagatgacatcactgctaactagagcaaggaagcaaaatcaacacaattattaatcttcaaataagaagatagaacaatgattattttatcaactttgataatttcatctggatttgagaattttaaaaaatgaagacagcaataatataagttatctatcttcaaaattattgcagagcaggagtgcaaataaaatagtatttataactacataacacatcagaaataagatgagataaaaaaatccatgtaaacctcatttgttataaatattaaatattaaaggtatgggatgtcatttttcagtttcttggtagcagtgtacacactcaaatttccatttcttggtatcaatgcatacactcaaatttttatttaagatagcataagcattttctcctgttatcataaactttttagtagtcattaaatagtacattaatagtacatcaagtatacactgtgaaagctggctgtaatggcacatacctgtaatcctggctactcaggaggctgaggtgggaagattgcttgaacccaggagtttgagaacatcttgggcaacataatgagaccttgtctcatacacacaaaaaaggtatatattgtagtaaaattatcttcctaatatcagacagttttagcttttagtatttttatattacaattttctaattaatatatttagtatatacatttaggagtttttagtatttattagttatccattgctgtataacaaattatctcaaaatttatttccttaaaacaataaatgtttaggg

SEQ ID NO: 315449 - DNA, 4001 bp, Homo sapiens
gaataaaggaggaccgatagggaacgagatgcttcccggtgttgaggtctcagggccgtgatggggaggtggaaagtgctgaagacacacttttcttcctccacacatattcaaaatggcgcctatttcccaaacctcagcccgagtgtaagccaatgtacagttcggaaacagcactgtataggagaagagaggagagataagggccagtaaagggctgtgtgcccagcctatggccctgtcctttctcccaccccacaaatactcttacctgcctggccatgaaaggtggattgccagcactagaatggactgtggaaaaatgcccagggacctctctgccactctctgtgcttgcttttgctctagttttatctctttgaagcttcaatcccctggcctagggacccctaacctcaactcccacctcagtctgatttttgaaacatggtatttcaaccttgatttttctgctgaagaatctggcttggcttatctcttcatctttctcatgttttctccctacctgccctagcctcaactccataaaatcccatcctcacccccacccaggaagaggcatatgaaattcaagaagaatagactaaccaaaatatcaaatgcaaaggcttggtaattaatcagctgatatagtcacatagaacaatttccttccctttaaagcactattgctatgtagtcatgtttagtgtgattaaattaatgtgatttccccactaggctagaaaacaagagtgcagcttttccttatgtcttttatgctacctgttaagtccctagtacctggaacatagcaagcacttaataactatattaggaataaataaatagagatttataaaagcttccattatacacaggatagctcacataaataatattaacggtatctgcagcagcagacataacacgaactgcaagtctgagcacataaatagacgcattttagtacagggccttagtcccaagattgaggttacatgtaagataaacagttcatttccttcattattacagtttaaggggagtaggaagttccctttgtcaaaaactattttcacctggctctccagaaccttaaattgctattaatagagatgatattttaagcccgtttgcaaatgcaaatgcaaataggttcaccgtatgtgaaacacattatgttcaatcacttgcttgggctcttttttgacccaagaatatttctttttaaattagatcttggtctctggtgccaagtggggctaatattgggatggggcacttggatgggaagaaatattggggaagggtctctggaccagagaagggaaaggtcaaacaggaaagccaagtaagtccattgcagagaggctgcaagaggaggaaatcccccttctctggatttcccactggcacaggggactcaggcgaggcgagctgacatctttggactgcttcttctagagcagaggctgctcggagaccccagcaccccaaagccaagaacagctgccaattatttggtaagtggcaccttctatttcctgcctattttgtctcttagctcacgaaaaacagatgaagggatctggcaggaagagacagatttttgtaatatcccacctccaatgtagtcaatctgagaagcaaacctgatggtcagaggttttaagcatgctctctgcaatcccttttactcattctctggccggccattagcacatcagcatttctgccccagatgcagcttgcagctttatctcatgccactccctaggcgtctgagcctccacaaacatacctgtcacaaatgcctgtccactgtagctccaaaaagagaccagatgcataagcacagcagcattcccaaggaacacagaagcaaggtggtaagaataaaccaaaaggagtatttgcgagctccccgtacctcctaaggctccttgtagagagagaaataatgccaggactgacggtagaactcaaatacagaaaggggaactgactagagaaacaacaccacagccagggacagtgctcttgcttggttccaaataacttctgccggcaggtgggcatttccactgatgagaatgactacaaacgtaccctcggagcatgagtgtaaagccctgggaaacccccaaagggagccccatccacaaacatgacaaagacaccttccctgacagattcccagagatcccagagtacacacagcctttgaagcccatagatgaaaatgcagttcagttcaacaaatgtgggcaaccatgtgacaggcactgagctccacggggcttcagaagacagccttcaatgagtgagggcagagaggccatgtgcttcacttctagcccttccccaaaatcattcattaagtacatctctccacccatcctgttagaaggcaattgacatacacaaccttcattttcagatgatcctaatctaaccccaattgtatgaatctagaatgtttctgttaccttggtacactattcctggaagtgggtggtactcttgagtttggctacaagtcataagcagaagtgggaaaggtgtgtaaatgcccagtagatttctccaaacctagtgcttcagcggggacaggtttcactcgtatgtgatcctcccccaggtgcatgcctcctttttctgccctgatcaggcactgcaaagtcctctgctcagtgtgggggacatttatgtgcctctgaggtctgtggcacttgagcttcaaaagagagaagcagcaccctctgggcatgcctccctgatctcttggaggctagctgtgtcctgtgaagcaggagacattaaaagtgacaaagtgacagtttgttgttgacagggttggggaggctcatccacacaaaagcgtgtggtgcaagggaaggggtgtgggtttggaactggtggtccgaagtccagtcctggcttgaccactggaccctgggccagttattgaacatgtttgaatgtcagtcttctcacttatgaaatgtgactcataatcacttctttgctgcattgttgtgaaaaacaaaggaaaccttgcctgtaaatcatgtggcagagtatgccaagtagttatttcatcttcattattactttcctgttttcttttcagactttcccaattcttactttgacctttgcacaaagatctcccttctgtcactacagaggtctgtaaacaggcctgtaaaacccttcacctttcacccagggcttctcaaacccacagggctcccccagggtccagggtcttgactcacagggtcatcacttcctctcagccattctatgttcagaccttggaaatttcatccttcatacagatagatcccacctggggttttcctctggattttacaatcacagattttgctgttgtttgaaagggttcatttgattttcttattgtgacatatgatcaattacccacctatcagagcacaggggaagtaactcatatttcacttaattttcatgtttccttcttttccttgtactcagcagtccaaatataagacaggctaaattgaaaggctagctatcaaaatatttggagtagtattccccaaactttcatcattctagctactagtaccacttcatactcatgtaaaatctgtttcattatttatatagtatttttataacatactttaagtaaatctatttagaaaaaaatctttgtgttaatactaaattagaaagcagtatcattttccataaacagatcagtaaaaataacatatcacactgcactttggagtcatagagacctgtgttcaaaccctgctccactacttaatgcctgtgtgttcttggggcagttatttaacctctctgagctttggcttcctcacagaagtaatactaaatatctcataggcatgtcatgacggttaaataacatggcatatatatggtgcttagcacagatcctggcaatagtaggctcttaaaaaacaagttgttttattgtt

SEQ ID NO: 315450 - DNA, 4001 bp, Homo sapiens
ctataaccctcataagtataacagtaaaactccagccaaggaagacaaagagacctttagagaccaaagagaactttatttaattcaggcatccaggcccacagcagactcatgcccaaaatggctgctgactctgacaaagaaagcaggcttgcttatatgtcgtttgaggtgggaaaacaaggcaggatacaggtttcaggcaaagacagtaaattatttaacccgtgacaattctgagaaaacttacaatttagttatcttaaccagtcaatcttgaagctagacagagatggggtaaggtaaaacaggagttacagaaatatgtgggggtctgggggcaggcaagaagcttggaaggttgagataagctcacagctgcaacttgttagcaatgctgggaggggctacttaaatttcttagcctacatataacttctaagtaacctatacttaatgttaactattacctatgttatgcttattattttaaactttattattacttattttattttattttccttccacataacttccaaactgtctcccaaattcagtctagttgattagagtaagaaatttcactttcaatatacaaggattgaaaggacctcatctaaccttaggtagaggttccacttagtatcacctctaatcgatggtctgaaatactagacataagtagagtctctttcccatcagcagtctgactgagtgatacaggacacttaaaatgtgttaagcattgagactgtgacatgccttcaatagtgttggcctcagttttagaattaacatggaatcctgttacagaaatgatatatattattgtgacaagtaccactgaagctcacaaaaggaaaagataaaaagatgacaagcaactgagaagaaacaagcctcttaaaagtaaaagtacttgacaaatgggaattatcatacttctgtggatgcaaaagtttggtaggcagaggttagtacagtttaatgtaacttcctgtgagctatcctttgcctgaaaatatggctctgatcctatctacagcattatattccaaatctcttttgatttagaaattctccttaatattttcatagctatgtctgaaaagcacagttaattcttaagacactcaggcttactatgatactctcatactgtggaatacagaactaatcttgcttccttctctttttaaataggcccattaggctctcgttcccactgtcataaggattccactttgtctcccaggttcatacctacacatgcctcattaaaattcaacgtgttttcaactcccaaagaccttagtatttggatgagaaatacttgttatatccaaaagaaagagagtacttgagagagaaaaaagttaaacaaggatctctgagcgttgatggctttgtaatttttaatttttccgcagttgttttggctaccatttggagagcatttcatttccaagaaacacaatttgccaattactccagagatcctgttagaaaggaaatgggtgaaaatgcctcagagcagtggcacaaatgacccattcccttcttatttttagtgttcattagtaatcatttctagattctagcatctctcttatacctgccgcttaaatacataactgaaacccttagtaatgatttgtcctttggtgatcaatttcagcagcagtcacaaggcattttaaatgaacagaggccccatccgcccctaaagcggcccatccgacaagaagggacaactggaagtcttacccttgacaaaatgtatctggatgatgtaatagacagcacagtatttccattttttctccattgtcttctgaacaccttacaccagcatttctgtaatgatcacaaagtcaattgatgttttcaagcaaactccagccacccacttcgtgctaaaaaacccgaactctaccacacacgcctgggtctgtttatcacttggcaagcccccaggaaatgaaacgtagacaggaaagtaatgtggttcaggactgagtataacgttcgacagaacaatgttgaaattgttctctgaaatttgtgtatcaccttatttaagagacttttcagtatccaaagagtctcttattcaggatctctgtgtcagtcaagctgcgtctaaaatccaaacaaaggatatcacgcagagcagttggcaatgtgctttttatacatttttttcaagagcacaaagtcatttaacaaatgtgagcttggtgtttttcataatagtttttctgttcaatcttaagatatgttttctttccagaattgccctggggtgaaagaacaaagaattaacacatttaattttaataaaatctgaaaagtaacagggaatagtgtcagctatcaaaccaaattttattgtctctcctcttgcagggaaatgcacatttcctgggagtggaggagtgagggctacttttctacccctcgtctgggaagacgagggaaggttggaggtcagatagggaagtctcccaccaggttggctggaggccatttttgttcaccacagaagagtttatccatgcctaagccaaagcaaggcagtaacaatcagaatccaaaggcagagaattcccacctcagtgagctattaggcttattacatctgcctagttacttctatttacagagaaccgcaaacaggtttcaggaaagtgaccccttggtaaaaatgtctggctattcgtagaacacgatgactgttccctgctatgattctctgatttaattgtattagtttttcagcctgagataaaataggctgtcatcaccctccaacattaagaaaacaagcattagactgaggactactgtaagtttgatggacaaagaataactacaaataaacatgtgtgtcttcatacaaccgtatgaatgattaaaatatcctgtgaccctaatctcattactagaatatacgtaccacctagcaagaccaaagacaaatgaaaaggccagttgtaatcctgagatgggaattcttttcaggtgaggtggagataattttcgtcaggttgtcatcatgtatacaccaatctctcctatgcaaggactcgtggtgaatatggacgatgctaagacagaaggaaatgcttttgccattcaggagattaaatttagatgggagaagagaggttttcatgtaaataaacaagggcgactgtcttcctggacgtccagatcaccccctataccaccactgcaaatacttgccatgataattgccatacttattcagtattcctcagctaatgatttcttgcagaatttagatgtagttactgcttgcctagtccagtgctccccaaacctttattatcaccccttcccaacttcccatgagtttcaggtcactggggatattgggtcaggtagtactgacagtgattttccagggaaggcctgggaactcaaagtcctttatagaaggtcaggaagagacataactgctctgggtagcttcatctcttcccattgcccctggaaattctagtaaatcaaagttttatgaagcatagcagcaaaaatagtcctggagatgcactatgaagatcctgatttgcacgttggtgtccctattaaatcaggacacattacaagcctggagaagggattctatgatctcgttccatttttcatattaagaggaatttacctaagtagaaaccaattcaaatatacatttattgaattctctaagaacaataccctctttggggtatttagacttctcctatcttttattgtattaaagtgaaacagttgttccaaaaaagtctgtaaactcagaaacatggaaatggtcgtttattttccagtgctacagacttactttcagtagaattcttgcctctcattggggttgggctacctgagccatgcatttagtggctatacggcaaatctgtcttctgtgtattgttcagggcttagttaatgattcttatatctagaaacttcta

SEQ ID NO: 315451 - DNA, 4001 bp, Homo sapiens
taatcccagcactttgggaggccgaggaaggcggatcacctgaggttgtgaattcgagaccaggctgaccaacatgaagaaaccctgtctctactaaaaaatacaaaattagccgggtgtggtggtgcatgcctgtaatcccagctactcgggaggctgaggcaggagaatcacttgaacccgggaggtggaggttacagtgagctgagatcatgccattgcactccagcctgggcgacaagagcgaaactctgtctcaaaaaaaaaaaaaaaaaagtttatcacccaatgccatgacttcctcaagttctcaccaaaactaacctcctgggtgaaaaggcatgtttcaggaaattcagagtattgctccccacacagcagacttaaatacctgaatctgttgactcggaggagcccattctctgcagattactgttgttcttcacctccagtggttgctcataatcactgaaaccaacagaaataaaccatgaatgatttataggatataattaaaaggtcacatgcaggagataggccatgagattaagaagcagccaggctgccagaaaccatttctaggccacaccacaagtggcaaagatcccactttgccactctgaacacccaattagcacttgggcaaaggagaaaaaaggagtgggtgggcatggccttggaccacattgcaggttatgatggctatggcaaatgttggggtatttcctaaaataaaagcatgtgttctaagtactgagacagagtcgggatgaaagttgaacaggacactttctgcttttcagaagttgggaaacgcacaagacatgtgcttagcaaacgggatgccagagattgaagggaaagtagctcttccgcgggaaacaccgtgggatgcattttttgctatcaggaaaagcccaggaagctttctgaaagttgggtaaaaagacctggccttaggaaagcagcagagtggacatcaggaatgtgcacagggcgagggactgagatgattttacataaacgccaggaaagaaaatgccatggtcctttgttgagaaggaacaaagatcacagcaaacgaagatcctgaggatggtttagcaaagggtgaaagtgagtgcctagaagagcctgattttccccgcgggggtagattccaaagagcttccagggatagagatagaaggagagtacggagcaatccgaaaggggtgaaggtgggcctggctcgggcttaggcccaaggatctccacctcttcccctggaaggtcccgacggcctctcccgcccaacattccgcccgggcgggggtgcacatggcaggccctagcccggctgtccccgagcggcgaacccggacggacgggtctcgcccttctcccggtccgtttcctggcctgatctctccgaggccgacaccgaggccaggggcccggagcaccgcccgccggtctctccttacctgcccagaccctgcagctggtccatagtgacggtcaggttggtgacaggcgacagtcccccggcggctgaagcgccaaatagcgccttcacgacgggctgcgacgcgggaggggggctgcaggcgaagagcaggcggcggcggtgcgggggctccgggcccagttccatggcggcgcccggcctcgcagagctcccgctccctcttcctctgcctccgccgcgaccgccccgccccgccgacaccggcctcggccgcgcgccaccggcgcccgcgggtcaaacacaaacacgactccgcggttcagggacgcggctgccgcgggcaagcggcgcggccgggcgggtgtgcggaccctccaggcgccagccaccagccacaggcacgggtgcttccctctcacaccgcgaggccagcgggcgggcgggcgccggcaacctgaagattaaatccaaacaaacgtggcgggtcggcaagagaagccgggcgagagcctcgaggcaacggcccaggctcacgctgtcttcgctgttctcccacccgcttgcccagctccgggtagcagaaaaccaagccgacctacacctcttacccaggctgtcgcagccaggccggcctttcgcggtaatagcggctcagtggggccagctgctgccccgcccccctttcctagttggcgccaaacggaatccaccaatcagtaagcaacttctcctcctctcaaccgaatggcagctaggctgggccaatgagaggggaagaagaaagcggctcgcgggactctgccaggtcatcggctctcagaagggggcggagcccagagcagaagagcggggatcaaaatgagagggggagcagaggtcaatgaaaactcccagcagaacctgcgaggcgctgctcgcggctgaaaggcccctttgccccgtcgcatgctgggaagcgtagttcccatcgcgagctgccgtccagttagcttcggccccctttgggcctccgctacctcgcccccagccgggcgccccacactctgaggcaatgtggaggctaaggaagacctgtggaggtctggccggatccagccttggctcggcctctaaccgtgcagtattgtggacccctttcttccgccccgggcctccaggccccattttataatgagggagggaatgcaatgacccccaggactggactcgaccaccagggcccaactctggagggctcacagaccctgggtgctgctggcctcatgggatttgaaccccgcagtacaacctgtgctgtgggcctcagcattttttgctcacttccattctagcccttattggatgctcttagaatcatttctttctttcccaccacttcttagccccctgggagctcctagagagaaataacagcaaacacaataatagcaaataatagctaaagtttacataatgcttatgcacttgacactgttcccagtgtgttaatctgtattaattcatttaatctttacaactctgtgacataggaattatccccattttctaagtgggcatatttacttttacagcgccgaacctgtggcagctcctagacggattttgagggccataagtgcatgatttaattgcaacctactgctgggcttagtggctcacgcctatcatcccagcactttgggagggcgaggtgggaggattgcctgagcccacgaatttgagaccagcctgggcaacaaagtgagacaccccctgccccccactcaaaaaaaaaaaaccctacagtttgaaaagccatgctggacaggtggaaaccccaaacctttggccccaacaccagacccttcacagtgaggaacctctctctcaggattcatctccttttctgtgcaccagtgctccaccacccaggaacctcccttccctccagaaaccccaggctatttaggcctctctgcacagttcacatggtctgtggtcccactgtttcaaatagttctccctgtcgtatctctgaatactttcctctcctcctgtgttttatgtggtttaatacttggctcaacaggccgggagcggtggctcacgcctgtaatcccagcactttgggagaccgaggcgggcggatcacggggtcaggagatcgagaccatcctggctaacatggtgaaaccccggctctactaaaaatacaaaaaattaccgggcgtggtggcgggcgcctgtagtcccagctactcgggaggctgaggcagaagaatggctgaactcgggaggcggagcttgcagtgagccaagaccgagccactgcactccagcctgggcaacagagcgagactccgtctcaaaaaacaaaaacaaaacttggctcaacattcctgttactgcattcattcattcaacatatgtttatttaaggattactagaacaaattcagtgcttgaaataataccacaatccctgctctcagggagctctggtccgctgagcataaagctccttctaataatggaattattaccatgacaatagctgtggtttgtggaggga

SEQ ID NO: 315452 - DNA, 4001 bp, Homo sapiens
tcctgagaccatagggaggaacttaagaaagcgaaagggaaagttcctaggtttctacgtatttatgtattgaaccatgagacagggctcagccagtcaaggacttcctggaagggactccattggagttactggaccaaaatggcagccttcccagatcacagggagaaatgagaccaggaacagaggctctcattattagcaatgccttgattaacaccctgttctgactggaagagttccccactgttgtcacagaaagccaaaaacatctcagataattcccagagtttcaatactgttccaagactggtaggcacgcatttttctcagcacacatatacacatattttcacttcctttttattcttaaactaattctttttcttcaaagggaatcttggaaattcagtcctaagaaattatagtaaatattcatcagccaggcacagtggctcacatctgtaatcccagcactttgggaggcccaggtgggaggatcacttgagctcaggagctcgagaccagcctgggcaacacagtgaaaccctgtctctactttaatatatataatttatatatatatttataaatccatgccatggtttaaatgaagttttaaattttctatctactatgcagcaatatgtcacctgatgttggagaatgaaccaggaagtattcctggagcttatattgatattttagaagctcctgtcttgtatttgtaaagacggcagtcaccgggacgcccaaattcaacctcacttgcgtccttttattcctttatctaatttacacctgccaaacacaaatccaccctagatgcagcaaggggaatcaaacccacatggcttcctggagagctctatttaaaaaacacaaaacctgtactaatctcgcgaaacctgtactagcctcacatcaagttcttacatgaagaaaccaggttatttactacgttctaatacatccagggcccacagggcatttcctggctggcacaggtcactgggacgtgttggtcccttcccccaaccgaaacaactcgaaattcacacatatccccggaacaacagcctcctgccctcaaagtccactgccaaaaagtgcgaggggcgcgggaatgtccagtctctgcggtggcgcagatgcctggcggctttctctgggaccccctaaaagaaatccgggcgctttcatttttgcaccaacgctcttcaactttaggagagggggaatgcagcgtgcggacgggaaaaaggggatctagtgggaaatgcggacgtgaaagcactttttttgcaccttctctctggaccaggcgaggaggtagagggcgagcctggagaggaaagatctcttcccacaccctgcctgggtgctttcaagaatcccggcaaagaccctggggcgcacggcgcgccaccttggacatgtcgcctgggatcggctaccgggagctccttttcccgccttctcggccagcaccgggctcatcctcccggaccgggaggctccccgatcggggacactctcacgtgccgagggcaaggttgactccaggagggcaaggcccacgcgcccgacgcggcgcgcgcaggaaccgaacagtccgggggtcccggagccacccgcgcattttgactacgccgtccccgccctctctccgcaccctccgcaccctccgcaccctgcgtccctcggccgcatctccgccgggcgtccgctggctggctagctcaccactccacgccatccgcctccaaagcccggcactcacctgccccgcgcggcaggcgcgccgcacccagcagcagaacccctagcagtgcgatagagaccccgcagttcaggccggccatgactccgggacgcctcggcctcggtggggaaaacgacggtggggagcggcggccccaggcgcccaagcccggcgcagctgcgctccgccctggctcactcacctgcgcgcgggcggaccggcccgagccccgccctgcgcagcaggatcgcgagctgacccggtgcgtccctcctctctctcctcctcctcttcctgcctcagcgaccgcctctccctcccagggtgcagggctcccggcaccgggttgctgggtccctactactccccattgcggcgttggagcggacttgtccccacctttccgggcttagtcttccttcccaagtctgagaatgatgaggtctttttctccagagtcgcgaaggtcgcccatagaggaagccagtctaccttcccttttctgtcgaggagacaaaggccattatgcgcctcgttttggagaagaatcctatttgtgggccacccaagccctggatcctctgctacttgacttgggccagaggtctgttggactttaaagccggtggtggtacagctagtatttgcaggacggtgagcctgcagcctactccacacacatcacctgcagtatttccagacacgcaacgtgtccaaggtccccagggtagctagtaaattagaggcagatgcaccacttcgttgaattgtgagtagagtagtatgcatcccttcactgagctgtggatggagtagtatgtgcccttctcgagttgtattataaatggagtagtgtgtgcagtgtgagcgtgaagcattcaggtcaaacgttgggctggaaaatgaatgaaaaatgaatggcgctggactccttttccaaatcctcccagccgcaggtgtgccacctgcctgtcttcagaggccctgtgggttctccttccaccctgccggccatacaccaagtccaggccacaggcagagattgcggatggttcaggagttcttagctagcagacctgggttctgccagaatgactccctgggactacttgtgttcatggatagccagaagctgggccagagtcacccggagcaacctgggaggcttgggacaggaaccaaagcatgtgcgacagcatcagtttacagtccagtcccaacttctgcttaattcttgcgggcactgagcctctccaggctgccccaatcctccttgtggacaggggtgggaaatcatctcctaggagcgtcaccccttccttctcgatgtccttaatcatgagaatagagctagctctgccctctgggagcccacagtccatcgagggaggcagaacttggaacatgaccctgcccacacccccacctctgggagggcctgtatcgtgagctaaacgggaccttagatgtaatcttctagtccacttctgtccttgtgcagaaaaatgggaaaactgagaactagagggaagggagaggatgagaaacgaagagaggctcttggttctccccactgaatcgaggacaaattcatcaagagaaagaaatcttgacaaaaatctaaacaatctttaaaaatatttatgctgaccaggagggtgaaaggagatttgtcttttctcctgattctaagcaggcatatatatcccagcatcttttcctaacatccatgacaccattgtttcccacatacagtaatacccacaacagtactagaatggcagtgtattgaatgcaaaatatcagaaatattgcttgacaagttaagcctaaggaacaagttatttccttactatttcgtctctccaaagtttgcttaactgtctttcttgggatagttgacaccagctttctgaaaatggaatgagagtcactaattcccaaatatgaagcattggtggtggttccagaaagtagcagcaacgagaaagaagaaaatagggaggcacttcagcatcctttgcgtgacaacccaactacatagttgaagtaaagatgtcctgacatactgtcctggtcctccaagtggagtgtgaacaaagcattgccaagaatggacatgttttgtctttacaaacatggctgaatggaaggagtaaattttaaaaggttatttctgaactggaaagcaacgtaggtaactataatctagtgctagagagaaatgagagattga

SEQ ID NO: 315453 - DNA, 4001 bp, Homo sapiens
cagcctgggctccctgacttctagcccaagccctggccgcagtcctcaatcctttttgctttcaagccagttactgtttttaaatactttttttttttttttttttgagacagagtcttgttctgtcacccagcctggagcagtggcacaatcttggctcactgcaacctccacctcctgggttcaagcgatgctcctgcctcagcttcccaagtagctgggattacaggcacacgccaccacacctggctaatttttgtatttttagtaaagacagagtctcaccatgatggccaggctagtctcgaactcctgaggccacctgcctcagccccctcaaagtgctgggattacaggtgtgagccaccgtgcctggccattacctacatgtttgttttttttttttttttgattacagaaatgatacagaattgtcataaagaactgagaacacatagcagatcttgaaagaactcagcccctggctgggagcggtggctcatgcctgtaatcccagcactttgggaggccgaggtggggagatcacgaggtcaggagatcgagaccatcctggctaacacggtgaaaccctgtctccactacaaaatacaaaaaaattagccgggcgtggtggcgggtgcctgtagtcccagctactcgggaggctgaggcaggagaatggcatgaacctgggaggtggagcttgcagtgagccgagatcgcgccactgcactccagcctggacgacagagcaagactccgtctcaaaaaaaaaaaaaaaaaagaactcagcccctgagatgtccctgtgggaacagccatggtcactggggagtgagcagccctcagcagctctctccaagaacatacatcatgtagaggctcatctatgcctctgctgcaaggttcctcttcaggctgtgcctggccaggtgggggttaatttattctctccatccccccacccccatcctgtcacccaccgtcccatgttctgggcttacctgcgctccgtggagttctaggcctgggaggagcagagtgtacagccgagccccaggtgtgactgtctctggcacctgaatcatttccccagctggccagagtggaggtcagggaggatctgctcaggccatgcctgcccccaccctgccggctgcccctggcctcacctgggctggcaaattgaccagcacactggatatggctaaggtcccgctgcacatccacagagagtgagccctccatcacatggttgccacatgtgaacttcagctgcaccttgtagtggttcaccatcagggcatccaactgagcagagctgctcaaggtcaactggggtgggtggacagtgccatgtggggcttggaaattttaggtctgcccttgtgcccccacagtccccagctgtacacatgaccctaccttgcccacataggtcccttgccacctggccaagctgggtgggttgaagaaggtggtgggtggctggacattgagcaactccagggtgggtgtgggcgtgtaggaggagcagttgaaggataaaaactgaaggactgtgccagggccctggctctcagagacatttataaagcagggcaggctgcagaggtctgtgaagagcagagaattcaggctggaggcccccaggctgatggaaccacacatactagcatagtcctgtccttttgccacagggcctggccatgccatggggccaagcagctaaggcctttccttgtatccagcatccagcatttcacagatggggagtgagaacttgactgaggaagtggccaagagaaggggtgagggccaggggttcagattcttacactttcctacctctcccccaatccctgtcctccatggtagcttatctgggaagggtcaggactccaagggaaaactacggttcccccacccaccacctcctcaccagagaccaccggagcaaagaggaacacgaggagcctgagcagcaccatgatgacctgaagacacagacagcagaggaggcttcagaaagctaggctgtttgtctgactcaccctgttgccaggtcagttgctcaaacatagctgggcaggcgggactcctgggcctcccagattctatccccacccatccctggtgactgagttctagacctctggcaggcttccagaggctcagaatatcccattttccattgcccccattcattacaactctaagggcatggaaggggaggaggattaaggttcagatgaggaaactggtcatgcaatccgtggagatagagcaagcacagcacccaggaaaatttggcccaggacctgctaccccacagagtctcaactccagctggaccccctccattagaacattatctgcctataaaaaatgagcccaaccgtcaacaaaatctctcaaaacttgctgggtgtggcggcttacatctgtaatcccagcactttgggaggctgaggtgggaggatcacttgagctcaggagttcaatatcagcctgggcaacaaagtgagaccccatctctacaaaaaattagttgggtgtggtgatccaggcctgtagtcccagctactctggaggctgaggtaggaggattgcttgaaccccaagagatcgaggctgcagtgagtcatgattgtgccactgtactccaacctgagtgacagagcaagaccctgtctcaaaaaaaaagaaaaaagaaaaaaaaagttgtctacatccaacaagcaaaaggaatcctttatgatagaaatacaaatactggttaccgttgggaatatcagttggatagggcaccaggtggcatccaggagttgctgaggatgttctatatctgggtggcagctgcacaagtgtctacagattttaacatttactgggctgtaactttgagatctgtctatttattgtatttatatgtcagtttttttaagttttctggccaggcacggtggcttatgcctgtatgggaggctgaggcaggaggatcgtttgagatcaggagttcgagaccagcctggacaacatggtgaaaccctgtctctacaaaaaaaaaaaaaaaaaaaattagctgagtgtggtggcacatgcctgtagtcccagttacttgagaggctgagataggagggtcacttgagccccagagatggaggctgcagtgagccaagatcatgccactgcactccagcctgggtgacagagtgaggccctgtctcaaaaaaaaaaacaaaaacggttgtctttatttgccatctccagttcttcagtcctcactctcttctccacacactctaatcaggcttgtccctctctacacaaaactgcccttgtcagggttcccagtgacctatgcactgccgaatccagtggtttgttcttcaccctcactgcctaggcagcattcaatgcttgctccccttgggtcctgagtccccacattctcagatttctcctggctgttcctgctcagcttctttgatagctctgcttcatatctcccctacctccacctcatggaatgtcccagggcacagtcccgattgctgtctccctctgactacactgatttcctcccaccccaccttatccaggcctatggccttacataccatccattcactcactatgcctcccagatccaaggctccagtgctgatctctctcctgaagtccagagtcatacacctagcagctgactctgcaactcctcttggatgtctaacaggcatctcaagggttacgtgtccataaatgatcattggattttcctctccaaacccactcttctccagtctttcccagatcagtttatggcaatttcatccaaccagctgttaatgccagaaatgtaggagtcatgcttgatgcctcttttcctgcccacatccatgcatcagcaagacttgattttagttccaaaacataccccaaagtgacccccttcagtgcacctgccctgcccaggcctaggccctccccttcgttgc

SEQ ID NO: 315454 - DNA, 4001 bp, Homo sapiens
ttgacctggtgcttattgcacaggttggttgcactgtgtgaacacataaaacctctatctctctgtaagtatgatatacttcaattacaaaaacatatattcacttgcttattggagaggatgtgaaaaacatccacattacttttgaaaccaaaactaagtacaatcaccgatgttaaaagtaaaaattttgaagcgacaaaatccactttagctgtctcaaatgaaaagtcctaaccagaactggaagtaggcaagctctcacaggattttagagtcagcagctaatttcatgagcacacggaagggctgcctccatggagtgagaaagagtagacagaacccatttgagtcctaataagcatatctagagcacaaggctactatgatgctgctttggggccaaaggaaaacctaacttgtatccaatatctatcccaaaggttatctaaacacatttgtaaccagactataccttatttgcattgcctgaaccctgaggccgctgtaatcaacctctttttgctccaattctttccattcatcttcgtcctgtaaaacaaacgccatttgatcaattaaagctatttgtagacatataactaagcaaataacacactacgaaaagtggatcaagtggctggaacctaaactaagtatgtacttgtcttctggtcaaagcccttgcttcgttctggggcaaactaggctaaatggaggacaaacatgctcgtaggctaacactatacttccgctgggttcctgcatgggagctgttactttaagcaactaagaaaagccgaaggaagaagtcaataggaatttcacaactacatttctacttcaaccttgccaccgagagttttctttttctttcacgggcttagagactaagtcatcacaaaagagctgctacaaatgcggctgctgaaagcgaaaattcagctcaaactactgggctgaggtcagcacacggaattactcagcctagacgtcacccgataaacgctgctctgtgctgggcactgcggccccagacctagtgcccccggagggtggcgccgcccgggccttggctaacgccgagcgacgcggggtgggaagggcggctccaccgcggatatcggaaggggtcccggccctggcgagcccagcccgaggtggagagcctgcgtcacgtggcggcccgcgcccgtccgcccggcctccgcggcccctcccggacgcttccccggcaggcgggggcgggcacatggggcgccggcgcgcggcccgggccccgagtgccggcctcccggcccctcaccttcgtcacagccttggtggcggcccctgggcccgcagcccccgcgctggcggtcccgccgtcacccggccgggtccccgcgcccgccccgccgcccgccgcacccgcggctccactgcttccgccggcgctgcccgctgcgcccgcggcactcgccgcccggttgctccgctccttcttcttcttcttgtccctcttggcaaagaagttgtccaggctccgctcctccgtctcagccatggcctcggcctcctcgacccggatgggtggggccggcggcgggcgcggcccgcggggctccgagctcggggtcgaggccggctctgcgctcacgctgccgggcgcggcgacgcctcagccccgcggggtcgccgaggcgtgcgcggcgagacgggcggctccccctgcgtgctggcgagcggtggtacggtccgcccgggggctcgcgcgccgccgctgtcgcccgaggctgccggggctgccgctgctgctgcgacggcggagcaggattccgctctccccacaacctgaggggaaaaggcacgcgcgagccagaggttctggcgagagtgctcggctagcagcggcgcgtgccggaggaagaggcgcgcgcgcaggcctggagaggaggggaagggagtggggaggggagggagagggaggagggagggcgggccgctagaagagagaggaagcgcctgcgcctgcgtattttgctctgcctgccgctgtgggatcgccaaggggcgggcggcgggaggagatggaggcggagctggaaagagagccaatcaggtgccaggacgaagctcttaggtgacaatccctgacccagacggggcggagtccaagcatgggggcggggagaggagggcatatgcaaaataagtgacgtgccgggcgactccggtttcccgattggccgagggtttagtcttgagggcgggcatgttgagggctggttgatgacttggctaaagaggtccagcaggaggggcagtgggttccttttggacgcatgcgcaggatgcacgtgtgtttcctggcccagaacaaaccgtggccccatagtagtcgtttgaactgtcgcgaaacggacaggcactgcgttaagccaactgtgttaaagattgttcctctcctctgatcgcttctgtacttccaccccctctggagtggcaaccattacttttcttctttaccggttgattgtgaaagtgagaggagcagtgagcctgaagtttaggtcccatttactaaaagatctttcataggctggttggtaggtagaaagggattttgtctgaactccaccctctggattatgtttaccaaggtcaagttcaataaatcctatcgtcaagtccctaatctgtaaagtgggtatactatttcttacaagatagggggatggagggaagagagtcaacattattagctgctcagcacattgcttaacgccctgacttgagtctagatgatgatacagtttatccttagcttctatccctgataaaaggaggggactgtcttatcataggggtggagaccaaaatgcccaggcgaaagccaggtttaaatgggtttaaagcccatttaaatacccttggggccttgaaaatgaaatgaattctatatgcaaaaggtggtctaaagtaagctcttaaactttctacttcctccttctaaaagcagaagagggagctgtcacaaccattgaggaaatgactcagacaaatgttggtagccatatggggtagatagaatccagccagtaaatggagagacttcttcgtcttttcctttacagttaccccattaaagtttctcttttcctaccccctacttacactgctattaaagaattaacttctggctgggcgcggtggctcacgcctgtaatcccagcacttcaggaggccgaggcaggcgcatcacctgaggtcaggagttcgagaccagcctcaccaaaataatgaaaccccgtctctactaaaaacacgaaaattagccgggcgtagtggctaacgcctgtaatcccagctacaggttgaggctggagaattgcttgaacccgggggtgcggaggttgcagtaagccgagatcgcctcattgcaatccagcctgggcaacaacagtgaaactccgtctcaaaaaaaaaaaaaaagtctaacttctgaatgtcaaaagaaatcaaggacctagccttggccagcaagtagcttgagcttatacatatactattccccaaacatgaacagctcccaaggtgacttccttctatgacaacatatatcttcctgtgatgcaggccaggttcagtactgcccatcaccatcaccctcccttaccatcgctaatcaaatttattttctttcttttttttctttccttcttttttctcccttcctcttttctttccttcttttcttcctcccccctctttcttccttcctccctccctctctttcatttatttatttatttatttacttacttattttttgaggcaaagtcttgctcttgtcaccaggctggagtgcaatggcatgtcagctcgctgcaacctctgcctcccaggatcaagcgattctcctgccttagcctcctgagtagctgggattacaggcacccgccaccacacccagctaatttttgtatttttagtagagacggggtttcaccatgttggcc

SEQ ID NO: 315455 - DNA, 4001 bp, Homo sapiens
acacacaggcagttccacaacaccaaatggtaagaacctcacattccctcctccccattatttacaggtcaagccccaggagacagaaaagagaaagacacattaaggaagccaacaagtggttgggaatcaaactcaagtctaatcacttctactcaacaccactacaaagaaatctcaagagtggagaagccatcgttcctgaaagtttcccattatcaatctgggggtttcactttggttaagctcacaaaatgatgttttcacagtaggacattaatgcctagctgtggtaggtgttcaacaaatgtcaataatattaaccctgctttttgagtaagttatctaaagctatagatactaacatccagagaagtcaaaagacagttttcagttaaggaaagtatttcctccactgtgcctcgcactcactggcattgcctataaaatgcaaccttcaaactggagacagtttatcaagatcctttatttctttaaaccgggagcaaaggattttttcatcttacagcagaaccatatcttcatttgttttttcctactttatgaaccctccaaaatatagcacttacttaacatcaaccttaaagttgactgccatagactggacttgacaaaatgttaatttcaaatcttctaaactacccaatttttaaaaattactatttttttgaactttaaaaaataacatgtttacaaatataattccattcctatgaagttttagaaaaaattatggtgttagaatagtggttatgttgaaggtgaatgcagtgagtatgtgttaggaggggaaccttgttctgtatcagtaatactcagtttcttgacctggtgcttattgcacaggttggttgcactgtgtgaacacataaaacctctatctctctgtaagtatgatatacttcaattacaaaaacatatattcacttgcttattggagaggatgtgaaaaacatccacattacttttgaaaccaaaactaagtacaatcaccgatgttaaaagtaaaaattttgaagcgacaaaatccactttagctgtctcaaatgaaaagtcctaaccagaactggaagtaggcaagctctcacaggattttagagtcagcagctaatttcatgagcacacggaagggctgcctccatggagtgagaaagagtagacagaacccatttgagtcctaataagcatatctagagcacaaggctactatgatgctgctttggggccaaaggaaaacctaacttgtatccaatatctatcccaaaggttatctaaacacatttgtaaccagactataccttatttgcattgcctgaaccctgaggccgctgtaatcaacctctttttgctccaattctttccattcatcttcgtcctgtaaaacaaacgccatttgatcaattaaagctatttgtagacatataactaagcaaataacacactacgaaaagtggatcaagtggctggaacctaaactaagtatgtacttgtcttctggtcaaagcccttgcttcgttctggggcaaactaggctaaatggaggacaaacatgctcgtaggctaacactatacttccgctgggttcctgcatgggagctgttactttaagcaactaagaaaagccgaaggaagaagtcaataggaatttcacaactacatttctacttcaaccttgccaccgagagttttctttttctttcacgggcttagagactaagtcatcacaaaagagctgctacaaatgcggctgctgaaagcgaaaattcagctcaaactactgggctgaggtcagcacacggaattactcagcctagacgtcacccgataaacgctgctctgtgctgggcactgcggccccagacctagtgcccccggagggtggcgccgcccgggccttggctaacgccgagcgacgcggggtgggaagggcggctccaccgcggatatcggaaggggtcccggccctggcgagcccagcccgaggtggagagcctgcgtcacgtggcggcccgcgcccgtccgcccggcctccgcggcccctcccggacgcttccccggcaggcgggggcgggcacatggggcgccggcgcgcggcccgggccccgagtgccggcctcccggcccctcaccttcgtcacagccttggtggcggcccctgggcccgcagcccccgcgctggcggtcccgccgtcacccggccgggtccccgcgcccgccccgccgcccgccgcacccgcggctccactgcttccgccggcgctgcccgctgcgcccgcggcactcgccgcccggttgctccgctccttcttcttcttcttgtccctcttggcaaagaagttgtccaggctccgctcctccgtctcagccatggcctcggcctcctcgacccggatgggtggggccggcggcgggcgcggcccgcggggctccgagctcggggtcgaggccggctctgcgctcacgctgccgggcgcggcgacgcctcagccccgcggggtcgccgaggcgtgcgcggcgagacgggcggctccccctgcgtgctggcgagcggtggtacggtccgcccgggggctcgcgcgccgccgctgtcgcccgaggctgccggggctgccgctgctgctgcgacggcggagcaggattccgctctccccacaacctgaggggaaaaggcacgcgcgagccagaggttctggcgagagtgctcggctagcagcggcgcgtgccggaggaagaggcgcgcgcgcaggcctggagaggaggggaagggagtggggaggggagggagagggaggagggagggcgggccgctagaagagagaggaagcgcctgcgcctgcgtattttgctctgcctgccgctgtgggatcgccaaggggcgggcggcgggaggagatggaggcggagctggaaagagagccaatcaggtgccaggacgaagctcttaggtgacaatccctgacccagacggggcggagtccaagcatgggggcggggagaggagggcatatgcaaaataagtgacgtgccgggcgactccggtttcccgattggccgagggtttagtcttgagggcgggcatgttgagggctggttgatgacttggctaaagaggtccagcaggaggggcagtgggttccttttggacgcatgcgcaggatgcacgtgtgtttcctggcccagaacaaaccgtggccccatagtagtcgtttgaactgtcgcgaaacggacaggcactgcgttaagccaactgtgttaaagattgttcctctcctctgatcgcttctgtacttccaccccctctggagtggcaaccattacttttcttctttaccggttgattgtgaaagtgagaggagcagtgagcctgaagtttaggtcccatttactaaaagatctttcataggctggttggtaggtagaaagggattttgtctgaactccaccctctggattatgtttaccaaggtcaagttcaataaatcctatcgtcaagtccctaatctgtaaagtgggtatactatttcttacaagatagggggatggagggaagagagtcaacattattagctgctcagcacattgcttaacgccctgacttgagtctagatgatgatacagtttatccttagcttctatccctgataaaaggaggggactgtcttatcataggggtggagaccaaaatgcccaggcgaaagccaggtttaaatgggtttaaagcccatttaaatacccttggggccttgaaaatgaaatgaattctatatgcaaaaggtggtctaaagtaagctcttaaactttctacttcctccttctaaaagcagaagagggagctgtcacaaccattgaggaaatgactcagacaaatgttggtagccatatggggtagatagaatccagccagtaaatggagagacttcttcgtcttttcctttacagttaccccattaaagtttctcttttcctaccccctacttaca

SEQ ID NO: 315456 - DNA, 4001 bp, Homo sapiens
gtcccggtcagtggccgtgacgcgcagcacgactgtgtgggggcgcacatcctcgcgcacctgcgccacgtagcgcttctcgctgaactgaggagcattgtcgttctcgtctagcacagttatgtgtacgcgcacagtggccgagcgcggcccgggttcctggccctggtcgctggcttccaccaccagctcatagctttccatgtgctcgcggtccactcggccgctggtgctgatgaggccggagcgtggatcaatctcgaaggcggcggcagctgcagcgcgcgcagctggcggccccacgaagcggtagcgcaggttggcgttggggggcgcgtcgccgtcagtggcacgcagctgcaggatagggtagccctcctccacattctcgcgaagggtctcccggtactgcgcttgctcaaaaaccggcgagtggtcgttgcggtcggctactgtcacggccaccatcgtggtggccgagaggcgcggcgacccgtggtcctgcgcggtcacacgcaggtagtgacgctccatgctctcgcggtccagagctgccgccgtacggataaggccgctctgcgggtcgatgctgaacagctccagcgagcggctgttcatgagtgccgccagcgagtagactaggcgcccggcctcgccggcgtccgggtcctgagcaaccacgcgtagcaccgcggtgcctgctgcctcattctccggcaccagcgtctggtagttgtactgcggaaactgcgggtggcggtttgcggcgcgacgaaagcgtgcccggttcgccgaggttactttcctggcttcaggacgggccgggagtcccgggggacgcggcccggggcgctgcgggaggaagcggcagcggaagagaccccgggagcgcatgcgcttgggcgccggctcgggagctgtccgagactcgcggggtgctgaacctgatgcaggagctgtcctcgccgtgcgtggtgctgaatccagctcggggccagatcccgaggcccctggaagacagttccgccggggggctgtcctttctgctccggatgtcgtggctctctcgccctgacccttgctccctgttgcccataattccccacagcagcgcgcggtgcccactcttttgcgggagcctgtcccagcgttccgctgggaggacaccggcttgggaccgtggtgccgaatcaaaaagtctgaagggaggggcgagctgttccccgagcccgggacccctgaggacagagcccctggtgacagactacctctttgcaaaggtcctgtccgcccgcaagaggagacctctgggcgccagtataacacagaccctggtccctgtcctgtctctcgttcgcggctgcccaatggctggacgccgtgttcaatccccagctcctcattcggctgctcagggggccctcgactattccgggcgctttgccttctccctcggagccccacgaagataggctccctgacccccaggccaggccccccatcctcccggaccccggaagactccggacaaagagctaaggctccgccaccgatatgcgcccttggccccgtagtggcagctaagcctgggtcccagccctggtgcccaccgccccccagctcctcctggctgagggggaacaaagagaggagaaggagcaggagtatgggggtcgaccgtcccccgaggccccgccacggcggccgcctcgccatcatcccccgcctccctgcacggcctccaccgccccccgccccggtccgggccttgggctggccccgccgctcgggccccctcccgggcccctgccgccgccccgggcccccgcccctccgcctgtctctccgcacccccgccgccctctgggcaccatctactccgcggccggagcccctccggcgtgcggccctggctttttccgcccccaccacagcatccccgacgctgctgccgcctcccgccgctccaacatggctcccggccgccccgatggttcgctccacctctgccccggcgcccgaaacacggtggtacaacccatcgcgcatggcagctctgaggaccgaagatgttgccgccatctttattgaggacgtgagcgttgctcctggtgctgaacagagcgcgaaggttcgccgtcgttgggtccgccctccccactttcggtcgccgccttcacccacctccctccttctagggcgctgtcccagctccgtctcccagcctttttctgtccttccagatctcttgttcccccttcctgaccactagttctgaaccgtgtcccggattttggtctgaaattttggtgcccatgagcgttctcatagctctgggagggggtactgtgtgaaatcctggggtagaggggacgatggctggagaggggtctggggtgccagcaccccgaacaatagctttaactatcccatcagctagttttatgaaacatgtcgcgaccacctgcttgtttggatcgcccctgcggagcagggaccagagatgaccctcccgaggcgggagcagaggccaaattcttccctgccttgctggtccccagcagtctcccgggctcggggccccttcactggaggctgcaccccctcccaggctgcgagtcccgagtgctctgggatgccacgtggagcccggcgttgccccatggctgcgggccccgcttcttcgggtccccgcccctcgtccgtcacgaccgcatgccttaaccccttgaagggactgacacagaaactcagtcctccccccaccctcggtgcattccagctctccctgcgtaactcctggcacgcgccggtctcgccaggccaatgggtggacctggcgcaacagacgtcacgagaggagcggaggcgaggggtgaacgcggagcactccaatcggtcagtcattgtttctattggcacaatgggaggccccgcccctcacggcggactcatcgcatgggggagggggctccgcgggttgccggctaaccgtgagagagtccgggaggtacactatacggaccggcctccaaaggcggaatcgataacgagctgcagcgccgggtgcagaggacgcgggcatcccgaagcccaggaagaggtcagggccgggaccccagaacgctccacagggtgcggctcccgcgatggggtggatcctggttctaacaggcgaggaactcctggccaaggcctctggcccgccccgaacggtccctatgacatcaccatcaaccaatcagtcggcgcatcctttcgccccttgactgctccgcttccgggaggcggggcttctgcgggttccacctcccgagcgccccttgtggctaccaaggtcaggcaacaggtgtccagttgttccctctcctgtctacgaatctgaggacctccccaggatcagagctctgggcctgatacacggccggggttcctacgggtttgtgagtgggggtggaagatctgcagaggcacttagggctgaactcctttgaatgggagccaatcggtgcaggggctggaggagcgagtcccccaaagtagttttatttatctatttagagacaaggtctcactctttcggagtgcagtggtgatcacagctcaccgtagcctcgaactccccaggcgattctctcacctcagcctcccgagtagctgggactacgggtacatgtcatcacacttggctaatttttgcattttttatagagacagggtctcaccatgtaggccagattagtcttgaactcctgggctcaagcaatccgcccatcttggcctcccaaagtgctgggattataggtgtgagccaccgcgcccggcaacccagaagtggttttgacagcaccagcgctttctgtgtccacaatctagtgagtagagggcacaaaacctgacaccacggaggcagacaggcaggggctctgccggggaagggtgttggagtcccaaaggaggcgtctgagtcaccttcgcaacctgggacgccttcttgcata

SEQ ID NO: 315457 - DNA, 4001 bp, Homo sapiens
gcactttgggaggtcaaggtgggcagatcatttgaggtcaggagttcgagaccagcctggccaacatggtgaaaaccacgtctgtactaaaaatacaaaaattagctggacatagtggcaggtgcctgtaatcccagctactcgagaggccaaggcaggagaatcacttgaacctgggaggcggaggttgcagtgagctgagatggtaccactgcactccagcatgggtgacaagagcaagactccatctcaaaaagatggaggcaggtgtggtggctcaggcctgtaatcccaacactttgggaggccaaggagaggagataccttgaggccaggagtttgagaccagcctgggcaacacagcgagaccatgcatgtctctacaaaaaatttaaaaattggccaggcatggcagcatgcacctgtagtcccagccacaccaaaggccaaggtgggagaatcgcctgaacccaggagtttggggctgcagtgagttgagatggtgccactgcacaacagcctctccaaagcatgatacgcctattcttaaaaaaaaaaaaaaaaaaaaaaaaaactactttaaaaaattactgtgctctacctctaatctgatgcaatgagctcacaccatttctccttcttttccttctcttttcttgctttttttttttttttaacgaatactattcccaattcacctaactaaaatttgatgttagtaaactacaacctacggggcacatataaactccacacactgaagcaatggctgtactcgtcaaagatgtatgcagttggtactcaaataatgtagttttttttttactagactctttttaaaatttaactttaatttttgctaaagtaatgtttgtatttggaatataaaataattctatgaggcttataacaacaaactatcgtccttggccctactcctcttcatagggagccagactgaattttaaaaggcatatcttccaaaatttctctctccatttcttaagaaacatgcttatactaccattttcagtttttttttttcttttgaaacagagtctccctctgtcgcctaggctgcagtgcagtggcgtgatctcccctcgctgcaacctccgcctcctgggttcaagcgattctcgtgcctcagcctcccgagtagctggaattacaggtgcctaccaccatgcccagctaatctttgtattttcagtagagacggggtttcgccatcttggccaggctggtctcgaactcctgacctcaggtgattcgcccaaagtgctggggctataggcgtgagccacctgcccggctattttcagttttggatagtatgttttgacatacactctgtttcctctttgagacacccgctctagagccctctattccactccaagccgcctggatgctctcttggcctgcttacagattccactctgtttaggaagaaggacggcacgtttatccaattattcttcctggacacgaatactcctctccccagagatcagtaactgcccacaatcttgttaggaagccccacagcacctaagggtacgaatgtccccaaagagtagacgattctctccctactcacgtctccactagtgcaaggctggctttcttacccttagaggaatacagaaatgacatcgtctgcaggccaacgtctaaacaaccaggagtgggtttttccacccaaccgcagtgcacgcaaagcccctaagccgactgtgagaccgggcggagcctggcgctgcaggaagaggcgacagccacagccctactgacgagcccgaggggtgaactccccggcgggaggcccgaaccctcaaacaccgggaagcggaggtgggggccggctgggggaccggtccaccggctcccacctcggcgtacagggattccaggtcccggcgagcgctggcctagcggtttccacagcgacaggccgggcgcgcgtccccgcgcgtgcgcagctcctcgcccgcccccgggtgggcggagcaaggaacagctgggcggggacgaccgccccacgccgcgcgggaacccttgggggccggggctgcaggcagctgggaaccgcgggcgctaggcgcgcgcacccagcactcggtcccagccgataaatctggggcagcgcgcggtaggagctgcgggcggccaggccccttcctgcgtccgcacctggccccgcgcgcccctctcgggcgtccggcttccggcgtcctggcggctcgggtggcggcggttcgggcggccgcctggctgctcctcggggcggcgaccgggctcacgcgcgggcccgccgcggccttcaccgccgcgcgctctgacgccggtaaggggggcggggcttggggggccagagcgtgggagcggtcccggctcccgggcctctcggcgggttgcggggatgtggggacccggcgcgggacctagatcagtagggcgagccggaggaggtcagacactagagccgtgtgccctccttccctcccgtgcgctttgctctgcggcggatcccgggtctccgggagagtcgggctcgggccctgcggttcccaggctggactggccgccctgttactaaagttctgagaaggaaagtcagccgtcaagcgtcttgggatgctcttgagctgcacgaagcttctgatcaccaaggggccaggcaaggccttagcgccctgtgaggcctgagaatccccaaactgaatgtaggactccgtggcaaactgctagttgttcgtgcaagtagtagttggcaaactgcttgtactactgagacgggcaagtgcgggaataattacaataaagggtaaggtttgatgggaggaaagcacaaaccctacaagtttctccatctgtaaaatgaggatgtttctgtcatccttggtatcatttagatccgtttagtatctgtcaatcagtgcagttctgcttgtgtgtttacatattgggttttcaagtttatctaaacaaaggattatgaggccaagaagattttttttttgagatggagtctcactctgttgccaggctggagtgcaatggcgcgatctcggctcactgcaacctccgcctttcccaagttcaagcaattcttctgcttcagcctcccaagtagctgggattattacaggtgcccgccaccatgcccagctaattttttgtatttttagtagagacggggtttcgccgtattggtcaagctggtcttgaactcctgacctcaggtggtccaccctcctcagcctcccaaagtgccaggattacaggtgtgaactaccatgctcggccagaagaatttttaaacagttggatttggtaatctgtagaggcttccaacgttagcattttataattgaaaaggggtcaaaattagcggggcgtgatggcgtgcccctgtagtcccagctactcagggggctaaggcaggagaatcgcttgaactagggaggcggaggttgcagtgagccgagatcgcgccattgcactccagcctgggtgacagagggagactctgtctcaaaaaaaaaaaaaaaaaggaaaaagaagtcaatttccagagccagttcaccactaccaaagtaatagttaagaggaaaaatgttgaaggtaaattcacattcaacaaattcgttttaaaaatggtacttttgcctttaaaatcatgacattctagtatttgctgtactatttgtaaattagcctttctccggtcccaatgatcaactgctgtctggtgtacataccagtagaatttaagcctgttcataatttttcttctaatttaatttatagttggatagcagtcctcacttcccaccctacccccattaaaattaaacaggatgaagaaagatctggatttgtgctgggcacagtggctcacacctgaaattctaacacattgggaggctgaggtggaaggattgcttgaggccaagagttcaagaccagcctggaaaacatagcaagaccctgtc

SEQ ID NO: 315458 - DNA, 4001 bp, Homo sapiens
tgtgtatgtgtaatgacagtactgtggctctgtaaaactgaaaaacctagctcctgatgggggcggggaggcggactaaaataacataaagatcggagattcagttcctgaaaccttctgtcaatgttggctttagctgaatttcaagtcaagttgacattttttgaaagcaggaagcaatgacagagtggactactgatgctgtcaccatctgccagcacaacataaattagaacagaaaggactaagcaaaggtcttccaccattttaacgagaggaaatggcatcagtacaatcaacatacacaatttttacaaacaacttttagatttgcatctacatacattttaaaaggcagtgtgcctgtttataaatctctactctaatttagtttcagagctttttactaccctgatcactgataatgccacagtcaaaaagcaaactcaaaataaaaatcaatctaaaaatggtactgcatgccaaataagaaaatatatacactttatcattaagctacagctaacagaaatctaatcaacgatccttatgatttcctcgtatctaaaaaataaatgcaagcacttgaggaactgtataaatacagggcatctaccctacaatactgctttattaaaataataaattcttttaataagtttaaccagacataaggctcagggaaaactactctgtgcatatcagcgtacggtgctgaaactgtaaaagacgacctgtctctgacatcatactcatctttactctcctgatgtcgtaagggacgtaagaaaaaccacattataagcctaaatgtactgtcttcaagtatctccatgattaaagtgttcctaagaaaccgtccttatttctttctatccctcatttgtgtgcatggagccgttagttcagggttctccaatttcagtccacgatttatgccacatttccgtacctcttgtactaacataaccgtttaaaccaactcactattttaaaagctgccaaccttaacatgccacactaaatgagcgggtccccttgtgccgtgaatgaagtagtcccaacagcgctagctagacagcagccctggcagggaggccgcactggggtctctccgctgaaaaggaaggtgggtccgccggggaaggtgagtactgggcgcagctcgctcgcccacctggccactctccgaagcgcccccagccacctggactccgaggaagggctgaccacctggcggggccgaaccccacgccgggctgcgccacgccagactccgccagtgtgcagggcatagcgggccaggccgagggactgggcttcggggcggacccaagccggcggggacgcgcctggtggttcgcaggccgttgcgcaaaccggccgcaagccatgaggccgcgaagccagaatcaccaaggcagcctgggccgcctccagaccaggacacggcagccccttgcccctccaacttgcgcaccggcggttacagggttgccgcaagcacgcccctgagccttcccgccgttacctcgggccggcgctgcgcacgcgcgccaccgctaagcttacgtccagcctctgtagtcggcgcgtttgttccgcccactgcccccacacttttaataattgaaacaatgccttctccagacttcccctgcacgcgagcaaatgaactcacccacatccgggaatccgaggaaagcgagtgcagacacgtgatgcgggggagggggggggggcgtggcaggagcaagcgtctgccgcggtggccgggtgccggtaagggtttccagcgcccccggcctaggttttggaggcgcgggaatgcgttcgttgctcagtgtcggacttccccctattcccatcggccgaggctgtcactttacgctcataaccgtttttctttactgcactcgtgtcgggaggaaagggacttgcgtggcacccccagacctccccgtctccgcttccacgtttggtacatcctgcctgaggcaggaagccgcagctgagggacggcctgtcgtacggtgcggatggtggtggcctgcgaggctcatttctagcaaggaacaaggctttcccgctttgattttataaatattatgtttacaaagctgtaatatatagaaattgataagacgtgtccctgtccctggaaacgcaggcaccgcgtgtttggaaagacattcatctgggctgtttgacagactccccagttggtgccatgctctgtgcttagggaactgtgagacccctggaggggtgggtaccgggaccgcactcagcctggggtttggaggcggcctcctataggaagcgacctgggacctaagatttttagactgactgtgggttcactggaataaaaaggaagaaacaaagagcattgcaggcatcgggactgtcacgtgagtaagaaaagtttgttcaggaaacagtggtcgtactgggtgacgagtacttgggacggtggctttaatacacaagataatcagtgtgccctgggcattgattatcttgatgcttcccatccttccagccccttatgagggaaggcaccttcgcgcctaatcccggaaatgggatgttgaccttcaagagctgacgcctgcgtttatcttgaaaggaagagtggcattagtgatgtggaaaagggggttttaactgtcaaggctggaaaatgtgacagggttggaggtgtttggagaagggacaggtgaaaaagattgagaccaaatgtggaaagatctactaaggaatcatgggtacaaaatgtacacgtaacagttggaggcaataatacctgagcaattgaccacaaagctgacctagcttgtttagtagattaagttaggacaagaagcaagagttcaaggatagaaggcctactgaagctcgagtgatttgagaaaactttacaaaggtggaaaatctacgtgggcctccgaaagtcaggtttggatcagctgaggaaagtgagaagggtatcccaggagacagagcagcaaggacaaaggagtagcagcaggaaagtggggagcacttgtaagacagggacttcaaaagtataaccaaaacttcgtcttgctttgagttatccactgggtagtactcggttaattattgagtactggattaattaagccctcacctggctcaccggtgacagaagtagcagggcgcattttgcttaacttttgccgagatccttgtcatgggggtgtaaaccctttcccacaccaatctgtgtataatttttgccaaggtgttagggatatcttgcagttatcctatgggggacagctgtgagcctttttggttttttttgtttttttttttccgagacggaatcttgctctgtcgcccaggctggagtgcagtggcgcgtggcgctatctcggctcactgcaagctccgcctcccaggttcacgccattctcctgcctcagcctcccgagtagctgggactacaggcgcctgccaccatgctcggctaattttttgtatttttagtagagacgaggtttcaccctgttagccaggatggtgttgatctcctgacctcgtgatccgcccacctcggtctcccaaagtgctggattacaggcgcgagccaccgcgcccggccctgtgagccatttttacaaaaacttccacctgccttggcccaaacctcagcgttcttaggcacaggagctcatgaacatactgagataacactaaactggactatgcgaagggaccaactacagacctgacacaaatcctcaaggcaagacgatgtctgaagttgagcttgtaaaggaaatggcttccttccttaaaatatcacccaggctgagctctgaaaaaagcacctccagatggtgggttccaccccgctccaccaccccaaaattgcttattgtgtgagtctccatagtctcagaaactgagagtacctttgatgccagtggcttccgggctttttggattgtcacttggtagcagggagc

SEQ ID NO: 315459 - DNA, 4001 bp, Homo sapiens
gactggtactgctctgcggccccgggtttgggggcccctggtttagaggacacaaaggcaacagagatacatgttaaaggatactgtgcgatgcaatctgctaaatttagaactgtaaggaaaaataggggctaatcccatagctataactatgagggaacaaatatagattaaaagatgtcaaatgtgcatcacccaaacacaataggcagatccctgtgggattttggttcaaacaagctaattgtaaaaagacatttaagagacagttgaagaaatcgttatctgactggatattgacattagagaatttttattaatttgtgtatgtgtaatgacagtactgtggctctgtaaaactgaaaaacctagctcctgatgggggcggggaggcggactaaaataacataaagatcggagattcagttcctgaaaccttctgtcaatgttggctttagctgaatttcaagtcaagttgacattttttgaaagcaggaagcaatgacagagtggactactgatgctgtcaccatctgccagcacaacataaattagaacagaaaggactaagcaaaggtcttccaccattttaacgagaggaaatggcatcagtacaatcaacatacacaatttttacaaacaacttttagatttgcatctacatacattttaaaaggcagtgtgcctgtttataaatctctactctaatttagtttcagagctttttactaccctgatcactgataatgccacagtcaaaaagcaaactcaaaataaaaatcaatctaaaaatggtactgcatgccaaataagaaaatatatacactttatcattaagctacagctaacagaaatctaatcaacgatccttatgatttcctcgtatctaaaaaataaatgcaagcacttgaggaactgtataaatacagggcatctaccctacaatactgctttattaaaataataaattcttttaataagtttaaccagacataaggctcagggaaaactactctgtgcatatcagcgtacggtgctgaaactgtaaaagacgacctgtctctgacatcatactcatctttactctcctgatgtcgtaagggacgtaagaaaaaccacattataagcctaaatgtactgtcttcaagtatctccatgattaaagtgttcctaagaaaccgtccttatttctttctatccctcatttgtgtgcatggagccgttagttcagggttctccaatttcagtccacgatttatgccacatttccgtacctcttgtactaacataaccgtttaaaccaactcactattttaaaagctgccaaccttaacatgccacactaaatgagcgggtccccttgtgccgtgaatgaagtagtcccaacagcgctagctagacagcagccctggcagggaggccgcactggggtctctccgctgaaaaggaaggtgggtccgccggggaaggtgagtactgggcgcagctcgctcgcccacctggccactctccgaagcgcccccagccacctggactccgaggaagggctgaccacctggcggggccgaaccccacgccgggctgcgccacgccagactccgccagtgtgcagggcatagcgggccaggccgagggactgggcttcggggcggacccaagccggcggggacgcgcctggtggttcgcaggccgttgcgcaaaccggccgcaagccatgaggccgcgaagccagaatcaccaaggcagcctgggccgcctccagaccaggacacggcagccccttgcccctccaacttgcgcaccggcggttacagggttgccgcaagcacgcccctgagccttcccgccgttacctcgggccggcgctgcgcacgcgcgccaccgctaagcttacgtccagcctctgtagtcggcgcgtttgttccgcccactgcccccacacttttaataattgaaacaatgccttctccagacttcccctgcacgcgagcaaatgaactcacccacatccgggaatccgaggaaagcgagtgcagacacgtgatgcgggggagggggggggggcgtggcaggagcaagcgtctgccgcggtggccgggtgccggtaagggtttccagcgcccccggcctaggttttggaggcgcgggaatgcgttcgttgctcagtgtcggacttccccctattcccatcggccgaggctgtcactttacgctcataaccgtttttctttactgcactcgtgtcgggaggaaagggacttgcgtggcacccccagacctccccgtctccgcttccacgtttggtacatcctgcctgaggcaggaagccgcagctgagggacggcctgtcgtacggtgcggatggtggtggcctgcgaggctcatttctagcaaggaacaaggctttcccgctttgattttataaatattatgtttacaaagctgtaatatatagaaattgataagacgtgtccctgtccctggaaacgcaggcaccgcgtgtttggaaagacattcatctgggctgtttgacagactccccagttggtgccatgctctgtgcttagggaactgtgagacccctggaggggtgggtaccgggaccgcactcagcctggggtttggaggcggcctcctataggaagcgacctgggacctaagatttttagactgactgtgggttcactggaataaaaaggaagaaacaaagagcattgcaggcatcgggactgtcacgtgagtaagaaaagtttgttcaggaaacagtggtcgtactgggtgacgagtacttgggacggtggctttaatacacaagataatcagtgtgccctgggcattgattatcttgatgcttcccatccttccagccccttatgagggaaggcaccttcgcgcctaatcccggaaatgggatgttgaccttcaagagctgacgcctgcgtttatcttgaaaggaagagtggcattagtgatgtggaaaagggggttttaactgtcaaggctggaaaatgtgacagggttggaggtgtttggagaagggacaggtgaaaaagattgagaccaaatgtggaaagatctactaaggaatcatgggtacaaaatgtacacgtaacagttggaggcaataatacctgagcaattgaccacaaagctgacctagcttgtttagtagattaagttaggacaagaagcaagagttcaaggatagaaggcctactgaagctcgagtgatttgagaaaactttacaaaggtggaaaatctacgtgggcctccgaaagtcaggtttggatcagctgaggaaagtgagaagggtatcccaggagacagagcagcaaggacaaaggagtagcagcaggaaagtggggagcacttgtaagacagggacttcaaaagtataaccaaaacttcgtcttgctttgagttatccactgggtagtactcggttaattattgagtactggattaattaagccctcacctggctcaccggtgacagaagtagcagggcgcattttgcttaacttttgccgagatccttgtcatgggggtgtaaaccctttcccacaccaatctgtgtataatttttgccaaggtgttagggatatcttgcagttatcctatgggggacagctgtgagcctttttggttttttttgtttttttttttccgagacggaatcttgctctgtcgcccaggctggagtgcagtggcgcgtggcgctatctcggctcactgcaagctccgcctcccaggttcacgccattctcctgcctcagcctcccgagtagctgggactacaggcgcctgccaccatgctcggctaattttttgtatttttagtagagacgaggtttcaccctgttagccaggatggtgttgatctcctgacctcgtgatccgcccacctcggtctcccaaagtgctggattacaggcgcgagccaccgcgcccggccctgtgagccatttttacaaaaacttccacctgccttggcccaaac

SEQ ID NO: 315460 - DNA, 4001 bp, Homo sapiens
cttgcatgcgcagtttacaatagggttcgtgcccctaggagaatctaacctcacggctgatctgacaggaggcagagctcaggtggtaggtaatgctcactagcctgtcactcacctcctgctctgtagcctggttcctaacaggccacggactggtactgctctgcggccccgggtttgggggcccctggtttagaggacacaaaggcaacagagatacatgttaaaggatactgtgcgatgcaatctgctaaatttagaactgtaaggaaaaataggggctaatcccatagctataactatgagggaacaaatatagattaaaagatgtcaaatgtgcatcacccaaacacaataggcagatccctgtgggattttggttcaaacaagctaattgtaaaaagacatttaagagacagttgaagaaatcgttatctgactggatattgacattagagaatttttattaatttgtgtatgtgtaatgacagtactgtggctctgtaaaactgaaaaacctagctcctgatgggggcggggaggcggactaaaataacataaagatcggagattcagttcctgaaaccttctgtcaatgttggctttagctgaatttcaagtcaagttgacattttttgaaagcaggaagcaatgacagagtggactactgatgctgtcaccatctgccagcacaacataaattagaacagaaaggactaagcaaaggtcttccaccattttaacgagaggaaatggcatcagtacaatcaacatacacaatttttacaaacaacttttagatttgcatctacatacattttaaaaggcagtgtgcctgtttataaatctctactctaatttagtttcagagctttttactaccctgatcactgataatgccacagtcaaaaagcaaactcaaaataaaaatcaatctaaaaatggtactgcatgccaaataagaaaatatatacactttatcattaagctacagctaacagaaatctaatcaacgatccttatgatttcctcgtatctaaaaaataaatgcaagcacttgaggaactgtataaatacagggcatctaccctacaatactgctttattaaaataataaattcttttaataagtttaaccagacataaggctcagggaaaactactctgtgcatatcagcgtacggtgctgaaactgtaaaagacgacctgtctctgacatcatactcatctttactctcctgatgtcgtaagggacgtaagaaaaaccacattataagcctaaatgtactgtcttcaagtatctccatgattaaagtgttcctaagaaaccgtccttatttctttctatccctcatttgtgtgcatggagccgttagttcagggttctccaatttcagtccacgatttatgccacatttccgtacctcttgtactaacataaccgtttaaaccaactcactattttaaaagctgccaaccttaacatgccacactaaatgagcgggtccccttgtgccgtgaatgaagtagtcccaacagcgctagctagacagcagccctggcagggaggccgcactggggtctctccgctgaaaaggaaggtgggtccgccggggaaggtgagtactgggcgcagctcgctcgcccacctggccactctccgaagcgcccccagccacctggactccgaggaagggctgaccacctggcggggccgaaccccacgccgggctgcgccacgccagactccgccagtgtgcagggcatagcgggccaggccgagggactgggcttcggggcggacccaagccggcggggacgcgcctggtggttcgcaggccgttgcgcaaaccggccgcaagccatgaggccgcgaagccagaatcaccaaggcagcctgggccgcctccagaccaggacacggcagccccttgcccctccaacttgcgcaccggcggttacagggttgccgcaagcacgcccctgagccttcccgccgttacctcgggccggcgctgcgcacgcgcgccaccgctaagcttacgtccagcctctgtagtcggcgcgtttgttccgcccactgcccccacacttttaataattgaaacaatgccttctccagacttcccctgcacgcgagcaaatgaactcacccacatccgggaatccgaggaaagcgagtgcagacacgtgatgcgggggagggggggggggcgtggcaggagcaagcgtctgccgcggtggccgggtgccggtaagggtttccagcgcccccggcctaggttttggaggcgcgggaatgcgttcgttgctcagtgtcggacttccccctattcccatcggccgaggctgtcactttacgctcataaccgtttttctttactgcactcgtgtcgggaggaaagggacttgcgtggcacccccagacctccccgtctccgcttccacgtttggtacatcctgcctgaggcaggaagccgcagctgagggacggcctgtcgtacggtgcggatggtggtggcctgcgaggctcatttctagcaaggaacaaggctttcccgctttgattttataaatattatgtttacaaagctgtaatatatagaaattgataagacgtgtccctgtccctggaaacgcaggcaccgcgtgtttggaaagacattcatctgggctgtttgacagactccccagttggtgccatgctctgtgcttagggaactgtgagacccctggaggggtgggtaccgggaccgcactcagcctggggtttggaggcggcctcctataggaagcgacctgggacctaagatttttagactgactgtgggttcactggaataaaaaggaagaaacaaagagcattgcaggcatcgggactgtcacgtgagtaagaaaagtttgttcaggaaacagtggtcgtactgggtgacgagtacttgggacggtggctttaatacacaagataatcagtgtgccctgggcattgattatcttgatgcttcccatccttccagccccttatgagggaaggcaccttcgcgcctaatcccggaaatgggatgttgaccttcaagagctgacgcctgcgtttatcttgaaaggaagagtggcattagtgatgtggaaaagggggttttaactgtcaaggctggaaaatgtgacagggttggaggtgtttggagaagggacaggtgaaaaagattgagaccaaatgtggaaagatctactaaggaatcatgggtacaaaatgtacacgtaacagttggaggcaataatacctgagcaattgaccacaaagctgacctagcttgtttagtagattaagttaggacaagaagcaagagttcaaggatagaaggcctactgaagctcgagtgatttgagaaaactttacaaaggtggaaaatctacgtgggcctccgaaagtcaggtttggatcagctgaggaaagtgagaagggtatcccaggagacagagcagcaaggacaaaggagtagcagcaggaaagtggggagcacttgtaagacagggacttcaaaagtataaccaaaacttcgtcttgctttgagttatccactgggtagtactcggttaattattgagtactggattaattaagccctcacctggctcaccggtgacagaagtagcagggcgcattttgcttaacttttgccgagatccttgtcatgggggtgtaaaccctttcccacaccaatctgtgtataatttttgccaaggtgttagggatatcttgcagttatcctatgggggacagctgtgagcctttttggttttttttgtttttttttttccgagacggaatcttgctctgtcgcccaggctggagtgcagtggcgcgtggcgctatctcggctcactgcaagctccgcctcccaggttcacgccattctcctgcctcagcctcccgagtagctgggactacaggcgcctgccaccatgctcggctaattttttgtatttttagtagagacgag

SEQ ID NO: 315461 - DNA, 4001 bp, Homo sapiens
aataaacgggccaatagtttgcagcagccttttccccactacaggctgtgacaggacaaaggtctggaactttaaagtcacaggaagagaccaaatgctttctagggccaaaacagaagctacagctttaattactgtcataacacacttaaaataagattgttgggggtaggagtcggggggtaggagtcggagggtaggagttgatttgtacatggcatagtaagccaagcatagaaaagcaaaaacataattgcatcttctggcactttctaggtttcccgagtctttcagccaaattgccctttataggtctgaagccccttgtaacatgctccatatcttaaaatttaattatttttttcaccatttggggtgggggaggggagctgacaataaaccatggccaataactgttccttctcaactgaatcacaccaaaatctgtaagcatcttcaaaagtatatacttcaaattactgcaataaatgaacatgtaaccctttcgaagtctctattccttattaaatgcaaaagctctattctaaaaatattgcaacttgctgtttaatgttcctaagaaagagctgaacttaccccaaataggaaagagttaaaatggaatgtcatctcaaccaaatcattctgtctcaggagaggtgacatgaaggggcagaaccttgctttgaagcaaaagctgtagggaaaactccaagtcagccacctcttccccaaaaggcggggcaggggaggccagagtctacttggcaatatttaaagtacaaaactcatgcagaggcttgaaaccaatatgggtaatgcctgcacagagtttaatatattatacatatatttttgagacagagtctcgctccgtcacccaggctggagtgcagtggcgcgatctcggctcacagcaacctccgcctcccgagttcaagcgattctgctgcctcacccgcccgagtagctgggattacaggcgcacaccaccatgcccagctaatttttgtatttttagtagagacgtggtttcatcatgttggccagggtggtctcgaactcctgacctcaggggatccgcccacctcggcctcccaaagtgctgagattacaggcgtaagccactgcgccctgcctgtttaatatcattgattgaaaaacaaagtggcagtaaaaaaggaaactctgattggtctctctgttacaggtgacttagccttctggcatttttcaccttgaaaaactcctattaggccctgtataaagtcagaggtctcctgaatccggaatgaggttaataaactggagaaagagatactcacctgtgctattcgcctaaccgcccccttctgctccgagtcctcactccccaaacaaccttcgcggttgtttgacacaaaactagcgcttcagcccgggtcgattttgggggatggagtaattacctacagcttaaatcgagtctgtgcccgacgtgattctaagctttactcttactgcctcatttaaccctcacaaccaccttgtaaggcaagaattaccagctttagtatacaaataaagaatcggaggcgctgagacattaaaggagaagccaaagaacacaaagcctggggagctgggactggaggcagttttgtccgatccccaaacccttacgcagggatttttaattggcgcgaccctgtcccagatggctcctccccgacaagggtcagtctgaccacttttaggcccaggtgaggtcaagtccggggtactccgggaaggggctcacgccgacgcctctgagagccccgagagccactcaccttactcagtcgccggcctcccaccagcagccagccgggccaggttaggctgggatcagctacgtcaggccccgcctccgcgaccgttaccaccgccgggggagggcggccaatcgagcccgagcgcgtcgagggccagcccctctttggcctgcgaatgcccccaaacgattctctccagcctctccgggaagctgggtccgccccgctccctccggttggctcactacggggggcggggcttaccgcaaacgaaggcgtcggtgcgatgtgctggtctcgggcacgctggcgcttccaacgcactccttgggtgccctgtcacttacatggaggcttatttgcccggaagacgtcagaaatacttgtggccgtgggtgaaagtgaagcctgggttacctggccaccagagactgccctctctctcgccccctaccccgccgcgactacgagcccttgctggggtacgggtcagcatgttctcgatgttccagacctgaatgaccactgtagcagctgacatttggaggaccccaataaatatttgttgacgacagttcatcttcccattcagcattttccacatctcgacgaagcgtcaggccctacctgaggctgtagctgtccaccattgtcattgtatcttatagccacatggtgtcgctgttgacaacttgtcttttcaaatcagtcaaatgatgtaggtctgtgttacagtcaaatgttgcaacagactgtgttgcagtcaaatgatgcaggtcccacagtagccaacagggatgtcccatctagggcatcagccaagggtctctcatcaggagatccaagggctcttggagctcaatactttcagacccttcttagccttcttccaggcagctgggactacacttaggtttgatctctgtgtttgccccatgcaaacatgtccctaccccaacctacgcctacccactgtgctttccatacctggatattcactctaacgacggttagcagattgcattttcagttctcaaaatgcaaatagtctcagtgcttcccttttccaagataatagggtgcccttgcatactcttctgagaatggctgccctaattgtagaggccaaacatctttgagtcagttattattattttggatgcacgtgatatagaatctgagttaaactgtcttcctaaaaaataaagaagttgcttatctcgcataacagaaagctcagaggcaagggagactttgattaattcagtggctaagcaagttaacaaggacccagttgctattagtctctgctttgttgtaaaaaaaaaaaagggtagacttcaaattcatactaacgtgattttccagatgtctacttggagaaatcaggaccacatactttctttttcatctaaaacctttccttctggttttttgagccaataagttcacacaggcacacactcttcctctttaccagtaactgcctgggaaatgtacagacagcttaagcctgggttccagaagtgaaaaggagctatgacaattggaattggcaatggtgtcagtgctctttgagtcacatgagttgcaaggtggagacatggctatttgaataaaactggagacctgtaaaggagaagaggaaaatggatgctagatggatgatcaccagtatctttcacagtcttcaaagcacaagaaggctgattcctctctattttctaactgaattttttatgtggtgaatggaggggaagagttgctatagcactgccctccaaaacaattcccttcttatggaccatgaaagcctttccagcacctctctttgctagagaaggaaaacatccctgcacacaaacttagtctttcactgagaatcctgctacattggtctcaagagttttctatgggcctcatctacccaatagaattctaataattctaaacattcatttaacattcattcatttataaaaatgtgttggccgggcacagtggctcacgcctgtaatcccagcactttgggaggccaaggtaggtggatcacctgaggtcaggagttcgacaacagcctagccaacatggggaaaccccatctctactaaaaatacaaaattggccgggtgtggtggcacatgcctgtaatcccagctacttaggaggctgaggcaggagaatcgcttgaacccgggaggcgga

SEQ ID NO: 315462 - DNA, 4001 bp, Homo sapiens
agggtaaatttggacctaatttctgtagtccctgtcctgaccaattgaccactgatccttgaaaagaaacggaaatgttagaaaacacaaataaaataaaacatgtacaacagctaagcatagggctggaattataaaatctctataccatttcaagttaaagaacagtagagcataataaatatcaacattgtaaaattaaagcaatcttgagttctaaatgaccagattgaattactcatttttcttcagaaatatcaaattaaaactagacgtgtgatattctcctcaagttgctaagatatactttgaaaattttcacatttaaatatggacgattacttccatttgttgtgcctaagtaatgatactattgtttaaatgttactaaacttttgactgcaatccaccagcttacagcctaactaccaatatatcctaaagtgcccaaactgtgattttgaaaatcaaagtatagttcaactaattctcccataaaataggataatacacccatttccctagcttgatatgagaattaaaagagaaaccatatgaatagtacttagccccgttcctgccaccgggcactcaataaggcactttagtataacatagacgttcaaaccctggctccaccaattaaccattgtggtatattaggcaaattattgatttcttttgggctcccttttctactctgtaaagtggggataatacctgccttataaatgtagttctacagagaaaatgagataatgtaaaaaaaaaaacaaaaaaaaaaaggactgagaacatcgcctgggtcatacaaagtgctctgtaaatgttaactgctattaacagttaagtagccctggtgggcttgagaggtgtggtttaagaaaagccgatctccaaagagggcggggccagagaaacggccaatttcaaatttacacccagattaggactactgcaggaaataattatgccagattgctctcctggaggatttcaacgttttcccgttgtctaatggctcttagcatgtgaggagtcgtgagcccctctgaaaaattgatgaaaggggtgtgctgtctcagaaaagtgcacagcctttgtacacaattccaaggggtcgacagagaggtctgagaaccatccaccaactcttcccccaagaatttacagctcccagaaaatgcactcctggtctaagccatgaagacgggcctcgacccctgggccctgtccccgatttagaggactgactgctgccaagcctcggagctgtaaccaaaacaaaagcagctcgcgtccggcgccccaaagaggtaggtatcttcaggccacagaagcacccacacagtcctgtgctctactgggcagcgaccaaactcgatcctaggacccgtgtgcaagaacaaggagtacagaactgcgggctctggatcatcccttagattttatcacggccactggccacctccgaggaagggttcaaagccagactaggcagcggtctctgagggaaggttttcctgatggttccaggaaccaagaagagagggagatgtgtgaagcgaaagagggagatcccaaacatttcgcttaggcacccatgactcaaagtaaatggtcaagaaaggtcatcgcagcccgaaatccaccgcctcctcagcatcgggagcgcgggagccagggcgccgggccgcgcgaaggcttctgggggctgtagtcccccgctcggccctcaccgcgacgccggagagctgggaacggcaggtgaactacaactcccagagggtagcccgcctccgcgacgaccacagatccgcatcaaaagaactggtccagaactgcacatctaaacctaggttttctgctctccactatttaattcagctccgtgaagtaaaccttaggactcggggtagggatcgccttaccttctccgggaggcaaagccgcgtccacgcgcgccaccgccatatttgctgcttgctaataataccaggcaaccgtcctcccgcggctctgtggagcttgtaatctgaaggagggagccggaaactataactcccaggatgcacggctcccagacggcccaattggctgcttacgcctaatgatgtgaagctggagttagaatctgagggtagtgagctcagggaccctggcccactcgcttatttgacagatgagtcaactgcgttattagatgatcatttcacttccttgtccaggcgtttgcgaaatttgacacttttaccatcgggatgattgtaaggaagctacttaatgcagactgcattttacaactcattgctggaagtctctgtgggggctgctccattcttttgataattgtgaataagttgaaagttttcaactccgctataggaatgaccgatcttgttgagatcataaaagtggatacattttatttgaaattttagttaagtaaaagtaaagtatgccgaaatagaaacttttatacagtatttttaagtgattgtttgattgttcttgaatatttgacaaatcttttgacttacgggtataagtatgaaccaagaacttttccagggagtattcaaaataactttaaaatataatctccaggccgggcgcagtggttcacgtctgtaatcccagcactttgggaggtcaacgcaggctgatcacctgaggtcgggaattcgagacccgcctggccaacatggagaaaccccgtctgtagtaaaaatacaaaaaaattagcctggcgtggcggcgcatgcctgtaatcccaggtactcgggaggctgaggcaggagaatcgcttgaacccgggaggcagaggttgcagtgagccgatatcatgccactgcactccagcctgggcaacaagagcgaaactatgtctcaaaaatatatatattttatatagatattgcatatattataattatatataaattatatattatatatgttatatatttagatattatatattatatgttatatatttagatattatatattatatatgttatatatttagatattatatattatatatgttatatatttagatatattatatatgtcatatatttatatattatatattatatatgttatatatttagatattatatattatatatgtcatatatttagatattatatattatatatgttatatatttagatattatatattatatatgttatatatttagatatatatgttatatgttatatatttatatattatatatgttatacatttatatattatatatgttatatatttatatattatatattatatatgttatatatttatatattatatattatatatgttatatatttatatattatatattatatatgttatatatttatatattatatattatatatgttatatatttatatattatatatgttatatgttatatattatatatgttatatatttatatattatatgtgttatatatgttatatattatatattatatatgttatatatattatatattatatattatatatgttatatattatatattatatatgttatagatttatatattatatattatatatgttatatatttatatattatatattatatatgttatatatttatatataaatatagattatgtatataaatatatttttatatagtctccaaattcaagaaatacattgcctagttggaagaaagcaggctcacacttttttctttttttttttttagagacaatttttttttgcccaggctggccttgaactcctgagctcaagtgatccttctgcctcagcccggcaaagtgctgggattacaagcgtgagcaacggcgccgagccttcttttgatgcaactattatatgctaaacggtgtgattgtgactgagctcactaatatttcagggaattgagaaagaaatagaatctgaaatcttcagtgaagacttgatggaggaagtaaatgtacccatcttttgatgggta

SEQ ID NO: 315463 - DNA, 4001 bp, Homo sapiens
tattcctttaaaacccttgttttcctttacctccctaaatacacatatagtttaccatggcacgcatattccattgcaatgccttactcccgaataaacatcatcttcttttagaaagccgctctctgtatgttatttaggttgacagggtcaactctaaggaagtataaagaaaaagggaaaataatagtacacattgatgcagaggagtgtgttgctagaaggttggctagacgccagacagagtgctgtctaaggtgacattactctgattcattcaccagagtccaggttctggtcctcatgctcacaagctcactcaatcccagcagtgtgccagaggtggttatttaagattcacagtgactgatgtataaaacagactctcggtttttactttgcaatgtgaaatacagctgtggagaaaaaaagtaatagcttgtcttttttaatgtttactatgtgtcaagtacagttctaagaaattctacacatattatcgtacaattctcaaaacgaccctatgaggtaggtaccattattattttatttatgtatttatgtattgagatggagtctggctctgtcacccaggctggagtgcagtgctgcgatctcagctcaccgcaaactccacctccctggttcaagcgattctcgtgcctcagcctcccgagtagctgcgattacaggcgcacaccacctcgcccggctaatttttgtatttttagtagacgggtttccccatgttggccagacttgtctcgaactcctgacctcaggtgatctacccacctccgcctcccaaagtgctgggatcacaggcgtcagccaccgcgcacagcctattattattatttttgagacaaagtcttgctatccattattattactgtcattattttacagatgagaaagcagcgtatttactctgaatccgttcctctcacccaattcatgtagatgatttccaagtcctgttacttggtgtccagtgattaagccttttgaattcctcccctcccttcattcctactgtccctgctgtccctctgtagttccagtcctcactgtgtctcacctctaccattactgtaccgtcatactttgtcttcccttctgtaacccattttctacactatcgcttgtatttctaaaacacagcttttaatgtgtcactcttgcttaaaacctctaatggctcatcactgctatcaaataagagctcagattcctcggtctggtgtaaaggtcccttgtcagagggtctgtagcttattgcagcccagctacagtcaccctctctctctccctagcctccttagccttctcctctcaaagattttcatcagtacgcacccttagcaactcatgatagactggacacactgagcagcacacatgtatgcgactgtctttacctattatccgacaaatatttatgtgcacctactatgtgtcatgcatgtgctaagcactttacttgtattatcctgtttaataataactccatgaggtcacattatcacctttctttctggagatgaggaagccgaagtgcagagggcccagcgtgccaagcgtcgcacccagctgagcgcagggcaggtgtctcactggagcggggagccccagcaccttcccagctgactcgctgctgctctgacttggccgggtctaagctgtgctcctgctgcctggctggcttccgcccggtcagactgacagggtcttgcaggcaggaaccgtgcacacagtgtctagctccgagcctgagaatactcgtggcttcaaaagtttgctgagctaccgcagggaggacgaaggctataacactggtccagcctgagagaagcccaagtggggttcactgccctctgagccacagatttaagggggagggtgtggaaactgccggctgctgaggtccaaactcaccgaaggtactgaccgccgcggctcctctcttcacagcgtctgccggaggcctccgtttactccggttaccgagacaacgccacccctcttccagggaggcggaaccagggcgggccgtggggcgcatgcgcggccggcgtccagctctccgggaacccggtacctatccgccctttggtcgggccttctccgcctcatgacactggttcaaagccaaacagaaaagcccgacgagtttattatcccctaaaggacgtcatgtagataattaaatgacatgaataccgtcgaagatacctgcctgatattccaaaatggcccaacggagccctgatcgcggcgttcctatgttgaggttttaacttcgattttaagaggggtcctgggagatagtaggcagcttgccggcaacatcaacaacaaagatacatcgtgggatttttgttatttttaaaactatattatctctgttggcttttaagagtaaatcaggttttatgttgtgggtttcttggtcgcagcgctctgggcacaaaagtataggcctcccttgacagatttctaggtttagcagtttgttcaacctctctgtagtactgtggtcatattgttttttaaagtacctagcctaacgttattagttaccaaatacttgttttaaaatggtcattccaatatgtgacaaaggactttgtatacagaatgtataaagaactcttataattcaataagaaaaaaccacccaatttcttaaatgggcaaaggatttgaatacttcaccaaatcagatatatgtatggccaataagcacatggatagatgcttaaaagtagtcataagggaaatagaaaccacaatacacataactccacatccacgtgaaggggtaaaacttcaaagattgctaacaccaaatgcagaaggatatggagcaactggaactcgcatacactgctgttgggaatgtaaaatggcataaccactttggaaaactatttgagaggtttcttcaaaagttaaacatacacaaagtcattccacatccaagatagtctagagacttgggcaaagtggttgcctaggacttagtgagatgcactggaaagagacacaaggaatcttagaaatgatagaaatgctgtgtcttcattgtggtggtaatttcatgggtatatacaactgccaaaagccaataaactgttctctttaaatggatgtcatttattgtatataaattatttgtcaataaaattggcaagaaaaaattgctataatacaatttgtgtttattagtttccacaatgttacacaaataccatgcatttatttgcaatactgaaatgtcctctttaatcaagattttccagggcttaaaaaaatgattatccttgctattacttattaaatggtatatctaggtgccagaaaagatagaaaacatagggtaaacttatttttaaatagcatgttatttatattttcaaatcatatgcccagcatgttttctttcaatctctagacatcttttcaggtgaaatacctctaaatttcaagcactgtgtgcaattgttaatctgagaaagatacaataaattcactatacaatgtcttaaaaattggaaacatgggggaaatagtgtatttatttatttatataccaaaaaaaattggcagtgatcattactgagtgttgtgagccaagctctgatctcagcccatttacatacacttgcctcacttaatcctcacaagcctctagggaagacattatgtctgactttcaaatgggaaagattagattaatttgtccaaagtacacagctcaagtggcagaaatggcatttgaggcaagatttctggtttcagtacttgcatccttagctactgtactgtattagttcccgtaaattaggagaaatccagtaactgcaagaaagagcttcaagtcttggctttacctcttacaagcactctgtcattagacaactttcttcacctctagggctcagcatcctcatctgtaaaggtgctgggagaggaggaagcatttacatacctctaac

SEQ ID NO: 315464 - DNA, 4001 bp, Homo sapiens
cttaattgttccctggggccatacctttgggctcttacaataaccaagacttaagaagttaaagtgaatttgataaaattcaagatggaattctgtctgcataaatatgttagagaaataattctaagtgtgctctgaagaattatgtctcataagtgtaatcagaaacgatggagtattccatgaatacatactagagaatagctgggtaacatgaactctctttcaaaaggactttaaattgccaacgtatcagacagtcatggatccagaagattaaacattccacagaaattctgaaaagtacgataaagtctaggttttaataaattttattttttccactttttttttttttttaagtgcacagctctcatttgccaaatattgtgttaggctacaggtttgcaacggcagagaagacagttatgattcctatctagtacttaccattacacgtttatactttaagtaaatggtatgtgttttacactccctcacaaatcagtaccaattatgattaatggttctaacctagttgtggtaaatataccaaatataacctagttgtggtaaatatgaggtaactataccaaatatggttaatggttctaacctagttgtggtagatattaaatatttgtgccccgtaatgcgttaagtcttactttctatgtaaaaagtcttgtatctttaaatatttggatttcaaaaacaataagcatgtaattctttatagcataaaatgctcaatcatttgtgctaatgtgaaaggcctatactttccaatgttttcgtaatttcaagaagtctgtttgtgttactgcagaggcaaatttccacccagtagaggatgctcgagtttacatacccgaagaacaaaagtgttttcaatagaagaaaacattttcaacaaatgaagaaattaaaaagtgcaggaattagccaacaaaagagaaaaagcatatcgtttgctagatcaaaagaaaactcatcataagttttcaagtttaaatgtttaccggattagtttccagtttttttcgtcttgatacttagcagggaatggtctccagagcgaaaccagagacgcatcaaatcctggcactttccgtttgttcaaccccggagatgccttcaaatcagtttttcaacaagtggtggtggggaaatagtttctgggcttgcacccgattttccctgtggtgccaggaagtcatgcctttactgtaaaacacgaaaaacaaatggaaggaaaaaatgggggacggaaggagggtgactgaaaagatgaacaagaacgtcaacaactgccaccacgcaggtgtttctaaaatcactttataggtaactacaaacccgatcccaacgtttaccctaacacttcccctcccaggtcctcctcggtggtccgcccgcttggcacctcctccagctccccaggcccgggggttcgggcgggggcgggggagaggcggggcccgggacgttcccggcgtctgggctctctcctccggcgccaagcccagcacgccggcgcccagccgtcccgaccccgctagctgggcaaggccgagtcccaggtgccagctgtgggcccgggaactcgacagccgacttggcggcagtctcaagggaggcggcggcaggcgcctggcggaggcggccgctgtcaagcttcccgtctcctccctcttcctccctccgacaactgtgccccagccccgcccccggttccagcttctggacggaaggccccgggcccagagcccgcaccaacggtcgggcccaccctcggcctccctagctccttggtaccgtaggatcgaggccgccgttagggaaagtggacgaggcccggccggaaaggaaaagaaaaggaagaaagaggagcaagggaataagggaggaggaggatccgtcgctgccgccgtcgccgccgttgcccgatcgagccccgcggcggccgccgtgtcccccgccgcgccccgtccgcctgcaccgcctatggcagagcccgtaggcggtccccagcaaccgccgagcagcattgaccaacagacggccggtttatcaaacagactgtcgatttcaccaatagtagtggaaaggcgggcatgaacatgattggcagcttgcgtcttccaataaaaactgggggcgtgggtgggcggagccggaagtagagcccagccgagaggcccctgtccggctagggaggagggaagggggagggaactagagaggaggaggaggttagcctaggcatctacggcggcggcggcggcgcaggggctggtacgcgctgggcggcgagagcctcatggcggaggaagagagcgaccaagaggccgaacgcctcggagaagagcttgtggccattgtggagtccccgctgggccctgtggggcttagagctgcgggcgacggcagaggcggcgctggcagcggcaactgcggcggcggcgtcggaatcagcagtcgggattactgccgacgcttctgtcaggtgaggcgtccgttggccgccccgacttgtcacccgggtcctgggcctctctgcgtctcctggtcttctcgtccatgaatctggtctatgtccagtgcccgctcctccccaacaaggagggtgaggctgaagctccctcctccacttatccggcttggggtggggggcggggagcaaggcgagggtgacccacgggcttagggttgctgagaaagtgagtttgtcggggatggaggggctggaaagaaggaaggtcggctgtccggaaagctctgtcctgacatgccttccctaccccaaacagaccttcctgcccgagagtcccgcctttcttatgtttcctaccctggtctttctcacctcatttggcacctctggtaacattttctgccttcccctctccgccgattgccccccgtgttctcccctttttttccgggatgggagacatgccatctttcctgtcactgccactgttccccctcttctagggtctcctgtcatcccctcacaagatcccgctgggccggttctccagttggcgtagacgctgacccacggtgatttagttacttttttcggacagagagtgcgttaaggcaatgtgattgtctttttttttaacctccttcggttgacacacgcactcttttctaattaactgctcataatgaaagtaattttccttaaactcttgctccggttaacatcaccaacccccctcatccttcaatatataatgtattttatttagcctgtaaaatacagtgtctgaacggtgacattaaattatttactcagtcgaccgtcacaggggtttgatgttgttcaaagtgtttgtaatcaaatataacaaatatacccctacttttttaggggtaaagtttgtgtactctgcattctcatctacctgcatttgtaatttaaacggtttgttcccattcacaacaatctttttttgcaagctattttggggaaaaaaattaactgctccttttccatcccatcccttttaaaatgcgtccattaatttgggtgtatagggttcagattctggctccaccatctcctggcagaaattattaccttggacaagttactctgtgtctcagtttccccttctgtcaaagaggagtaatagttaaataaatatgtgaagggtttgaatcaggtagctattaatttcgttctgataacaagtaggaaataaagttaatgagaaatggacatcatgtttgctgacatttctttcaatgcttgtaagggattttttcaatgcttgtaaggaatttctttcaatgcttgtaagggaaagcttgtaagaattcccttacaagcattgaaagaaaaaggatggagttgacatttttcaggtaagtttttaatgctttaatttaaattgccttttgatttaatgttttcccccagtgtcataaagaagttggtttgaagagtatgtcagtttctttggcattgctatttaatgactttc

SEQ ID NO: 315465 - DNA, 4001 bp, Homo sapiens
atggggatgcgttaagcatcccacaatgcacaggacaatcccctcgacaaaagattatcctgcccaaaatgtcaacagttctatgattaagaaaccctgcgttagatcagtcttgactgcaactctaacacattgctcattgcctcctccttgctcaaacgggctccagtctcctggactccttcctcaaaatctctactgttgcttcttcctaccatgcttctcctgcggctcactcactttcttctgatcttcagtcacttaaagaagctttcctttcaacctgtataaagtactaacatcctctcccatccttgtcttctggatttatttttttccatagcatctcctggccgactatatagtttcttacatgtttactgtctatttcctcccaacaaaatgcaagcattgttttttgtccccagtacaaagaacaataactggcaagtaggtgctcaattataatacatttttaatgaacgaatgaaataagttggacatgccctccacgtggtcccataccaacatattttagcacttatcttgtcatctctttactaacaacactcccaaaagctccttgaagaaaggtcagggtcatgtcgctgaaccttcaatagctaacatagcaggcattcattaatacttaatttaaaatacgaagaattcctgtgttgagtaaatggtaccccaataacatccactgacaatttcaccatattttgaatgctttaaggactacatgtacaatatatgactgatatttagctattatttatttttgagacagggtctcgctctgtcacccaggttggggtgcagtgagtgtggcgcgatctcggctaactataacctctgcctccagagttcaagcgattctcctgcctcagcctccgagtagctgggattacaggcgtccgccaccatgccaggctaattttttgtatttttagtggagacggggcttctttatgttggccgggctggtctcgaactcctggcctcttgtgatctgcccgcctcagcatcccgaagtgctgagattacaggcgtgagccaccgcgcccggccaagctatattttaaacaaagttaaatttgctcaccaggatctgcagatgtgtacatttcagctactaaatggcaataccccaattaaatgtcaactgatcaaaaataggacttaaaaatggaaaaaggcaagtgacaatgcatttagtctgattcctgtttaacagagcatgactatttctctcgtaaatgtgtgttgctaccatgccaatagtaataacagctaaagtttagtaagagctctttagtaagagccccatgcactgttcaccccgcccccacagccccaagaggtaggcatctccactagatccacttccattggaaactgaaggggaaaaggctaaggagcttgcttacagtcagggtaaatggcggagtaaaaccctggcaatctggcgtccagaacccccaaccttaaattgcgcgcgacatcgcctcttctaaggccgagccggcaacgagggaaatggaggcaagagacggtcccggcgtgtttgagaggaaagtccgctggaaggcggccaggcacagtggattatctatttttaacttttcatactataatgttaaacaaaactaaattattttaatttacttaatttaaggaaccaaactaccggctcacccaactcagaagtggccgcagaagacattcaagcgctcccgggggcccggccagcgggcggggaggagccgcctccattggccggccccgcggcatcacgggagctcgcggtgcgcccgggtggcgggctgctttccacgcacctgcacctgcgcagccctccaaggcgctcttttggaggagggacttctctttcggtaaccagctcccttgcggatagtctatgttctccatataaacccagcacttcccttaattgagatacgtgggacttcactccgtccccagcccggaaccacaagtgagggcactgcgtttcctgattgacctctttggcgattacttccgcccaggggcctggaatactggaggcccttcgacggagaacaacaagaaaggcacttccggtgtctgttgccaggcgcgggcccagtgggccgtaggggcgacattgttgccgttgtctttcccccccagtcccggggatggagatgtcgggactcagcttttcagagatggagggctgccgtaacctacttggcctactggacaacgacgagatcatggccctatgcgacactgtcaccaaccgcctggtgcagcctcaggaccgccaaggtaagggcggacccttcacctagaaggctgccgccccttccccggcctcacgcctaccccgcttaggcagaatcctcgggaatgttggccgcagccgcagatccacagctctggaaccactacgccgacttgggctgccgggtcaaggcggggaggtggtggcggtgataatggcacggcttccaggttttatccattgaatattatgggcagcgcttgttgattcaaggattcggaataagtcatttaaatttttaaaaattttaaaaaattttctggggagccagaatgttttgcattttcagtttcgatcagctgaagagtcagctgctgctcgggcttttttcttcaagtttgagtgggaggaggatggcaaacattttgtatgtctctggtaaaaagcaactactgtaattaaatggcaggcaccttgaatccatgtctccttttggaggcaaaatttttctgagatgattttcgtactaggaatacacacaagcgagctaaatacatataccggtggatttttaaggggtattagtgctaagtctgattgtgactagtccatataaaaatgtaaagcgtttgttcattttgtgtgtcgggtagctagttttattttaaatttgctgaattttacttcaaaacgtgaaaaattccagattcccatattagtatatgattatctttaaaagattctgcccttataaaactgggtttttctgcttaagtcggatttcatttttggcattgaagaaagtcatttgtcactccgaaccatggacactaaaagaggaagttccaaagaattaagaccgaaaatagctttagacttatatggttcttcagcgtttattttacatggctttcaccttcttataatcatggtgagtgtgaatttaaaattataatggataaaatgctgcatttaattatagggtatctaaaagcaaataagaaaaaaattcccagttcaaaaacgtttaaatgacttgaagaaacattcctggggcagggggtggggaatcacccttaagcatatgaaagtatactcagcatctttggaaactaatgaaatgaaaaccagaaacagaagttgtcttttctgtgtaccagattggaaaaaatatatatatatatataaactataaacttcaagtgttcatgatcaggtgaagcaactcgttgacaactagtgaaggagtttaagttaaaactgccactttgaaaaaacaaatttgacatctcctaaaatggcagattagacacatactcgagacctagtcttctcaaacttgaatatgcttttgaatctctcagggatcttgttaaaatgcaggttctgactcattagttttaggggaggcccagaaattctgcttctaacaagctccaggttgatgctcatactgcttgcccctttttgagcactgggagatgtgtatgagaatgttcaaagtaacagcgtttgtaattggacgcagaatagaagtctgtaaacagaagaatagttggataccttgtgtgcagtcatataactaattatgatatagcagtgaaaatgagttagctatgtatatcaaattaatccagaaaatattgaatgaaaagctgattacagaaaactatatactgtatatggatggattgaatttatagcacaatttaaaacataccaaact

SEQ ID NO: 315466 - DNA, 4001 bp, Homo sapiens
ggatataccaaaccaagggaatagccaagaggctagaggctgggcagcaaaagggtgggaagagaccaggctggaaaggcagacagggccagatcacataagctctgatacagtaagcagtttgggatcattttttaaaaatcctatgggaagcataaaggatcagtggggggcggagggggggaagttagggacttcttacggggacagtggtatgcacaagataaatactaaggaaggcctataagtgagtgctttcaattctcactcctctccgaactaagagagatctttgaagcaggaaaagatagggctccatgttttggaggcagatggacctagcctcccctttccagagaaaactgcctcctgtaaatcctcaaagaggagggtcttgtttatcagcacagcctcattatacccaaaggctcaaaaattatttgctaaatgaagtaaattagagaaagactcgaaattaaaaacaagagtggtgagggcagaggacttttgcttatggcacacattaagtagtaatcagcggaaatataatagtactcattaaagagtgagtcttatggctttacgacccagaggaggagaggttctagaagcagacagcgccaccagggaaaaggctcagaattttaggctgagctagtctcctaactggatgtgtaactacaggtaggccacctccttctctgggcttcagattgcttgaattaactgacggagctggagtattcaccaaagaatttctgggggacttccaactctctctgtagttttataaccatccatcccccttctctggcgcagagaaggtgcttcatgagtatttgccgtatcaatgaagcccaacatctcattttacaacactggataccagggcctggaggggttaggtgggagctcagggccaaggagccagtttgtggcagtgtgtggggaggccctccgacctgtggctcgggtacttctgagctcttgggtagagtaacatcaaggaagcagtaggtggtcggagctcaactttggggtgggaggtaggcagggttctccctgcaatccactgggcactagattggataaggctcttctggggtcacaatgcccaggctcaaaccccagctccacgatttgctggctgagtggctttagccatgtctcctgtgtctaactttactcttcagtaaaatgtgaccaacaacagagcctgacttacaaaggtcgcagcgagatctgtgagacaagccaggcaagtttccttgaacagtgcctgacaggtagcagggggctcaaaaacattcccgttagtggaactcctagcactccagcacagcacacgctaccccgagtggcaacttttcgggacgcgccttttaaaggcgcgtgcaaaatgtaaacacgtggggtatggcaggagcggtagtgataattaaccaccatacattcccagtttcgagccacacgcaacgtgctcggcacttcccgtgccccaaccggacctagtttacgacttcctacgcacaggcccctctgaggtcagggttcgggcttcactgtgaccttggaccagccccgttccccccagagcttcggttttctcatccgcaaaacaggagtagcgaccccccagccggcccgcctccgagtgtcccagggtgggcacctgggccgcgcctcaggtggcccgcgcccggcgtggtcgcggggcgccggggcccgcgtgtctcccgcaggccctcgtaggccggtctccgtggcagcccgccctccctaccttcctgccggcaataggacatggctgcagcccgtccctgagaccttgcagaagcggcggtggcggcagctgcacctttacgccgtgacctccctctcctctggcagggcgggctcctccgaagcccgcgcggacccgccccctcccaggcctgcccgccgcgcgcctgcctcggcgccctcgcaaccgcggccaggccaacctcagccggaaactacatttcccagcaggtcgcgcgctcctcgacagctctccaggcagtagaaactacatttccccgaaagctttgcagtgcgcaggcgcatcaatgaggtactgcaatgtcccggaccgtatagtttccaggacgtctcgccgcgcgcatgcgcagaaacactgggcacagggggaggtaactgcagtaagtcccgcttggccctggagtccacgcggattttcgaagctggggctggcaagaggccgctggacaccacgctccagtcgtcagcccacttcctagctgaacagcgcgaggcggcggcagcgagccgggtcccaccatggccgcgaatgtgagtatccccgggccagccgggccacacccaggcttccccgtcgccctggggcttttccccggggtcctctaggtccatttcgccgcctggagctcctccgtgcggctaggcccgcatctccctctgctcgccgtgtctgtgccttcgccagctcatccctctgctcatctcgcggcctgtccaggcttcttttgtccgtgttccttggctcgcctcgtcctcggcgttcgtgcggaggcggactcggaggtgttgctcccgtactgggatctgcttgtacgcctctccgcggcccctccttgcattcccagttccctcctgtaccttggggccctgaaacttgcgcattatgagagctggacgcgacctcagagagggcgccagtcccttgggagggaggaaggcgatccagcccaagtggagctgtccagcaatggacagacagggctgtccaggcgggcagagagctctccgccctagggagtctctgtaaaccgagtctgtgatgctccaaaaagcttaggctgggctgggagcgaaggagttgggggagagggagcatttctctactgtcggggcccctcctccccctagcaaggatttggttggaggaggcctggctgagggctgttccctcaaggcctcttctccctgcaactagcctttctcgggaaactatttaagcccaacattcattcaacaagcagcgcctcctaccagggcgctgggtgtgggagaagctggtgactcacctctcccctcctctgtgaaagtgcttctagggcccgcttaggagcccagccagccccagacacaccctccctcctgctttggtagagtgtcctagcagctctccccttgcctgtcacaccctatttccagacaccgcctctgtccccaagcgtcctctctgcctcccacaccccttgagaggccagggtgtgcatcacccacagccctagtacactttgtctcgggttagtatcatccacactcccaggacatttcgggcccacaggagggttagaagccttgaatgttgtacctagaaaagcctcagaggtattcggagagactcaggctcggccaggcgagagggcagtcaggagaccagcctgtctgtagtatgtggactctttgtctgctcccatcactaccaccaccatattttacagatggggaacttccctagcaggggaaggcacttgcccaagctctcgtggccggcttggcatgctgtgacacggaaatatgctgaaaagggcaggctttggagttagggagacctgggggcaatccagattcttccacccagtagctgtgtggctttcatctctccaggtttatgtagcctcatggatcagttactgtgatatttaagggagactgcttagcacagtgcctgatgtgtggtaggtacttaatacttgaaaacaagcctgtccttgcagggtagcacaaatggtcccagtggatagagatcatcttgggtacattgagacctgacccctcaccaaggaatatacatgcatttgagtattctctgctgccaagcattttttgattcatccagtagctgagtacacatttacagcagccactaggctgggtgaggaagaagatagcgggatggagcagggaggcaacaaaattctcaatcagta

SEQ ID NO: 315467 - DNA, 4001 bp, Homo sapiens
gtttccaatcaacttgaaagaaggcacccccaaaggcactcccctgaacctctgaggactccaacttaactttccaacattccccaaaacaggagaccaaatcacaagggtgagagcacccaaacagagccaagcttatctttctaaattccaattcaggttcctccctctcggccttccaacacaagccatctcctcccccatttaatccttgccacgagtgaggtccacaaaactatacaacgcctagcaagcaccaaatgtgccaagtactctgctaggctaagaagagaggcctccacaaagcactctctctgtgcgtttccttaacactttcacagacatcatcttatcctaggcagtacctaggatacatacacacccaattttttttttaatgtggccattgaggctcaaaagagttttttacccaaggtcacacagctaatgagcacctgccagaactcctgaagtctgtctttctaagccacctccctaattcctccttaattaactaattcatctacacccagctctgtgcgtttcatttaatcctagtcccttttactgggttcattcatctctccacagttacttacaaagcacctgcaggtgtagacacaggtggaggaagaggccgagcacagcaacatgccctggaattggcttgtttcaatcccagctctcccacttactatttacatgatcttggatcagttcgttcacctctcagtgcctcacttctccttaatctacaataatgggctaaatagggctgttgaaaattaaatcagttaacttataaagggtttagtccaacgcatggcccctacactgcaataagagctgcttttattcttctgggttctggggacagtcttcaatcagacaggaaccttagcctcaaaaagcttacactctagcagtaaacgcaataaacaagtaaacaattatcaacagaagcgatcactgtgatgagtgctatgaaaataataaatgttggacgcggggtgggaggttacttcagattgggtggtcagggaaggattctctggtgatatctgaattacaacaagaattacaagaaacagcgggatttaaggagagctgaaggagagagaacagccggcgcacagaccctgagctgagccagcggcaccctccaggaaaacacggcggtcctgaggctggggacgaggtgcgggtgccacgcgagggaaatggcacgagatgcagtcccagagggatgcagtccccagaggtcgacgggcagcggccagctttggaaccagggaaggcatcatccaagcgcgctaggaacccactggagggtttcaggcaaggaaggggatcagatctgagctatggttcttcctgcgccccgcagatgtgctgtggagaacaggccggcggggaagagctgagtccccaggcaaagcccaggtgggagacaccgcgtacccagaacgagatgcgcgcacctgaggggccacgggctgggaggccgggcgcaaattcaagaaacgtaaaaactaagccgaccggagccaggacgtggccagggcgtccctcgtgtcccaggggcctcgcacctgtacagttcttcactcctccttccctgaagcccatgtcgcgaagctccaaggctgccagcctcgggctcgcgtctcggctcagcctcttcctggcctgagcccccggagtctcccaagccccacgcccctcacgcgtggaaagagccccggccctgcgctccgccccgcacctcccccccgcgcccgcggcctccacgcccgccccggcccaggcggcgccgctcacccggacaccctgcagcacccggacccgctcctcctcgtccactccgaaggacaccctgcggccctcgctgctctccgtgctccccatggcgagatgccgcagggccggcagccaccagacccgagacccggctccagagcaaccgggccaacaacgctttccaggactcgcgcggccgcggcacacgccaacaaagccacgtcctattggccgacgccagaggcttcaccaatcgggtggcgctgagtcgcggtgccttgtggggattgcagtccttccgtctggaggggtgggggcgtggcggtctgtgcctgctagagtgcgttaggctgaggccgaagatgtgtaccggcggaggccctggagtggagggctgggtgcaggacagggtcacgttctcgctttgggagctcccccttgagggagagccaagggtgatgttctgaggccaggagacgccgagacggccaaggcgctcatctggaggcgaatttctgagggttcactgctccattcattcagcaaacacgtgtagagcagcacgggctgagcgccagacgagcagggacctggccctggcattacagcgcccctcaagacagcgagtgtcctgcccttgagaggtttacagtgcaaggggaaaacaagtgaaaagccaaacacgcacgcaaggaaactgactgtaatacacggaaaactgcatggcgatgccactagtaaaatgaacagaaggaggcctcttttaatttcagtggccagagcaacctctgaggaagaagctttgaactgagccggcgggagagtaggatttatgtagaaaaaggtaggggaagaggtttcctgggagtctcaggcaggaaaagagaaagaggggtcatcccatggctggaaagtgagaagagggcagaggagtggtgaggacccaaatcatgtcgggtcttgtgaggcagggtctgagtgtgggttttattctaaacgccccgggaggacagggaatggtcctaagccgttaggaggcattgcccaaggagtgtacataccatgtgtggagtgcagtgtgccaggcattgtgtgtaggcttcttacacaggaccctatgtgtaagggagcacacagacggttgccagtcatagacactgctaccttcaaataagcccctttttgttcctctgagttgctgaatggctttgatttgcaaaagtgcgcctgaagccgagctgaggaaaactagatggctacatgaaatagccagaaaatatttggagctcctattggcaacctggaaagaaaggggtgaggaggagagaatgattgagagagagcagtaaggctctgagattgagaatagctcagggtgaagaagctagtaaacatcccagagctggtgtgacgatggaatctttaggaacaaaggtgtctgctagtttcattcaaaatacttcattggcgcaccccactccatcacctctgtcgtccatttcttccctataagcagagcctgcgtaggggattctggtgcaaggagtttcctgggggagcacctcaggagaaaggaagttagggagacaggctaagaggggtggggaccgggggccgcggggaaaactgagtaaagatgtggtcagacctggtcctgggctttcctttgtctcttttccttggaggtttatgattactaattcaatctccttactcgttattggtctgttcagattttctgtttcttcaagactcagtttggatagatggtatgtttctgggaattcgtccatttctcctaaattatccagtttcttggtgtataattgttcatagtagttgattatgatcttttgtatttctgtgatatcagttgtaatgtctcctctttcatttatacttttgtttatgtgaattaccttttttcttggttagtctagctaaggtttgttaattttgttgatctttactgttgatcttttctgttgtttttctagtttctatttctgctctcatcttttttatttccttcagtctgctgactttggggcttagtttgttcctcttctagttccttgagatataaaattaggttgtttgatgtctttcttttttcttaatgtaggtatttttcgctataaacttccctcttaaaaatgtttctattgcatcctataagttgtggtaccttgtgtttccat

SEQ ID NO: 315468 - DNA, 4001 bp, Homo sapiens
cagtgcccttggtctctctgccccatctgaccccatgagctcctccctcactactgggctttcctgctgcagccccttagacctccccacctcctcaggcaagctctcctccccagggctctatcctcctctcctctccactgccccctgagaaagtctgactcatgaaccctgtctccaggcctaacctccgcaccctggttgtctcaaagcctgtgtgccgaacaacaccaagctcacagcagggcctgccctggcacacaactgaaaagccagcacagcccagagcctggcccacagcacagaatcagatactcacggaatgaacgcatgttagtgaatggctgcctgctcgctcgtctcagagggactagccctctattttgccctgcagagccaaccaggtggcctttctaaaaccaaaaatggatgaccatttaagcctgtaccattgttcctcagcaccatgggacaaagttcacaatcttgagcttgcagacgaggctgttttcatctgggcttccgcagcaaggcgggtacttgtgtccttgaaaataattctcactgcactcatcctcactccaggagtacccatcagccagcacccatgtgtggttcacctttgcacccagcaggtatttgctgaacaggaagatgactattagagctgaaaatgttctcaagggccacagggcccaaagcaactcagagaggtggaatgaggggctcagggtggcccagtcccaggcaggggtgcggccacaacctcaactgagttccttggtcaggaaacagagcaattctctgaaaatgctacctgcaactccacacgtatgcatgccagagcccaaacccctggctgatccccagtccatgcaagccttaatcaagctggcaggtgggccaggcctggcacacaagtagggcctcagctaaaacagctgcttgacttagtacagcctctcaccagctgacaacacacccctaagttccatacccctctctaggcctccgtcttctcatctgtagaatggagctaattctgcctacaagtttaaatggccctgagttggtcaccacaaccctgtcgtttgcaaaccgagggggctgaagcagcagttccagcctctgtgactccactgttagcccagctgatttttgtgaactttcccccaaacccactgtgtctcaaaggatggtccctgggccacccacccacgaattacgggggcgtgggtggaggctcgttaaatgcagatcccgggcctgacccggacctgccgtctggatctcattttaggcggcgctagagatcccgggccagggaaacttgagaaccgcagctccaaatcgccagtgctgacggcttccgctttgggagccccaggtgttgctgtccgaactcacttggtggaaacagacatttaccagaaagcctggggtcgggcagcgggcactcctaccgctctaaccccgcgtagctgaaagaattcgctccctcaaaggagtcagtgagcttcggcagtctgcgttccacccgtttcgcttcgcgcggcggggcgattgtgtaaagcgggcccgggtctcggcgtccagcccggccccaaacctccggcccccaggcctctccgggctagcggccgggcggcgctgctgcggggtggtcggggcgcctccgcggctactcacccggggcgactcggccgagagcccgacagtcgggaccggagcgggaggagcgggtggccgcggcccggcccctgccccgcggcactttaaccggcggcgccggcgccccgcgcgctctctgcgtccggaatggggacgcagcagttccgacccggtcggccccggagccgcgaggctagctgggctccagcggaggcgcgcgaagcccgagggcgggtgcagctgatgcacctggctcactgcatgcacgtgtgcgcgggggtaggcgcgcgccgcggcggcccgtgctccgccagcgctcggacacggcccatccctccgagccccagcaggcgagggcgctgcgacctgccccagcctgggagggggccagcgggcccgccctctgttcgggtggcgggaatgggtcggcgctgcgagaggcggagccgagaaggggcggcccggcggcgccgggataaaagcgcagcgtgcgggtggcctggatcccgcgcagtggcccggcgatgtcgctcgtgctgctaagcctggccgcgctgtgcaggagcgccgtaccccgagagccggtaagcccccgccagcacctcttccctcatctcccggccctcgagcccagatcctgacgtcgtctgatccgccagtccaggctgccccgaaggcgtgcgcggactgccggctcaaggggcatgcctgcaccctcagggcagccccggacatcggcgtcaggttgcttgagtcaggggcgtgggaatcagacagacccggtctcagatgccaccctgtactgttggttctgtcatttatgctcaccaagttccaagtcccgaacggtaaaacgaagggcagtaccgaacccaccagggtctcttaaggtataacgacatggcctgcaattagcggcgaagggcctggcacgtagttattgttacttggggtctgctcacctgttggggcacaagaactgtttctccattagtaccccctccctttttggccatattgattgccatgttcactcgtgaaggcagttgcctttcttccccagtaccctgaatgatcgagggaatcttctgggtcactgaagagaaaatagctcatcccccaaataacctttgaaatgataccgctgccctcttagaatagcatatagcatcaagctccgtagtcacctgctggtggacaaaccccattcactgtttcctgatgtcttcagctcctatccttcccctctgtgtcagttcagaagccctcttggctctttgcactaaagggaagaattcatcccttttgctgtagttgctgcaaggccaacaatttgagcttggtagcatttagggttgttgcttggcctctcaccggccgtttgataagaactcagctcctggtatgatggctcatttgttaaaaaaaaaaaaaaaaagtcaagtctggccgggctcggtggctcacgcctgtaatcccagcactttgggaggctgaggcggccggattgcctgaggtcaggagtttgggaacagcctggctaacatggtgaaaccccgtctctactaaaaatacaaaaagtagccgggcatggtggcaggcgcctgtaatcccagctactccggaggctgaggcaggagaatcacttgaacccgggagccagaggttgcagtgagccgagatctgcgccactgtactccagcctgggtgacaaagtgagactctgtctcagaaaaaggaaaaaaaaatctgatgatatcccttagagttcattttttaaaagacaaataaatgattgacaattttgcccaaactcaaatcattcaaaccatcaaaaggagatcttagaaggtgtttggaaatgtggatgctcagcagcatattccagagctgctggacgtatcacattgagtcttgtcatttgagcttgctgctgcctaaagccccaatattttaggttcagtattttattccagaaccaaagcacaaattattttttcttatgaaaaaacacgagcagctaacttcaaacgatttagtaccagcctttcttgaacactaataattgcttatggtttcgtgaattgctcagtgagtccttttgtgttagaaggggaacattttaaagaacctgaggaaagtaccatggactgcattcagagctttcttttgtttatctccttagcatagctactccttaacctggggtagcccagtaaatactctaggccgtcctaaaaacctagagttaaacattagagtgtgaaggggcctcacatcggtcccaagtcatcccctgcttgcagcagggaaggatgacatccagagac

SEQ ID NO: 315469 - DNA, 4001 bp, Homo sapiens
agtcttgcaacaacccagtatagagggtatcgataatctccgtattattgagaaagggaaactgaggcacgtagttaaatgcctagtccagagtgacgcatcacagtgatggtggagctggaattcgaagccacgtgggcgtcccgggagcctccgcctagagcgagcccggggggcccaccagttaccatcgccacgcgcacgcgcaaatctccccgcgcacggcgcgttcccgcgggagcgcgccctcgcgcacgcgcctggcagggcagccgctcgccggccctggggctgctccgcggctcccacgagcgggactggacgccggcgcccttcgaggaggggctgaacctggggcgccctctctgccgggccacccagccctgccgacgcacacctgccctccgccgccggcctcccaccccttccccgcccgccttcccgcccagcagcccaaacgcccaccctgcgctccaccctgctggccgtctggggcgggggtacctgggcccgcgcggctgctgctcctccggcccgtggtttttcgcaggagttccccggccctgcccctggctgagacactgtggctcgcagcgagcccggagagtgggaacggaggggctggctttccccagcctcccggctccaatccctgctccccaaattaatcactttctccgtgctgcctccccacgcacactcacactccaaaaaaaaaaaaaaagcgagagaaagagagaggcacaaagaggaagaagggaccatccgcgaccggcatctccagccccccgggctccgctaccaggagccatggcaaccacggcccccggcgcgccctctcgcccctcggcggtctggggaggtggagctctagcccctctctgggttttcgtgctccccaaccccacaaccccacggtccatggattccccgctccaggctggcggcattttcggaaccccccccgggctgggatctagaatcctctcctgagaggaggagccacacaggggcagtggactgggggggtctgagccccacacaccaggcggtgtccaggggagcgaggggcgcggtgggagacagaggccgggactgacccccagaccagctagacctcggagccccacccgagagagggcggagatctacgggggggtctggaatcctcctcagagagcagcgagggatggggtggcggaggctggaagcgggagggccaacctaccggcggccggcgggcgtgagtgggacccggcggattcgggcgcccggtgtgctccgtcgactgaccccgagctgtccgaatccggcctcggccaccgggggcggggcgtgaaaagggggcgtctcctcccgggtgcaggctgaggggcccggaccacccccactgcggacgagggaccctgaccgcgccccgcttcctttccataacgagtggacccctcccggagcaccttcagcccttcctccacgggagacccccccagcgccggcacgagagatgccagcggacccccacccctgacacacctgcgccgcctccgaaacgcgatctgtccggcgcctcccctcgggcgccttctcccccgagccggccgggagccgggacgggggcgcgcagggtccggtaagctctgggcggatccagggagggtctcgccggccgctgcccgctggtccgcacccggggctgtccgcggaggtcccgcccgtcccctcccgccgctggctctctggccgcgggaaggctggagccgttctggctggcaccggggtctacgccctcctgccggaggctggctctcgcctctgctcccttcctgggttctgcgccgccacccctcacccacgccgcttatcttccctccctttgcacgctcccgcgggacagggagagttacaggcttcagactttatctcgttgtggaaagcaagagaccaagccaaaaactttggtcgtgcttttcaacatctccggtcaaaagaggtaggatccctgctcgtttatctgcaaaagcgacatttaaaagaaacgccccccaccccctccccgatggtttcactcggttcatgttgcacacacaggtcgccaatctgcttttctcccattgctgcgtcttagaggggtgtggtgccatgtacgtattaaaaattgtcttcttgctttccttcatttaagggcgtggtggggcttgctattgaatttacaaaatatgctacgaccatccgctgtcaaattgtgcatgcttaaatttacagatcttctactatctcacaatttttgccctaatacagagtctataatgttaccacatcgtttcgtaacgtttttcctacttatcctttattaattcactattggagaggaaagccttctgtactcatattcagtgcaaaaagccagttctgatgccttatgaatccacaaacacataaaaatattttaggattccaaaattcatatggaaaaattataatttttagcactacatttgatttatatgccactttattttttttccattatggtggtattttccaaaatttttacaggataccacttttgaaaatcctgttgaatgcaagtcctctttgttggtaagagaattattgacttctaatttttactccactaaggctgtgagattgaccttacagcctcgttttgttttcatctagctcattgaacaatgaggatatttagctcccctcagagctaccctcagagttggatgagctatcctcagagttggatgccaccaccgggagcagcaaaagcgaaggcaactcatgattctgcctcagaagcaatcgaataaaatattttgaaaatgaatgaatggacttttaaattttaatcatcgctaaccttggggcctcgattctgtcaatttgtgtgtgggcacagttcttaccaactgccttggcaaattgtgaatgcaagtgagggcaggatttgtcctaagtttaaattgtactgctggagtgatttcttttgcctgaggcatcattattcacgtggcatgttttctaaagtagaaacaaagatagaatattaaataaaattccaacagggggaaatactctgcctgtagaaaaacatttccaaggtcaaggaaccacaagagaacaacaaagcgaagttggtctcaggagtttaccatcttctgggtgaacaaacatcagctgagcaagggactcggaactccattttggccagatgaacagagtactcttaaatatatagctccttctttcttggtgatttgtttcttgacaatagaatcattatttacaaaacaaatatttattgagcagctactatttaatcaatcactggtctgggtgctgggctcagtaggaaactcaataggcatggccagtagctttttaaaaaatcaaataccctccaaatatattagacagtaccaagccacaatacccaaaacaagaagatggccagttcttaactatgagtttttaactgaaagggagataacattcttctaagcttctggcattgcatataaatgaagaaataatagccacacatagcttactagggacagtaaggaagtcagcttgtatgcaatacacgttatcccaggcaaccaaattttacgaaagaaaagagggagatagggaaagtctagggaaggaaaaaagggaggaaggaaggaaggaagggaggaaggatggaaagaaagaaggccagcaaatgataaaccaagaaaggaaatcgtactttttaaggcaatgcaaaaggaagacagatgacctaaatttctacatccaagaaacacctcatagctgtcgcttccaaggatgagttcatatttttgatacattatcaaaagcaggcaacacatctaggcttgcctggccccaggaattcacaactctacagcctgagcttccagtaaggctggaaccagaagacagtccccagccagagcggatgcttgctagagataccttctgctgctgctttggaaccc

SEQ ID NO: 315470 - DNA, 4001 bp, Homo sapiens
gacaaccagaataaaaatgtgggccaggaattaatacaaaatttcacatccttcaccactgacaaagtaagaaatgatgaagaataaatgtgtatgccagagattatggtcaaaaatctgaatcagtaatctcagtggcatcttcgttgctattcggaagacaatgtgaaattattaacatttttccacaggattaccaagaagcttgctcttaacttgctactgcatactcaaagcaaaagaattcactaaagatgaaggtactttagactcccgaccagaatttctacaaaaaggctggtcagtgaagaaatctaatacattgtgtaggccgaaagatttcagccaaatgtaaagcagactttaagtctgtatatttgtaggtcagataagtggaatttcttaagaaatggaaatgtcaaaacagagcttacttatctgttaaaaataatagagaagggatttctacctggggggatggaactacaatttcagttctttccaaagtgcataatataaaataggtacatcaagtaatttaaggtggcccttagaatagtttttaaatacattatattatagatagtcagagagttgtttcctttctattgacattcagtctgtctgagcacttcaaaagcaacgttttagttaagtcccaacacttttctaagatgtattaaattttatgagctcaagattatttctctagaatttagaaaatccacaaatatcacctgcaatgctaaaattctaataaacaaccaacacctctaatataataaccctccaaattatatacagaagatgcaatagagattattcctgaatgatacggataaaaatgtcttaataacctctcgtgggtcttttagaacccatatgcatgtaatacaagaaaaatctgcaagatctatacatggcagacttgatatactattacatatgttctgtttgcagatttttttagtttttatttttttaaaaaaacaaagtctcactatattgtccaggttggcgtgcaatgtctattcgcaggtgtgatcattgcacactatagtcttgaactcctgggctcaggcaatcctcctgcctcagactcctaaataggtgggactacagtcatgtgtcaccatgtcctgctgatgctgatctatttttttaactattaattaccatggttcgttcaaactgatttataatggctaaaaatctgcatccattttaccaatatatgttagaatatatatttatatatttccatcagactactgtttaacctcttaatatgaattcacactatataatgccgtaaattttgagagttcatatcatcttatacttttacttgtaaaatggcttattgttttgctaattcattgttttcattcttaaatataatcattttgaaaaagaatacaaagttcatccaattccttttcgacataatttgttgaatgccagtaatttctgaatcttgattaactaacctaagtatacaaaagtgaagttgttggtaatattgcagataatccaagacatatggaaaaatactagcttatctataggttactattcttgttatgttctaagtttgcataaggaactaaaagcctgggttgcaaaataattacagcagtcatgtatcagccacccacaaaacgaaaaagatagatatgaattctcatgacagattgctaaagaatatatagaaatatggtagaaaagtcacatcctcaatccataagtattctacttaaaaatcaaaatgcaaatatgaaattccattaataggcactgaatgttttaactttacctgaagatggtatttcaattgcttttgagaattttaacaggaggaacattagatatacgattagtcctcttccaagtaaaagcggctccattgctcttcaggaagaagacaacccggtaagaatgaaaatcttaatgtctcctctcacttttggtttacagctgagaccttagttaacctggaaactaaaaacacaaacagaataacatgttagttcacaaactctaaaatttcaacagaacaaattaaataccttctttttttttttttttttttggtttggcagtatgtttcctccttatgaaactgttctctcataactccgcatgaatgaaattagtttttcctctttgtatgtaaaataaaggacagcgaatatatactctattgtaaaccacagactattccaaaaaatcctaagtcagaggaagttttacttggaaggtatgatattatacacatgagtggtttttcttttttattctcaacttctattttagattcaggaggtaactttgcaggtttgttacataggtaaattgagtgccactgaatcttggtgtatacatgattccatcactcaggtaatgagcatagcacccgataggtagtttttcaatcctcactccttcttaccctcccccatctagtagtccacaattattctattattcttatctttatgtccataatattctattattcttatctttatgtccataatattctattattcttatctttatgtccgtgtgtattcagtgttggacttccacttctaaatgagaacatgtggtatttggttttctggtcctgagttaatttgcttagaataatgacctccaggtgcatccatgttgctgcaaggacacaattttgttctttatatggctgtgtagtattccatggtgtatatgactgatgagtgttaatggctaagacaataacttcatttagttaattttatttaaaaagtggttcttttttactcagttcctcatattagatatctattcccatttgagtcattattaaggatcacaaatacatcaatgatttttccggtgaaatagcttttcatcttcaaagttttcacactaatagaagatggatagttccagcaagatagaggaaagaaataataaagaacaaaagaataaaggccaccattttaactgaaatttacaaatgtgagtttggttcaagcagaagacaaaggcgtaagatgcttctcatttaaacagaatatttattcatttcaaagtttacagaaatagaataagaattaaggttttaattttttttactttctcttacaatttcaatttttttctgaaacattgtgttaatagatgtctaaacattgtttatacattgtctatcatgtattcttgcaggtaataatacaataatttgctccaaaatgtgagaattagtctttcaggtatgtaattttgttttgttttctaaaaatcaattactctatgtgttcacttagaactggtgaaaaaagttagctaacacagagatagtaaagtctttaaacttacattaaattctaagtatttccgctttattatttcactttaaattgcatcttaagatattatagacctgtatcttttgtatatatgtaccgattggtaaaatttaaagtagtaactaatggctgttgtttcacagttttagcagtcttaaggaacagcaacactgtttatgctttactttgagaacaaaattatattaatcataaaagaaaatactaccctcccacctccaaaaaagttgtgaatctttgtcctgaattagagtaatggcattattctactctggctgacctcaactgacccatcttaaaatgggaattggaaaaaatgactcatgtatgcttcagaatattttctaatgacaaataacttatacttgtaatttaacttctactggtaaatttaacatatatgttcaatgtgtcactatgttaattgacactactcttctgatgaaatgagttatcctaatcaatgaaataaaacatggaaaaatgctttcattataaaaagcaaaatactgccttaactacaaaaggtgagtcctacgtatttgtacaaagttgggagacattaaaccatgtagctattattaatatgaaaattttgaggaaaatatcaatgccctgccccttcga

SEQ ID NO: 315471 - DNA, 4001 bp, Homo sapiens
gttaaacactcattgcacatccccattgtctttttttctctcctctacacttcaagtacaatagtcactaaatttccaaaagcaccaggaagcacagaactgagatttatgtctttgaaaatatttgacaggtattaggcgattaaaactagtatgcttggcttttattgttaaaaaaaaattaactctaattgtaacatcacagtaaaggagatgaaaccattttttctccatttagtaaattctcactatataaaactaaacaacaaaaaaaaactgtaactatataaaactcaagcaaaaagaaaataaatcgttcccccacccccactccctggagtactgtaaaataagtgaagctcacaacagtggcagctaaaacactgaaaaaataaagtgccatattaaagattaagcagcattctcatgaaaagcacacataaaatccatttcacatcactgtatcacctaatatacgaagttggtagttattccaggtattgcaaatggtacttaataaaaagtcaataaatcaaaaaaatgttcagtcacccagagtaaggaaaaatgtattatgtcatctgataaattagaggtaaagtagattatgtgttgaaatgaagtgtacagcagcagagcagagatgacttctttgttatcctccccaaaataattttgctggcattggaatagtcaacacaaaggaatgaaggagttacgtccaggtctggactgagcaccctatttgtaccaatcactgtctagctaccactgctccttttgtggcagaattagacccttacaaagaagtgattctttggttgaaccagcaacaacctagactaaacatataatggggaacacaatttttaaataacttgaatgaatttaattcctggtagcaatcaatgaaaacatcaagtgttatataaacacattataggcatcgcatatgagcaccataaaacttgtacattcctttacattcacttttttccccgcttaagatgatattaagctaaatgcgggaaacaacacaattatctttacatgttaaacttctatgaagacaatatataccccatctctttctttagttggcaaaaaataatcataagggagaaaaatccattatgaaaactaaatctgggcacttcccttgggtttatttttctactggggttaatcaaaaaagcatttgtttcacatctctttactgatggggtgttcttaaagaagcaactgacccagacccaacttcatttcctaactggagcctgttatcccctccctccccattccgagactgccagtttcctgtatggatgcctacaagtagtatatcgcccaactgaagagcaacaatcgaagcagaggaaaccaacaagaaatccatcagatttccaagtttattgacactcaagggccagctagcctcctcgaaacgctcaggatcctgctgaggaaaacccgagggtgggggaatcgtgaggatagggaagcaaccagactgcctaggtgagcctaaggtgaggtgagtcagaagcaagagggaggcagagaagtggtgccgcgagggcggtcacctgtgggaccacttgatccagccccgcctccagggacagtaggcagaatcgcggccagcaggcctcgaaagacgccgagaaaacgcagagctgggccccttcagcccggcctggaactcaccatccacggttttcttcttgaagagggacgccatggttaaagactgcgcccgggcggcccggctcggcccggtccggcccaacgctggcaaaggacaggaggaaaaggacaggaccttggcgggttcggggtggcggagcggagagacagcaggaggaggtcggggtcgccaggcaggacccgcggaaggcttgtatccgcagctaccgcagccgcgtcacccggagctcaggtgaccgggaactaacacactttttggagaagtcacttctaggcggcgcctgcgcgttgtgtggcgcctgcgcactacggagtttgaagccgcggccgctttcctcacgtctgcggctgccagttcctcctgcaccgggagttggcagcggggcgagtctggagctggcggggataggagagcgtggggccacggcttctgtgcgcgggttgggtgatgattgaggacagtgatcagccttgcttagcgcttcaccccttgccccggggaaagctggatgagggatctccgggctcctagactaagtgtgggttgtcccggaaccgcctgtacccactccgagttgatttattacggtcccattgctgttagtatttttgttgttgttgttgttgttgtttgtttgtttttactcgagtaatccaggaactggcggaaacgttgagttccgtacccggtgattgttggcccctggagttcgcggtcctttcggcactgactgactcggcgacctcccccgcaccgcgcagacccctgcaggaccctagccgctcacctgccgcccccggctccagactccgacgacccagcgtgggtctccggggatccagtgtctagagttgggggggtctcgaggacgaagggaagttttttaatgctacactttttgtttaaggttcttgcctggaaacattaaaacacacacacacacacacacacacacacacacacacaaatttgtaggctggtctaaatgtctccagctctatttcttaatttcttgtaaatcatgaatcataaagtgtcatggctatacggtgatcctattagaattcctcacagccgtttatttgggctttttgtgaaaaactgcatatcatgttaaagaaaaaatgtaatgaattatttaaagaatccttgcatgtataaaatggaaaatacaacctatgcgtgcgtacctgtatatagtctctactgtttaaagcaacactgccttccacaggataaaaataatggtagcattttttttttcataaatattatctctgatatggaagaaatccagaagtggctaataatattgacactataacaataatgtcaatattattagccacttctggatttatgaatcatgtctcaaggattattatttatgataatcaggccagcctttcccatttttcccctcctgagatatccaagccctcatagccactgataatgctgctgctgctgctaaaagttagctgagagtctgttcaagaaaactttcttaagaatgacgtagtaatatgcaagatataattgttttgcttctcctcaagttattctcgatatgggaagatgaagtaaggaaacattaggaagacatgtaagtgagaagatttagtctctgcactcaagaccgggccttttctggagtgagctctatggcagtttgccctggctgtctgttgtaatgaatggcatagagctgtgcttgaacgcatgagaggcaataagctgttatgtgtgtagtaatcgtactcctccctgctgcagtcacccttgttttattactcctatacaatcccccccactgacccaattgtaacagttgggaaaatgccaaaatacttaggagcaaccatatggaagaccctccaaaagtgcacagcaggagctaaagacagggcttgttcattacaataaagacaaaatagaaatatttactatttaaactcagtactctaatagcttgttctcccatagtttgaagaaggctgatattcagctgattgcaccagtctagctagagtccattctgattagttggtggccacatttctcctgtacacattttgtattattatatcgctccttatttaaagggcatgatacacttaaatatatgttgttttctggagtatttcataacatagtttcctcctctgaaactgaaatatttgccattttttcatctttgggtacctcgggttataatttgaatgggtgcattcttctccttgttcagcttttgaagaaagatagcataacattggagagtgctgattctgga

SEQ ID NO: 315472 - DNA, 4001 bp, Homo sapiens
ctctcggcacagtgcccagactgggcaagtgctcataaatggcatcatctcaccaggccatcttgggtgggggctgcagggtgctcaaacaggacactgccattggagtctgagaagcggatcctggtagggcggtccagcctgggaatgagaggtcgggtgaggccggactgagccaaaagcagcccctcccagctctcccagtttccctcccgggccccggcagctgacccctccttgctccttcccctttctcaccgcctgtaggagatagagaagcggaggctagagcgcagcagcgagactcgggctcgtgccaccgcctgcgacctcggccctgtcagcagcgccacgaagtctgggacgggaggaagatggcctgagcactgtcaaacgccgctttggtggcccagcctcaaccacaaccccgctgttcgccagccccctacccgtgtggccgtcaccacgggcccgctcctcagcgcctggctccccgcggtcgctataactgcgatgctccgggtcccgcggatactcgaaggacaggccgctcggctgccgctccgaactgctgcgctctgcgggcgggggggtaagaacacgggcttcagctggccatgggaaaggccagtccgacgccccatccaagtggcccgggacctagtatcgtggccctgcctccctccccgcagggcggagcaagacttaccctgggggcaggtctggcagcagtgtcccggcagctggcgcggctgcccacaggccggggttgggcactctggtttgatgttcttgcagctgaccctgccagggcccctggtacggcgaccccactgaggctgctcccggaaaaggcgggaaacccaagtgagtgcaagatgccaactgatgagacccccccaggcaaggatgtcccgcagagtcagccagctctgccacttacaagctgcgtgaccctagacaagctacttcatctctctgggcctcaaggtccctgtctggaaaatggggataataatactctctatctagcaaggctgccatgagagttagatgagcagggaacgaaacggagttggcacagagcctcacacagagtgggcgatcagtaacagcacctaagaattggaggggctgattccccttcctccaccagaaaaatatccccaacatctgccgactgggctccttctcagcagctccgagtccactccgacgcccgcgcgacccggcgctccccacccgccagggcccgggccggccgcggggtgcactcaccgcctcgcaggcgcacagcacgcagcgcatcaccccgaatggctcccctaggtccgggtgccacgtctcgtccaaggcatagaccttcccgccgaaggtgcagcctgcggggacgggcttggctggaggccgctgcccagctcgcgccgtgtgccgccccgggggctgcccgcgggtcccgggtcccaggcaccgcgcccttctgcccccgcccaccctccgggccgcccgccgcgccgagccacctgcgccccgcgccccctccgggctggcgctgactcgccccgagcccgactccccgcccgcgcctcccccgggcgcccacctacctgccgctccccgaacgggcagcggctccttctcagaacggatgggcagcacggggggctctgggccggcgccgcgggccggccgggagccgagcagcagcagcccgaggagcagcagcggggccggcggggccgggaggctcggcatgacgcgaacgggacagctggggaggagggagggaggagggcgcgggagcgggcggagggagggaggcgggagtgcggagggcggagggccgggccgggggcggtgcggcgggagggggccggggccggggccggggccggggcagtgccgcgaggggctcgtcgggcggccgcagagtcggcgccgggccgggcggggcgggaggagcggccgggaggagcgcgggcgggcgggcgctgacccgggccgtacgcggctctactgccccgggcgccggctccggcccgttttatgccccgcgcccgacgccccggccgggggcctcctcctcagcaaacggggcggcggcggcagctcggcgaggggccgggctgagcccggggggtccgacccagcagcagcggcccggatcgcgggtgggggaggggagggaggggctgggaccgggcaggggaggagggaggggcgggaggggaagggggagcgggggagggggaggggagggaccagggggcgcgaagagggggaggagaggcgggcccggagccccccgctgctggcggccacagggcggctggaccaggaggtcggtgtccagcccaggaagggagcctcaggctagggaggggcagaggctaggcctgaggcctggaccgctctgtgagcgaggacccggttccgcccgaaggatgaagacttgtctttaaagatgacaacgtacaggaaaggtccatcagccgatctccccctgcctgggcccacagcgccccccaaaccctcaccaccctctctcactgcctagcctgcctccctaccttctctctgaggtcgctcctcattcttgtgttacccaggacagggacctagccagaaaccggcagcattcccccttctgtggagtgacagtatctccctctcattgtaacttatcctcaggcgcattcgacagtcccctcttgctttctcacccccttccttcacccaagggaccctctgcctctccagcccactcccagcctcctttctcttggttccctggtcatgcctgcctccctgtctcctgtctctccctcccacacacacccactatcctcccagctatcccagcaccctccttcctaatcttgggagacatctcgtctggctggacgggaaaattccaggatctaggccacacttctcagcagacatgcccatccttggggaggaggaacaggagagagcctgaggaagttctgggggacagggggatgatgggatcaaggtcaggccaggaagcccctgaggacagagactgtggggagactgggactgggaagaaagcaaaggagctagagccagggccaaaggaaaaggggggccagcagggaggtatttgcgggggaggtccagcagctgtctttcctaagacagggacacatgggcctggttattcctcttgtcacatgtggaacggtaggagatggaagacggagacagaacaagcaaaggagggccctgggcacagaggtctgtgtgtgtagccatctaagccactggaccccagcagacgagcacctaagctcaggcttaacccagtgcacgtgtgcgcacatacatgtgccccgcacctgacagtccactcaacccgtccaaaccctttccccataacaccaacccataacaggagatttctctcatgtgggcaatatccgtgttcccacttcgaaagggggaatgacaagataggactccctaggggattacagaaagaaaagcaggaaagcaagcatcctgttggatttcagcagcaggtatgatgtccagggaaaagaaatttggatagccagggagtgaaaaccccaccaatcttaaacaagacctctgtgcttcttccccagcaacacaaatgtcctgccagattcctcctggaaaaaaacttctgctcctgtccccctccaggtcccaggttgcccatgtccaggaaaagatggatccccctatccaaatcttctccgtggtgtgtgtgggtggaggagtggaccctggtccaggcaggggctccagggaagagaaggcgtcacttccgggggccttcaccagtgtctggtggctcccttctctgattgggcagaagtggcccaggcaggcgtatgacctgctgctgtggaggggctgtgccccaccgccacatgtcttcctacccatctgctccccagagggctgcctgctgtgcacttgggtcctggagcccttctccacccggt

SEQ ID NO: 315473 - DNA, 4001 bp, Homo sapiens
ggaaaaggcctttcccagctgagtgccctccctgtgtgccacctgcaggcccacaagcatagtctcagccaaagcttcagctcagggcttgggagagagaaaagccagtgtgagaggctggataggttggtctgattaactcttgctcgcccaaggtcactcacaaagctgtgatggctggagacaggccatgggagaggtacaagagcgcttgacagaaacagagagagatgctgagatgctgggtgaggtcatggccaagagcaggacaggccaggtggagagcccagcctgcgcagaggctgggaagggaggttcggagccgtcctcctaacacctgctgtctcttcccaggctctgcaggagagggagggaggtcagaaggaacaaagcccagaaggtgactagtaccttggtttgtttctcatccctcaaacctgggtagagtaggtgacaggagagaggtgtcccacggagacatggggacgcagacactccatgcagtcactcaaagatgtatgctcctttgcagacactccccgggacccaggcactcaggtgtcctctaacatcccacgctgagccctgaggggccagtagccaccaagttctgccctgtcttagtactgggtaaacatctgtctactgaatgactcggtggacagaggctgtggcagccacagacactgagtccacaccccagactgccaggagattgtctgctcaacaccaccagacagctcacagaaggggttgtgggggtgctggaaagagacaccccagccctatcccatgggcttggggaggcatccaggtctgacctgctgtgtctggacacacaaggggcaaggggcagtgtgagggtcagggggagtgggcagaggcctccccaggccctgatatcctcaagtcttgggccactcccacccccactgcccaacatccccgcccaccctggacctagttacttactccctgggactgtgtctgccaggttccaagggtggggcccaggattctcagagcccacactgggggtggggaggcggactgagtcgtcccacccagcacgcataccacatacaaggaaaggcaaacagccctgaggtcaggagacccgggcgctggctgggcccctccagtcccaagtagattgtatagccagcacgttgccaccacacctgtctccccactctctggcccgcttcagattgtgtgaaatgggttgatgggaggcttcacatgagctgaggagagactcagagcaaagactcagcaccggtggagcccagggcactcagctctgcggagtcatgactaactgcctcagtttccccagccagaccacgagtgggtgcacaggagtcccaagccctacccagtgtggatttcagggtggagcagggagtggcacccactgcacagtaggacaaccaagggaccggaccgagtggcccaagcttcccctcctatgcgcatgcgcccagcagcgctcatgtccaggggccgtggggtgcgcaggggaagggggtgaaggtaagggagatggccttcccggattggccaattgtcctctaccccccacaactgaccccggtctccaggcaccggctgtgggactcaaaacagtcaccgctctgggagtggggaggtaactccggaggaggagcaagagcctttgctcgcgggggcgtctagagcctttctgtgcctcaccagcgcccctgcccgccacccctagccccagccaggaaggagacaacaggtgtcccccgcgctgtcgaggggtcaggccgcggtggaaagcgcgaggagccaggtttggttgggggtgcgcggctcggccggcgggcactcacccgggcgcagggagcggggcgcggcgcataggagcaggagcgcggcgcccagacaggcggccgccagcacgcgccgccggcagcagcgcctccccatgctgtgccgggcgcgcggcggaggacagtccgctggatacggctgggggcggagttgcactggcccaggacccggccccggcagcgcagcgcctaccaagacgcgcggcgcggcgcagggcaggggagcacggcagctggaccccagccccaccagcccctgcgagtcgctggggactgaggaggcgggacacggtggggccgcaagcccgctcctcttttcgtgcccccaccctcacccaatggaatggggccgaagtccagggcgctagggcggagactgattggggaagcccctcgcctctgggccccgcccctagggtttgcccaggggtgccattatccacccaaggccaagaggcattgtcgcggtggcgtgccccaccccgggcggtgtccccttgcctttttgctgccttagatgccaggggcccaagggctgatctgggatgaaccaaggagcctagtagagcgttgccctgtccatggctctccgggacccccgccctcagtaagaggcctaagagtgtccctccctccccgacccaaggctaccctgcagccttgctttcctccagggtctccaggtcctgcctgaatctagctcatgcaggtggcactagcctttgcacagagaggtagggtctcagcttacatcccccggggaatggagcttgtgcctcatcgtgtcacccacaacttctctgggcaccacgtgagctctgaggacttgccagggactgtgtgtgtgtgtgtgtgtgtgtgtgtgtgtgtgtgtgttggggggtggagggggcgaggtgagagtaaagtccagcctttgaaagacacacacatccagctagccctgtgggcaggagcccacgtctaaccgcagggtcttgctgcccagaagtcaggctagcagggaacgggagggtgcagctggcactgggtgcgcggatgagtgcgttggaaacaacatttagcagtgtgagtgcatgggatagggtactacattacactgtaggttttttttggagttttttgtataaatgtaagggacacaagtgcaggtttgttacatggagatatgcagtggtgaggtctgggctttccgtgtaaccatcacctaaataatgtccattgtacccattaagtaattcctcatccctcccacctcgctcactctcctacccttccaagtctccagtgtctattattccacactcgaagctccagttgttaaactgttcttgaaaaatgtggtgactccaaacccacctggtgccgcttactgctgtgggagattaggaaattaactgcacctctctgtttcccattttcctgtacggggggataatcctaaacctcagtgctgtgaagattaaatgagatacaggaaatgtttgcaacagtgtctggcactcagtgagtgccaggtaagtatttgatattagtaattaatttgtttatggttactgcctgtttctggcaagtggctggtttctgttaaagtggtgaaataaaaatttctccctactatatttatttaagttgtggaagatctatttaaggaagaatattaagcaaataatagttctgctggttttgagatacagctttaaatggtgatgatgttctcaaaggacaggggtgggagtccagactcacagtaagctagaagcttcttatcatgacttttctggccttggggaacctctagcccacccccagactggcccaggacccagggattccaggtcatctgcattccctgccggacctaactcgcatccaaaggtgccttccaaatttccccagaccggcattccctggcctcactgccagcctggaatcctcagcgcgctttgcccttatatgctgccacctggtggccaaagttgggaataacatctcagcccttcatccggagatgtccctggaaatggggtccctggagaaaggaagagatggtcttgggtcttggggtgggagggtgcagatgcctggctagacgcccggggcctagggagcttccctgcgaagacgccctctcccagggac

SEQ ID NO: 315474 - DNA, 4001 bp, Homo sapiens
gtctcgcagcagtggcgccaagaccgccacgtcgaagacgcgcacaccctttatgactagtgtgcggtacttgcggcactcctcctcgaaacgcgccaggcgctgtggcgggcacttcttgcacacgcggtcgtccaccaaccccacgacctccttgcggtaggcggggcagagtggtgacgagcacaccaccttgttggtggctgcgccgaagatgcccagcgtggtgaggttgcgccccccgctgcccgcggggctatacaactggaagacagagaggtcgcagcggtaaagagcgctcagcatgtcccgcgctgccccctgcagggaaacggcgtcccccggatacagtttttgccatacatgccacactggctcgtagagaaagaacacctcgggattctggttgaatagctcgccgaagaacgacgagccagagcgccacgtggtgaacacgtacaccagctgccgcttgtccccgacgcccccggtgccccgagtgccattgcctggaggggccgcaacccccgccatccctgccgcggctgcaggagccgccccgacggcggcagcgggagggcggtaaggagtgcggaggtccaaacgggcatgagcacggggcggcccggccggaggcggccctgggcgcccccagctgcctccggctgcccccgctgcggcacccagcggcccatcggggttgcactgctgcagcggctccttgtgccacttgtagtccaggaggttgagcatagtgagcaccagcagcagtgcatagcccgcgcacaacaccagcgccttcctacggaacaccttcattccgagaggggacgcgggccagcggcgtcctgggcgccggggccactgcgggagcagggcacgcggcgcggctgcaggcgcagcctggagcagccgagggagcgcgcccgggggcagagctcgctgcgggctgcggctcatcacaggcacaatccgggccggcggcgcggcggaggcagccctgcagcccgggaaggggacgcagcgggctggctgctggcgccgggactcgggccgcgactccgaggcgggcgcggcggctggtccccagcgcccaaggctggctctcccatggcagcggctccgggtaggacctgcgaggggaagcggagtgagcggatgcgccccaatctccctcccagcctcctcctcctaagtaacgcccaccctcggttctgcccggttcctccgctcacctggagccgagggcgcgcccgggagcggccccggatcaccgcccggcggactgtccggctgtcactcgttcctcgatttcgctccctctcgcttccgctgggggtccccgcaccttcgaggggtctggggagtcggccgacttatccctgggcagtttccgggcagcgggcgccctgcggctcgggaagaaaaactttcacgcggcccagagccccgctccgcgctccgccgaacccggcgcctcccggctccagcgacgtctcctccgctttctcgggaccgcagcttcctgtctcgctcaggggaacgaagccggctgggggcgatggctgggggcggcttatatgggactcagctcccggcatagcggcgcagcccctctcgctttcggcctccgtgcggcgaattttcccacctctctggcagcggtggatggggcacagcgcgaccccgcagcggcggcggcggctgcttccatcaccgggaggatgcccgggcggacagcgcaggcaacccccgccgctccgcagcctccgactggaccaaaggaccccgaacacacagctctaggcaaggaaacccaggtgtgcagcactgcccgacccgacccaacccgcccccggtaccagcgcttctggccaacgaggtatttaagcaaagaaagaccccgccgcagccgccgccgccgcgcgaaagcggcgcccaggaggatgctgctacccgactccccttacgccgggcgcccgcaacgcgctcggaccagcctctgcgcggctcctgccagccggcgcccggttggtgcgcgccgccgtctgtcgccgcggctcctcccctccgccgcgcagccctcccccttcgccggccccgcccccgcccccaacgccgagccggctcccaccgtcgctgcgcctcgggggctggagacgcgacccgctttaccgcgacgcgcgggggctgcagtccacgggtccgaaggcttagctctgcgcgcaaagcgccgggatgcgaacgcgggatctggagctcgtcggtgccgagagctgccagagagttggattctgcgtgcagctgccggactcggccccatgtttttgctctcagaaagagttggtgatgaagtttgggcagaaatcccctgtcggccgtccgctccacgcttccctcggggccgacactgccaacctctccgggcactgaggacacctctgcgccctggagcggtgggaggacgcggagcgccgttctctggcttccgacaccctgcccgccctctctagtgggtctgtggctgcgccctctcgaaggaagtaataaatctttctgaccttgggggtcagaggagacgcttcagttttccggaggggtgtgcgggcgggaccgtctttccgctttactggacctctggccggggctgctcttgtttcattgtgccccacatgcggagccccgatgctctccgcatttccgctcgcggtgctgcgtccactgtgattgacgtcctctggaattggggtgatgggggaggggaacgccccgttctaatttgcagaaaaatacttgtcccgcttcttggttttgtagatgagatcaaagaacttgaccccaaaggaaacaccgttgttgaaagaaaatcatttttcagttgctttaggtttaagtacttttgtttaaggttatgaggaaaagcgtctctctctccccccaactccctccctccccaagaacactaagctgtagcctcaacttcatctgtagaatggggacagttgtaacagcctccggagactgaacggtggttgagtatcagagcgcgcacacgaaaggttagacctgagttcaggcctccaagtgccgaaaagggaatctccgtggggcctgaggctcagcaccctcggataaacagagctctcgctgatccggagttttgttgcctcctgtcccagtagagtttttagaagttactgcacaattatctttgtagcgtttcgggcagacttttcagaggaccgttctaacattaaaatattgctgtttgcgccattattcttccatgagtcttacagaatcccctgagtacaaagacttgaaaagtgacttaactcgctttccacgggtttttaactctcttacggatttagtttcaggggagaaaaatgttcaaaaaacttatttatccttgttttccagaaaaacccataatgtcacgagtacagttcagcttattttttctcctggggagggggattgggacaaggacagcagagctcaaattttatatccagctttctcaaataatatggcattgcctctggaagtgggtcgagacaggcaagaatccctgttaacagatgaaggtggtagagtttaattgagcgactccccatcttttccttttctggaatccccagcctcccttcgcctactctctcaaatgcccctgcccctttttcaccacctcttttaccacgaaaactaaaatgacattggtgcatgaaaagactgatgggagagagagggaattggggaggaaagtaaatctcaattttaatattcaacatgattccaagaaaaataatttctaatatttttcatttagtttctggctttgtgcttacccagaaaaaaactgaattgcattagtcgatgtagggaccctttttaaaaacaattgtttgcatagaaataattccgtttgcaattttgtaacactttactggtgttggcaaaatagtaaatccatttgccaggtgcccccacagtgctca

SEQ ID NO: 315475 - DNA, 4001 bp, Homo sapiens
taatatcacccagggacttcttggcagtgcaaaatctcgggtcccactccagacctcctgaatcagaatctgcacttgaacaaggtcccctgtgacctgtatacccattaaagtttgagaagttctggcttacagctcataggtggctctctttccattctgcccatgactttcctcacctggagagggacttggggtagagaaggctaagggacttcatggcgtattccatccttgtcagctggactgcgttggacctgggaaggaggcagaaacaattcatcagggtgagatgagagggttcccatctctctcattgttaggcaaggtgcaacccaacccctgttcagcaaccttcctccctattcttctatcccaactcacacatacctcccccagcccttctcctgtccggccccatgcatgccaaccaagaccaagctggagaccccacccctctccccaccgggtgctcaggctcagcctcactcagcagctgctgctcctgccccagtcccactcactccatgtttctcatcccctggctctggtcacactgagcagataacccaactcagggctgaagaagccttgcccgatttgttcctgtccatggggacagagtccactttacgctggcaggaggtgagtcacaccacctcacacttctggggaccgttccctcacctctagtccagagacctcacaggcaggcagcccagtcaaagcctcctctctcccatgggtccttgagcaatccgagccccttcctgaggcttcacagtggccaaaagaacattctgtgatgatagaggcatgccttgtacatactctccaataccattgctactagccccatgtggctattgagtatttgaaacataactagtgtgattcaggagctgaattttttttttttttgagtttcgctcttgtcacccaggctggagtgcaatggggcgatcttgctcactacaacctccgcctcctgggttcaagcaattatcctgcctcagcctcccccgtagctgggattacaggcacctgccaccacgcccagctaatttttagtttagtttcgttttgtttggatttttagtagagactgggtttcaccatgttggctaggctggtcttgaactcctgacctcaggtgatctccctgtcttggcctcccaaagtgcggggattacaggcgtgagccactgcacctggcacaggagctgtattttttactttattgaattttaactaatttaaatttaaatagccacattgccatgtggctgttggcacccatattagatcacaggtctaagcagatagccctgggctcatctgtcaccactttttctcctaaacctctgtgctccaactcttgaagggcccaaccctttgcacagatagttccctccacctgtagtgcccttctctgatccaggacgaaatttttgcagccttgaagcctcagtttcattgctttccactctttaaaaggaaagtcttcttagaccactcccaaaattattacaccttcatcctgctcttcctagccaagggtgcctctgggtctgtttctgctgtagcccctcagtccctggatgcctggccctgaggtcctcttcctattcgaagctcccggcacaggtagggcttcgcagagcaaggggcacaaggggtggacataaaacaaaagtccccttgccagctggggacaatcactctttgcttttaacaatttgggggactttccagaccaggccccacagaggcagaaagcccctttcccacttagcactgcagaagctctagtcctagctacgtgggaggctgaggcaggaggattctgcttgcctcagcctcacccacttcgtatccctagcaaaactctgccaagagctacctaacctgctctccaggagcaaagaaaaaaaaatccccaaacccaaaacaataacaaactccttacctccccctcacagcctcctggaaatactgccctgtcccgcccagccctcccttcatttatttccagcccccatgaagctcctccccagccttcagccccagctggggaaaagagcttggggtgagagctgcaagccagcctgacttccagaaaaggcctaaaaggaggggagaaggcatgtttcgaaagctttggcaaaatggatggcccatgacatgagatcaagcacagagggcacagaaagcaggcagatgtgggttgtggtcccaactccaccccatatcagcttgcttgagcttagacagatcacttgacttctgtgagcccgtttctcttctctgtgtaatgacgataatgattcttgttttatagggtagtggtgaggattagtgacaataaaagtaaaggggcacagtggctcatgcctataatcccagtgttttgggaggctgaggcgggaggattgcttgaggacaggggttggaggacagcctgggcaatagagtgagaccctgtctctgaaaaaaaaaaaaaaaaagaaaagaaaagaaaaaagaaaaaagtagcctgggtgccgtggctcacgcctgtaatcccagcactttgggaggccgaggcaggtggatcacttgaggtcaggagtttgagaccagcatggccaacatggtgaagccccgtctctactaaaaatagaaaaatgagccaggcgtggtggtgtgtgcctgtaatcccagctatctgggaggctgaggcaggagaatcgcttgagcctgggaggcagaggttgcggtgagcttagatcacaccactgcactccattctgggtgacagagtgagaccctgtctcaaaaaaaaaaaaaaaaaaaaaaaagtccgggcacggtggctcacacctctaatcccagaactttgggaggccgaggtgggcagatcacaaggtcaagagttcgagaccagcttggtcaatatggcgaaaaccccatctctactaaatatacaaaaattagccgtgcgtggtggtgggtgcctgaaatcccagctactcaggaggctgaggcaggagaatcatttgaacccgggaggcagaggttgcagtgagccgagatcacgccactgcactccagcctgggtgacagagtgagactctgtctcaaaaaaataaaaataaataaaaataaaggctttgcaaacataaacactcaatggatcgaagtgattattagtattactgataattttttatttttattttattatttttaatttttttgtctttttctcaatttgataatgtacatattaaatcatagcagagagtaagacaagctgaaatgtggagtggttaagagtgtaagatctctgacccagcagttccacttctgtgtgtgtgcgtgtggtgtatgtgtgtcatacagagcacacctgttgtcccagctgctcagaaggaggctgatgcaggaggatcacttgagcccaggaattaaaatttagcctgagtaacatagggagaccctgtctttacaaaagaaaagaaacaaaaccaaaaccaaacaaaattacatatatatgtgtatatatatacacacacacatatatatatacacatacatatccaaaagaaatgaaaaatatgtctacacaaaaacttgtatgtgaatatccataggattattcgtaatagccaaaaggtagaaacacatgaatgttcaatttataaatcgattttttaaatgtgcctatccatacatggcatattatttatcaaaaaggatccatactaccacatggaggaaccttgcaaacagtacagaaagtagacaaagccagtcacaggaatcatatacatattgtatgattccacttatatgaaatgtctagaataggcaaatctatataaagacaaagtagggccgggcgcggtggctcacgcctgtaatctcagcactttgggaggctgaggtgggcggatcacgaggtcagaagatcgagaccatcctggctaacacggtgaaacccggtctctactaaaaat

SEQ ID NO: 315476 - DNA, 4001 bp, Homo sapiens
ccagcaagaaaaatgtgccctgaaaataccactgacctactgatagtgtaggatggtaacgtactgcccccctcctgttaccaaacagacatcagtcattgctaattagttggacagctctccaggtgggcattaccatctgtaggcgctggtaggtatcagaaaggaaactgtgccaccttctaagccctgacctccatctctgctgaatcccagctcacagctgggctgtgcaacgcgcaggtgctctcaccttgaggaggaggtcctcaagactgtaagccatgatgcccttcctcacgcttcgatccgccgtgcttacgcggcagggccgggccctgggggccttggggctgggctccgacagcagctgctgggtcaccacagaggtacgcactgacacatgcctggggcagttgaagcatcagggtgagccacccactttgcccaacccttgcccaccacacaggggagccacctccccacccctcctgactgggctcatgatcagtcaaccccccatcacctgctaatcctgccctagtcttactcagaagcctgctagaagccaggcacggtggctcatgtctgtaatcccacactttggaaggctgaggtgggcagatcacttgaagtcaggagttcaagaccaccctggctaacatggtgaaacaccatctctactaaaaatacaaagattagccagtgtggtggcacatgcctgtaatcccagctccataggccgggacacaagaattgcttgaaccctgggaggcggcagaggttgcagtgagctgtgatggtgccactgcactccagcctgggcaacagagggagacctcgacttaaaaaaaaataataaaataaaaattaaaaaaagcctgctagagcagtgcatctcaaacttcgaaggacacataagtcaccagggcttctgttcaaatgcagattctgactgagtagacctgggtgaggcctgagattccaaatgtttcacaagttcccaagtgatgttgataacgctggttctcagaccatgaggagtaagtagcaaagtaataaaagacccaccccacattccccatttaccacctgtcttggcctcactctcctcacctgtaaagttggatgaagtgggggaagcctgaagtcaatgtaaggtatttttttaactgaagcactcaatttagaaccaaaggaaaggaaaggacctggattttacagtcaggcagtcccaatttagaatcttggctccctcatggatttgctgggtgattgagagcacccactatgtgcctcagttctctcacctattaatttggtataataacccccacttcccaaagttgttgtgaggcttacatgagatcaggagtaaaagcaccaagcatagtgtctactcctttttatgcatggtgtggtggtggtgtaagcagcagcattaatatcacccagggacttcttggcagtgcaaaatctcgggtcccactccagacctcctgaatcagaatctgcacttgaacaaggtcccctgtgacctgtatacccattaaagtttgagaagttctggcttacagctcataggtggctctctttccattctgcccatgactttcctcacctggagagggacttggggtagagaaggctaagggacttcatggcgtattccatccttgtcagctggactgcgttggacctgggaaggaggcagaaacaattcatcagggtgagatgagagggttcccatctctctcattgttaggcaaggtgcaacccaacccctgttcagcaaccttcctccctattcttctatcccaactcacacatacctcccccagcccttctcctgtccggccccatgcatgccaaccaagaccaagctggagaccccacccctctccccaccgggtgctcaggctcagcctcactcagcagctgctgctcctgccccagtcccactcactccatgtttctcatcccctggctctggtcacactgagcagataacccaactcagggctgaagaagccttgcccgatttgttcctgtccatggggacagagtccactttacgctggcaggaggtgagtcacaccacctcacacttctggggaccgttccctcacctctagtccagagacctcacaggcaggcagcccagtcaaagcctcctctctcccatgggtccttgagcaatccgagccccttcctgaggcttcacagtggccaaaagaacattctgtgatgatagaggcatgccttgtacatactctccaataccattgctactagccccatgtggctattgagtatttgaaacataactagtgtgattcaggagctgaattttttttttttttgagtttcgctcttgtcacccaggctggagtgcaatggggcgatcttgctcactacaacctccgcctcctgggttcaagcaattatcctgcctcagcctcccccgtagctgggattacaggcacctgccaccacgcccagctaatttttagtttagtttcgttttgtttggatttttagtagagactgggtttcaccatgttggctaggctggtcttgaactcctgacctcaggtgatctccctgtcttggcctcccaaagtgcggggattacaggcgtgagccactgcacctggcacaggagctgtattttttactttattgaattttaactaatttaaatttaaatagccacattgccatgtggctgttggcacccatattagatcacaggtctaagcagatagccctgggctcatctgtcaccactttttctcctaaacctctgtgctccaactcttgaagggcccaaccctttgcacagatagttccctccacctgtagtgcccttctctgatccaggacgaaatttttgcagccttgaagcctcagtttcattgctttccactctttaaaaggaaagtcttcttagaccactcccaaaattattacaccttcatcctgctcttcctagccaagggtgcctctgggtctgtttctgctgtagcccctcagtccctggatgcctggccctgaggtcctcttcctattcgaagctcccggcacaggtagggcttcgcagagcaaggggcacaaggggtggacataaaacaaaagtccccttgccagctggggacaatcactctttgcttttaacaatttgggggactttccagaccaggccccacagaggcagaaagcccctttcccacttagcactgcagaagctctagtcctagctacgtgggaggctgaggcaggaggattctgcttgcctcagcctcacccacttcgtatccctagcaaaactctgccaagagctacctaacctgctctccaggagcaaagaaaaaaaaatccccaaacccaaaacaataacaaactccttacctccccctcacagcctcctggaaatactgccctgtcccgcccagccctcccttcatttatttccagcccccatgaagctcctccccagccttcagccccagctggggaaaagagcttggggtgagagctgcaagccagcctgacttccagaaaaggcctaaaaggaggggagaaggcatgtttcgaaagctttggcaaaatggatggcccatgacatgagatcaagcacagagggcacagaaagcaggcagatgtgggttgtggtcccaactccaccccatatcagcttgcttgagcttagacagatcacttgacttctgtgagcccgtttctcttctctgtgtaatgacgataatgattcttgttttatagggtagtggtgaggattagtgacaataaaagtaaaggggcacagtggctcatgcctataatcccagtgttttgggaggctgaggcgggaggattgcttgaggacaggggttggaggacagcctgggcaatagagtgagaccctgtctctgaaaaaaaaaaaaaaaaagaaaagaaaagaaaaaagaaaaaagtagcctgggtgccgtggctcacgcctg

SEQ ID NO: 315477 - DNA, 4001 bp, Homo sapiens
tgctctcaccttgaggaggaggtcctcaagactgtaagccatgatgcccttcctcacgcttcgatccgccgtgcttacgcggcagggccgggccctgggggccttggggctgggctccgacagcagctgctgggtcaccacagaggtacgcactgacacatgcctggggcagttgaagcatcagggtgagccacccactttgcccaacccttgcccaccacacaggggagccacctccccacccctcctgactgggctcatgatcagtcaaccccccatcacctgctaatcctgccctagtcttactcagaagcctgctagaagccaggcacggtggctcatgtctgtaatcccacactttggaaggctgaggtgggcagatcacttgaagtcaggagttcaagaccaccctggctaacatggtgaaacaccatctctactaaaaatacaaagattagccagtgtggtggcacatgcctgtaatcccagctccataggccgggacacaagaattgcttgaaccctgggaggcggcagaggttgcagtgagctgtgatggtgccactgcactccagcctgggcaacagagggagacctcgacttaaaaaaaaataataaaataaaaattaaaaaaagcctgctagagcagtgcatctcaaacttcgaaggacacataagtcaccagggcttctgttcaaatgcagattctgactgagtagacctgggtgaggcctgagattccaaatgtttcacaagttcccaagtgatgttgataacgctggttctcagaccatgaggagtaagtagcaaagtaataaaagacccaccccacattccccatttaccacctgtcttggcctcactctcctcacctgtaaagttggatgaagtgggggaagcctgaagtcaatgtaaggtatttttttaactgaagcactcaatttagaaccaaaggaaaggaaaggacctggattttacagtcaggcagtcccaatttagaatcttggctccctcatggatttgctgggtgattgagagcacccactatgtgcctcagttctctcacctattaatttggtataataacccccacttcccaaagttgttgtgaggcttacatgagatcaggagtaaaagcaccaagcatagtgtctactcctttttatgcatggtgtggtggtggtgtaagcagcagcattaatatcacccagggacttcttggcagtgcaaaatctcgggtcccactccagacctcctgaatcagaatctgcacttgaacaaggtcccctgtgacctgtatacccattaaagtttgagaagttctggcttacagctcataggtggctctctttccattctgcccatgactttcctcacctggagagggacttggggtagagaaggctaagggacttcatggcgtattccatccttgtcagctggactgcgttggacctgggaaggaggcagaaacaattcatcagggtgagatgagagggttcccatctctctcattgttaggcaaggtgcaacccaacccctgttcagcaaccttcctccctattcttctatcccaactcacacatacctcccccagcccttctcctgtccggccccatgcatgccaaccaagaccaagctggagaccccacccctctccccaccgggtgctcaggctcagcctcactcagcagctgctgctcctgccccagtcccactcactccatgtttctcatcccctggctctggtcacactgagcagataacccaactcagggctgaagaagccttgcccgatttgttcctgtccatggggacagagtccactttacgctggcaggaggtgagtcacaccacctcacacttctggggaccgttccctcacctctagtccagagacctcacaggcaggcagcccagtcaaagcctcctctctcccatgggtccttgagcaatccgagccccttcctgaggcttcacagtggccaaaagaacattctgtgatgatagaggcatgccttgtacatactctccaataccattgctactagccccatgtggctattgagtatttgaaacataactagtgtgattcaggagctgaattttttttttttttgagtttcgctcttgtcacccaggctggagtgcaatggggcgatcttgctcactacaacctccgcctcctgggttcaagcaattatcctgcctcagcctcccccgtagctgggattacaggcacctgccaccacgcccagctaatttttagtttagtttcgttttgtttggatttttagtagagactgggtttcaccatgttggctaggctggtcttgaactcctgacctcaggtgatctccctgtcttggcctcccaaagtgcggggattacaggcgtgagccactgcacctggcacaggagctgtattttttactttattgaattttaactaatttaaatttaaatagccacattgccatgtggctgttggcacccatattagatcacaggtctaagcagatagccctgggctcatctgtcaccactttttctcctaaacctctgtgctccaactcttgaagggcccaaccctttgcacagatagttccctccacctgtagtgcccttctctgatccaggacgaaatttttgcagccttgaagcctcagtttcattgctttccactctttaaaaggaaagtcttcttagaccactcccaaaattattacaccttcatcctgctcttcctagccaagggtgcctctgggtctgtttctgctgtagcccctcagtccctggatgcctggccctgaggtcctcttcctattcgaagctcccggcacaggtagggcttcgcagagcaaggggcacaaggggtggacataaaacaaaagtccccttgccagctggggacaatcactctttgcttttaacaatttgggggactttccagaccaggccccacagaggcagaaagcccctttcccacttagcactgcagaagctctagtcctagctacgtgggaggctgaggcaggaggattctgcttgcctcagcctcacccacttcgtatccctagcaaaactctgccaagagctacctaacctgctctccaggagcaaagaaaaaaaaatccccaaacccaaaacaataacaaactccttacctccccctcacagcctcctggaaatactgccctgtcccgcccagccctcccttcatttatttccagcccccatgaagctcctccccagccttcagccccagctggggaaaagagcttggggtgagagctgcaagccagcctgacttccagaaaaggcctaaaaggaggggagaaggcatgtttcgaaagctttggcaaaatggatggcccatgacatgagatcaagcacagagggcacagaaagcaggcagatgtgggttgtggtcccaactccaccccatatcagcttgcttgagcttagacagatcacttgacttctgtgagcccgtttctcttctctgtgtaatgacgataatgattcttgttttatagggtagtggtgaggattagtgacaataaaagtaaaggggcacagtggctcatgcctataatcccagtgttttgggaggctgaggcgggaggattgcttgaggacaggggttggaggacagcctgggcaatagagtgagaccctgtctctgaaaaaaaaaaaaaaaaagaaaagaaaagaaaaaagaaaaaagtagcctgggtgccgtggctcacgcctgtaatcccagcactttgggaggccgaggcaggtggatcacttgaggtcaggagtttgagaccagcatggccaacatggtgaagccccgtctctactaaaaatagaaaaatgagccaggcgtggtggtgtgtgcctgtaatcccagctatctgggaggctgaggcaggagaatcgcttgagcctgggaggcagaggttgcggtgagcttagatcacaccactgcactccattctgggtgacagagt

SEQ ID NO: 315478 - DNA, 4001 bp, Homo sapiens
ttgctcctgagctgtgtcttccaggccaaaggaaggagctgggggaagggaccccaggtagagaggacagcatgggcaaacagcgccagtattgcttgtgaggcaggaaggcgcaggcaggagctggtggcaggagccagacctgactcctgtgtaggttataggtgaccctctaggttctaacaaatcatggccctatgaccactcacagtgagaaagggccacacaactctggcacaccacagcctgacaaaaacttttccacacctaccctggctgtactgtgggatcttggaaatccctcttggagagctggaggccaaattttgagatgacctgcttgctggggcccagagctaccttcccaggagcatggttggtggctagccagtcaggctggaacctctgtgggtggccacgtccagatagcttagccggtcctcagatcccacatgtaggtgtgggcacctttggggctgatgtggtagctgggtgtatgaatagctgtgttgatcaccacaagctcctggtgagtgtgtacctgggcaggggtgtgtccatggctgtgtcatcatcatggtggggacagtggctggtgtgttctaggtacatgtgtgtgcccgctttggagcgcagcagtctaaaactttgttccctgacacccaacagtagccctgagcttacaagggggtgctcacctagggtaaaaagtgaaagaggctatgggaccccggaatgcagggggaggctcctggggtggaaggcagtggtggggcaggtattcaggagtcccagaatgcagacaggaggaaggaacttgctggagacagcaagggagaagtagtcttcccagcacctccatgtcctcttccttggcctcaccttccaccctccctcacttggcaccaggccagttgcgataagcacagccacccagtcctccctgagtgcagaacacccatttataccttcttcctctctccttggagcttcctgagctcctgtcacatcaccatggccagcatcagaccctttggttgaaggggttgctgaggttcaggacagagtggatggccaggaatgctcagctcaggtcaagactctgtcttatcagcatcccctctccactgtcccttacctcaagtctgggaaatttgaagatgagaggcaggagccaaggtccttctcacattgggatcccagactgggctgagacagggttgtgagacgattgtgggggtaccccaagcaggaccaggccaaacccagggcctcccgagagttgcagaccatcaggtgccagcctgaggaaaggcaaggatctgcggctggcttcccaagaagagcctacttgctagcctggggcaggagaggggacaccaggacagagggggccaggggctggtccaaggttactagcaggcagggcagcaggcaggctagcgtagagtgctctgggcccagaagaatatctgggattgttggccacatcttgggggacgccgtgccgttagcatccatctgctccaatgagaacccaggctgagcccaccctgtgagttcctcctttagccggccagcccccggtttcccaatccacagtgggaattgaggtaagtgtgtgggggcggggagtgggagtgtcacagccccacacagagccttgctcctgaggtccgtctgcgctcagtcacctctggcccgtcaagccctcccaatgcccggcagctagcacgaagcccctgttctcccgtgcgcccctcgtggtggccgggaagggggcagagagccgcgcttacccctgaacgcagaggaccatgtccccgcggcagcggcgactccggagtggggactcggctggacggcggcggctggagggaaccagtgggcgcggagcgcgtgctgggtaggctcccggggcgcgcgggcgcaggacagggactgagaggcagtggcgcggaccgcctgcgagggcgaggggggcgggccagacgagcggggcggggcgagctgctgcctaatcctttgtctgccgcgttccagcccttcccggaagcagcgtcttcctagaaccgcgggctgagcggtggggcccgggcggggtgcgcgggccccgtcgccgggtctggggccctgagcagtgaaaggaaatactttgacagatttccaagaactttccaggaaaacggggcggggccccgcgagctgaccaatcgcgacgctgaaggtggagccgagcggtcggggagggccaatagcagcgcgtggacccggggctgaagctacccagaggggcaggtcggagagatcagtggggaaagaccgggtcggggaagttaaggaggggcccgggctcagcaacccgcgcccagattgccttctggcattctgcgtcgttggggaagggccctcttatctcgcggtggaactcgtggcagggcggggggcggagtcccgggcttgtcctccctgcgagcggctcctccaaggaggtctgtcggcgtgtgcaagcgccccgtgttgggacggccgctcctggaccctaggactctgtgtgtcgggtgtcggattgggtggcatggggtgagatctggagcgggacttagggcagggcggggtgcagaggacagttccagaaatgagtgggtccactgaggtcaagccggcggtcaccacagccagaaagatccagacaagaacgttttctttgaaagagttgaaggagaaagcacgccccaacttttcgaatcaggcagaccatccagtcttggctggcactggtttctggccggccctgccagtcaggggagaagagactacagatttgagaaagcaagcagagacagccccagatggcccggactctgggttggtaccacccccaccccccgccagaaaaaaaatgctgagagagagtcctgcaactcaaaacatagggagataatctgggagtagggtgatagaggttggggcgggatggcgggggcagagtagtaacactcgctcttatctacagggagtacttgctgcatttgatcctctacaactggtgttgctcccgttatgcggacagaagacagccccagggaacaaatgctaggaaatggcagggtaagagcttggtcccagctctgaatcagaagcccacgctcctaccaggaccctctccaccttttttcagttcactggattcactatggagcatcttgaaggactgtagggtctgtgaatctcctccaaacccttgggccagaagaactgtgggatttggagaggttgcagggtccactccccacccccatccccctcccagtgtgtgcccccagggtccccagaaaggagtctagctctgagatcctgggcagggatgacagacccctggccttgttgaagggcctgaacgatagcatccagggaagacagggctcagtttgctctgcccagaatggcagagggcaaaagaaacctgaaagcaaaaccctgtgaaactggggaaaaaacgttaagtttcagatttcagggcagtcacttctctgtagctttcctgaagggaagccgggcttcatgagtgcaactctgccagccccctcctgagttggccagaagccactttcttggaatgggggtaggggggatggataccttataacccactttgagggctgggatacctggatagcctgatatgcggcccctgtgtggaccactgacttgccagtaggaactgtccactgtctcattactatgaagacaaaaggactttgccgctgccaggcaacagagttacaattttgaacttgggtctcttatggggccaaatcccaagctctctaccaaaactatacttcttccccctcaccatgactattcaactgaacacttactatgtgtcaagcactctcagcaatttgcagcctcatgtcattgtcacaactaccacatattatctcctctttacaggtgagaaaactgaggcatggagaggttacaatataacttag

SEQ ID NO: 315479 - DNA, 4001 bp, Homo sapiens
caaatgttatgtattatttgaaaaaagaaaaactaagtaaatataaaactataaccattgaacctaaaatgtttaagaaataaaataaaatctggatatggcccacaccaaatgcaacatttagggttatctacaaattaggtttggttttttttttttaaaaaggaagaaacttggcaatgcccttaagtatatgagaacttatttgttaatcctgcttttgtcttaaaaattggtagttgaaaaattattttctcatttatttccataagatcatataaaatagttacataaattcttggaataaatcataacgatatgccaaaccaaattttctatcagatttccatttaaatgtacataatagttcaaatgactgtctaccaacaccatcattttgatatatttgtatcctatctctcatagcccctaggggaattacttcttagaagagttcactacatacatagtcaaaggaaggctgaaactgttaagagttaaaacctccatatatggaccagtcttccttaagaacctggcaaaaaaacactcaaaacatttttgaggaacctcaggtttcccttcatacatatctgtgatgttgatgtgattataaagtatatctctaggcctcgtaacaaaaaaaggtgtaatgaaaaaagaaaaaaagctcaagtattaagtgttataatggaaaataccaaacacacatttgggaccctagatttggtactggtttgctttctgtgcctggatctgggacatattgtctcagcaggtctcagtttcccaatctgtaagatggaaataccaaaacactctgaacacttcacagagttgttcacacctgaggagttaatatatattaagtatacaaaagtgctttggagaactataatgcctaataaggcattatagaaataatgtgtttttaaaattatccttaccaaactaaaacactggcaaaatcaatttttaatcaaattataccctgtgcataatcttaaaaggctaaatattttctagaaaaatgttgggacactgacaattaacaatcatatgaattaaaataatgcccatggcaagccattttgcttctttaaatattttatttccacagaattctacttgtgtcaaatacaacaggaaggatatcaagctagctagtcaaatcttcctgctaaaatctgtcattcctccaaaggcaatgttcttcctctaagcttctgcacatattccacgtttcttccaatatcccttcatatctaccaccaagactgaagcttgcttgggttgcaaggtaaattgtcacctcatgcttgccagatcccacacagacacatcaagtgaaaaaagatgtcaaatgacatgcacacacatgcataaatgtacacacaagtgtacacacatgcataaacacacaagtgtccttcattctttagggagaaatatatttcttacacagcaaatgatcgtcaccttaaaaggaagtgtataacacaagcaaaagaagaaaaataaatcttactcaccatctcccatagccattagatggtccagggagctctctgaaaccaagaggtcaaatagcacagcaaataagtacagctcagtgcctgcgccactgggctcggcctgcagcctgcagacacccggagcactgtgtgacccaggcctcgctgcagctctgcaccgcaatagccaacagctgctactccacttcaaaataaaagtctggggtcttgctgaaaaccctcgtttatttagcacagcctagaaggacttgattaagattactctttagctgcacatatgctgttggatacaggttatgatgtttctccttgtactggctgcctgaaatttaatctaagaaaagctctgagagccaataaatgccatcccgctgggggacttttaatgcaatcatcaaaacacaaggcatgtgttcagcaatcattttctgcttccctaaagatatccatgtaatcagtagcaatcacatgatctgatggattaactgatttgcgcctttttaaaaaggttttcatccttttgtcgttaccttttaatatttacaacagaagattgctagaagtgcataaacaggaatagcccagtttccatgattaactgctctcattatgcaggaagcatttctggctgccgtaaacaaatcacgtcaaaggcagcccatcaaaggctgctctgtgcgcggacagcagggccacacggaacaaagcttacttctggtggagacagaacctagccaatgcgcagctgcaggggcgcagagcaccctctatccaagctgacaaccatcagcacattgtcaagctctgaaggcaggccctggagctcatgatcacaaacagatacattttaaaaatcaaccaaagaaaagagctgctttgcttttcaccaaagggtatgttataaaaatatacaaaactagactggaagttatcttattgactcatagaagccaaatattaaggtaatttcaaagcctcatttccaggttttattttattgccagcctccaagaacaattcttttcctagcaactgtttcaaacagagaagccagaaaatactttactaatgattgcatggccaagactgcattaggtcctaaacacacactcgacaaataagaattatgcatagtttttttcacagtgaaagagaaaaggatttgcaattacagccaccaacactgttagtgtttacatccttggtttgtgcaggagactgtctagaaagctccataacgacaccagcgcctgccataatcgcagggggtctccaactttcagtcttttctttcctacagggctggtgttccctccttctagtcacgatctgacagattttaaatccagttttcttctaacagcagagctaattctactgcatttagggactctgcctaacttacttttacaatataacaagttgagttcaaaaaaccatcaaatactctataactcacttaatgactgttcagatgacaacttttagctataaaaaagttatatcacctttacaacaaatcctttggtttcttgtatttagtaaaatgatttttttcatcacgaaacactctaaatcaatatgctgtaagatgtatgatgtgtcattattatggtttcaggcaaagacacaccaaaaaattttgtttaccataatagtttctggtcacagaatatcaggtggaacaaatttgaattgcgtgccatttttggacagacccaaaacaatttattttgcataaatgcaccaagtgagggagagaaaaggtagtatcttcaacagctctttgtgtgcatgaactatttccacaagatttcatgccgagcctttactctgtcctaaaatgttttcctgtttctatcactttatttacagttttagttttagttttagtgtgcaataaaaatgaatcaacaaaggcctgaaaattttgtggggaaaaattgtgcagaaataaagaagaagttgaattaaactccatgatattacttcatgtacaatttcccttcaaattgttacttataaaaatttgttttcagtattcaattgatatatttttctacctgggaaaactactcaagtatcatgggctgggatgaaacacaccgtaatttttctcattaacactggtgaaaataattttttcatctaatggtctttcacttggcagcagggtatttaggaataatttaaactcattaaacaaggagtagttatatttcctccattaccaactgtaaccacattgtatatccatttatttacttgtttatgatctatctccatcactagattataggctccttaaggggagaaatttcattatcttcttcctgttgtgacatgatctaatttacattttaagaagatccctatgatttctgagtagcaaatggattcctgggggcaaacatggaacagaagtctacagaagtagtccaggcaaaagctaaaggagatttagag

SEQ ID NO: 315480 - DNA, 4001 bp, Homo sapiens
attgtcttgggctacattatctagtgaggagcatggagaaaatacgtagtgaaaacagaaaagaacccggatgagacccctgatggattctaactcttaaagaacagttaaaaacacagcaccgagtagaagtagggcttagaggcataacagaaaactagcatactgtggtatcacagaatatcagcgtgattgctcaactgtcattcactgaggtacatctgaggagtgaaatggcccaaagccaattcacaacagcccgtgtagaagatggcacaccaatcttaacttcggaaggggtgcaaacattaccaaagcgctgtctttctacaacagtctatgctgtagcataaaatcaactatcttgagtgtgaatatgtatatgcctttcttacagagtaaatttagcttgtttcttccaaagaaataatctcccaaatggtaatgatatattattaaattaccttttccccaaacgttttaaaaataataatcaagagatggtatgtaatgaagcatcgacgtgggtaactctcaaactttattgtccttgtaaaaagtctaacctttccaaaactcatctgggctttaccattaaatctgcgtcataattctagagtttgtctttcttctctttttgaataaaaggtttcaaagtacagcctattcgctggatcatgagaatatgttactaagaagaatcacttcatccatgggaagctgcagtcagcattttaaagcaacactgccaccagaagacaagaaagaaaagtaactactaacgactacggggcaagttaaatacaaaatatttacctggcctcccaacgcggctacattacaccctgcctaccaccaactcttcagaaaggctcattctttctcgcacctcatctttgtaactttttcccccccagcattagcctatctactaagacacatcaacctaaaatcgtatcctaatgtcctatctgttggtctgggtagtgtttacacaggtgaacacaaatgtcgaagtctttcactgatttttttttcaaaataagtgatcaacattgtgtcctagtaactccgcaacgtgtcacggaatcgctgaatttgtcattgtccacaagtgtagaaaaatgtggtcacaagtcagtcctcggctcgcgtacgaagaggcggtctgcccagtggggacgcgggacccccctgtttcccctatttttatttattttttactttttttgagacagagtctcactctgtcgcccaggctggagtgcagtggctcgatctcggctcactgcaacctctgcctgctagattcaagcgattctcctgcctcagcctcctgggtagctgggattacaggcgcccgccaccacgcccggctaatttttgtatttttagtagagacggggttgcaccatgttggtcaggctggtctcgaactcctgacctcgtgatccgcccgcctgtgcttcccaaagtgtgtttcccctcttaagcagtggttcggacgggagctttcccggcccggcgctcgcgtccgggattaaagggctgccgcggagggcgtgaccagcccagcctcgccgccgtcgcttacccggtagttgctcgaacccacccagccggtgagcgcgtcgactgtcttgcctaggcggcccaggtcctcctccaggtccgagatggcgccgggggcgccaaggtagagcaggagctcctggccgacctgcagccggccgccgacgtccttctgctgcacctgggcgcagaagtactccatgctgcggggctccatggctgcggccgcccgcccgcctgccagtctgtgagcggccaactttcgccgagagccgcccagcctccagtgcgggtccccgcgggagcgggcgggactcacttagcccgccaggggcgcggcttgcggggcgcagcgggcggcgggaggaacgccaagcgcccagccgcccccaaactagtcaaactcggcgccccccgatccccagcccgcttcagaggccgcggccgcgggcgacgtcagcacgcgcgtgacgtcagcacgacgccggcgagggccctccagtccggctagcgttttgctgcggaggtggtggaggtggctgcggaaaccgctgggagcgataggacctctagggagacttggggtccgagttgggccgagccccctgggaggcgggccgttctttgctagccgctgtcagggcaccctgccctcgccctgtgaaatgtggaacgtttccaagtttgcctccacttgtattcaacacttaggaaagtacttggcatccccctttcccgcccccactgccggtttaaaaaaaaaaaaaaaaaagaatacactcctgacttctgcttccagccaccaccacagtcactgtgtaatacttaaaaaaacaaaacaaaacaaaacttaggtttgcctaaagtaaaacgcacagattttcagcgtacacttcatgagtttcggcaaatgtattcacccgtggaaccgccaccccagtgagggtacagcacgtttccaacaccccaggaagtcccaggacacttcccaattatctgctcttccctaggcaattctaatttgatttctagcatggtaacatagttttccctgttcctgaacttcatacagtctgtgcttctttggagtctggtttcttttagcataacgtttggggtccatccagcgctgttggtgtctcagaagtccattcctttttattgctttccattctgtggaatcactaccatttgtcgatccattcacttgttggtagatatttgggttgtttcctattttttataattatgaataaagctgctacaacggttagtgcacaagtttttgtgtggatatattttcttctctcatgggtaaataaataccaaggactggcattactaggtcttgtaagttgtatgtttaactttagaagaacctgccaaattgtttaccaaagtgactggatcatattaaatccccaccagcaatgcttgagagttccagttgctccacaatatttgatatggtcagggttattagttttagccattctggtgggggtaaagttgtctaatacattccaaaagcacactgtgtttatcttcttgacaattattcccaatcacaacaaaatgattatttatgtaatatctttctcttctaatacacagaaagctccaggaacctttgtgttttcctagggtggtgcctagcaaataatgggtggccaatttaagttaaatgagtgaatgaattcaacaaaaattgatatttgaaatattcacaataactaagaataaacaaactcaaaattcaaagaaattgactgttttctgtgttcttttttcagtatttctgtgtttcacattgtattgagtttgtaaagtttcttccatctttaattggttgtaatttccctcagactatgcctcaatcaagtaaactatgtgtgatggttaattttatgtgtcaacttgactggggcaagagatgcccaaatagctggcaaaacattatttctgagtgtgtctgtgagagagtttatggaagagattatcatttgaattggtgagctgagtaaagcagatggcccttcccaatgtcagtggacatcatccaattcgttgaggcctgaacagaacacaagtgtggagaaaggccaaattcactctctctgctcgatcggaaacatccatcttttcctgctctcaaagatgggtgctcctggttctcaaactttagtattcagacagaaacttatatcatcagtcctccaattctcaggcctccagactaggactgtattacaccaccaggtttcctggttctccagcttgcaaacagcagacatgagacttcttgcctcccttaaccgtgtgagccaattcctataataattatcctctcattaggccaagtgcagtggttcacacttgtaatcccggcactttgggagactgaggtggaaggatcgcttaagcccagg

SEQ ID NO: 315481 - DNA, 4001 bp, Homo sapiens
accctaatccccttgtccccattctccactgccacccccaccagcctgccagcccagctgggagtggaaagcctctcacttagggtgggtggagagggcttggtggcctcagccccattctggagctgcactgagcccagcggtgggttgggggacagcggaggctgaggatggctgggctgtgactgtggatgctggggtgatgggacgggagagtcgcctgaaccatggctagacctgccaagctgggcgtgtgttggggggcggggaggagtagattctggctgccacccgcagagcttcgggacacaaagggctcctgttggggctgggatgggggggagggagggagggaaagatagagacagagagagggtgagagataggaaagggaaagcaaagagaagagagggaactagagaggagaaagtagaagagaaaagagagggaaggcgaagggatggagaagagaaagaaggggatgagagaggaagaagtacggaggaggaagagaatggagagtattaagaggcaagcacggtgtaggaggagggaggtgagagtgggagagaaagacaaagggataggatggtgaaggggggcgggagcaggctggagcacagagtgcccgggacagagctcgaccctgagagctcattccagagacagctggaagggacggagatggagaggtggctggtgttaagaggcaccatttcagaggccaggtgcctggcttccttgaccatgctcctatcctggtctgggcagattggcaagtgtctcctaccccatcccaagggttggcccctctacccttgctctactcccacctctccctgacatcctgattcatccagctactttctcctaactgggcacctcccagacttatagcctctcctctccaagacgttccctccctgccaccttcctgggcaaattccagcccaagctggtaaaaaggaaccacgggccccttcctttccctagggcttgggtcttccaccccagtgacatgaggagggtcacgtggcttctcaaacaccaagtaacaatgggggcgataagtcagctcagagcccaggacccctgcttctaatgaggtcaggggacacaccctggggtgggtgggggctggataccccgcatcagcatagacaaaggtcccaattcccacacccattcctgcttcacccaccctccctaaagctcctgtcccccagagtggcaagccacctttttccagagtcaactgaggggctcctggagccaacgctgggtgtggagcctccagaggtagggtctggggctgaccatctttctacacactcgattctatgcttagcatggtgccatgcacatggcagggacacagagaatgtcttgggtggtggagatagtggcgtagagaaagttcaatggtgtgaatggtgccgcggaaggggcagtggggtgctgagacttgggcccaggtggtgaaggggaggtgcaaagaaaacgtgcatgttgtggggtgaggggaaggacacctgagacaagtacctggtgtccttgtcctctgcaggccctcagcctcagccagaaaccagcatgcagttttccatcccttcggccctgcagcctcagacttccaagcctcagtttccccagctcaaaatgctaggacaggattagggtaggcccctggtcctcgcgcttcccagggtaacctggagcaggggtcccggagcgcactcctggggctcagctcagcttcacttaccagggtctgctcgtactgcagcgcccgtggctccatcccttcctccgccgccgcggccgccatctccgcgcactgccctctcgcctccctcggcggttccggctctgtcctggactcggctcccggcccgcaaagtccgcgccggcagccgtcccgtccccgcagcccgggaggccgagagcagagtgcggcgggcccccggcgggcgccgctggcgcagcctcccgctcgcgtcccctccccggcgggcgggccgagggcggtgccctctgcgctgctccgcccgccggcccatccggaggggacggcccagccaggctggggtccgcgcggggcctcccgagaggcggcaaggggcgctgggaaggcgcaagcccgcgccggctccctgcggatgcccgggtcggagaggggcgcccgggaggggcgggtctactggcacgtggaggggccggcccgggttcgcggttccccgtgcccaggcaggaggggctgcagacgcctgagctccgtaggggttggggctgggggctgcggagctgtctacatcggactcctccgggtcagcccgttaggagccgcctcccctctgcccctccgaagagacgagcggcccagacaggcctgggaaggcccctctgccccgtcaggggtgaaaagcaaagctggaaggattcggagagggttggggccgtcttcctcatccttccttttctcggggctcccgtgggtaggtgcacttggagcaaccgggcctgcggggtgtgcgggggtggaggttggggagggcaccggaaggggtaggccggagggaagggagctccaggtgccgggaagtctactcctgggacgcgggcgtgggtcgcttctccctggctgggcccaaggaggaacccaagtcgctgcttccatccctccgctttgggggaactgcctgctggtgttctgggttctctatcaggggctggggaaggatagaacagagggcggagcgcgcgcagggtggatgggcagcgtagagatagtgtgagaggagcgagggcagcgcccaggaaacgcacaagtgtgcgggagagccagcaccaggagtaaggggcatttgggaggcagaggcggggctcagggggcgggagcagtgcccgggaagggggggccttgtgatagaagccagcactcaggaggaagggccagtgtgagggaagagctggtatccaagggacagggcagtgccaggctgaaggggcacggaggggatccgtgtccaggagaaggcagtggagggggaacgcgcagcactaagctggaggggtaatgcccgggggaggggggtggcgggagcccggctgaaggggcggtgtaggggaagagagcagggcctggggggaagagggagggcagtggtgggagggtgcagtacgagaggaggggacaatgcaggctttcctcttctccatagcgacgtcatggcaaattcccaaactggacggatccggctcgggttacgtccagcagggccgagccggcccaggccggccccggggtcctcggtgccggctggaggggctgggcacctctggggcggggttctgctccacctgccctcggcgcggactgtgccctcggcgggcacgcggaccggcggggtagggctagggcccggcttctctgggccaaggatcaaggtccctgcctgggttaggcccccacgcattccagtcttcggaacccggcctctgaagagggcgcagtagggccccagcggagcgcgagaacccgctctacagcctattgcttccccgccctgggcagagccacctggacatgagacccgccctcaatgccgaagcctctcggaagcaatctttcgggacggaagttaagtagccccgagcgggaggctgtggcggaagtggtcgcgttaccgcttgtttgtgcgcatgcgccactctcgtctggccgccgcgctttcaggaggtgcttttggttctctccggtcttgtccacgctagggggtgcacgtactcccaactgtggtcgcgctctcaccccttctgctgctctcgtggccccctcgcgatggcgggcatcctgtttgaggatattttcgatgtgaaggatattgacccggagggcaagaagtttgaccgaggtaagtaaggtatgtaggggcggtttggaggaagaggctaacctcgcggacatgcccctgggccccgtgtccacccagctcttgtgg

SEQ ID NO: 315482 - DNA, 4001 bp, Homo sapiens
ataagtacaaatataacccctgagggcaatgagcaacacataattactaaacttatggattggttttggtgtaaagaagtcctgatatgagaaccttcaaaagctgaaataataacactcaaaacaaccatgcacattgactgagcaaatgccacaggtattcaaggtgttcaaacagatttggaacaggtttaataactctaaactatatggcttttgatatacactattaaaagttgtcccttgataggaggtagacaaaacaagttaagtaaacttgaacaatgccaacacttttcacccttagcatgcaatgggggccagtgggcagtcacgttcatctaggcaaagactaagggatcttttcttcaagtgagttaaagggcataacagacacatgatataagacaattaatgtgatttctcaaggaagatactccagccgtgaatcattattatctaagtaaatgggaatttaatgacttttcggacaaggaactcgaaacctttaatttaaaaaacaaagtaaaacaattatcctattatccttcttcccaccatccttagaaatatgtctctctatacaatcctttccagttttacagggggtcactgaacatccattacacagaaatttctttgtggaagatggaaacctaaggaagacccacctcttctttctctctcactgccttccactcccagctgacctctgatttcatcagctatgactattttgctgcatttcccttcagtgcctttacttttttctttgtattatgttgcgcaggttatttagaacctttcttgtcagcctttccccacctgccaccaaccttctctttccaagatagcactacaccgtcagcctctacagaagaccttgggtctgaaaattaaaacttcgggggaatctcaagcagcttctccaaagagtcttgcaaggggcctccctgcactaactggatcttataaattaaaagaatcaacctcaagcataagcagaagacacttagataggacatttccagtaggaatgtaacttttactatgaaaaaatcatattaaaggttaaaaagttatatctaatacttgaggattatttatttaagcgtgcacacttgagaagttaccaggcttcaaactttttcagtcatcccattttcttgtctgaactctaccaatcctcaatttaccccaaatctcggaatgcctaggagaggtctaagagctcaagttcaagtttggccttcactccctcaactcgaaccaccagcataggaatttaggatgaagccacacctagagtggcagaagtgtcacccagggagttagaggcaaaactagagcttatgcctgggcgtcgctttcctcaaaccaggattctcttcatttccttatgacagagcacatgatcagaagacttgatcaactgaagactgataaccatggaatcacacaacagaatgagcccataagggagctgcagggggactggggcctctggacggccgctgtgaggtgggggtgcactcactgctcagattcagcaaggagtcaaagactttgcactggatctgcccggtgctctgcgacacgcaggacatccacagcccctcgtacatggcctgggcggtcacgatgttgtcgccggcataggagtaaatcctccactggggcagggcagtgctgacgatggcgccgatccatcccaggaaggcgagaatgaagcccaacagctgcagccccgcgttggccatgactcgctcgggcgcccgcgctggctcaggggtggcaggtgcagaaggcggagagtttgcaggtgggcaacccggactcccgaaggtggctgggccccgcggaggaagttaaggcggggagccctgctcgctgcgccgccgctggagaagctctgggtcggggttggggtccgcgcccggggcggcgctggagtctggatactagaagctgcggttgctcccaggctcgggaactgagacgcagaaccgctgggcgccgcgatttaaagcagctccgcccgcctcagccccggcagccggggagcgccccctggcggtttcagggcggctcaccgagagggcgccgggagcgcccggttggggaacgcgcggctggcggcgtggggaccacccggcaggaccaggcaccagagctgcgtccctgctcgctttctctcgtggatcttctcgctcctgtaaggcgtttcacgcttttcattcattcactccaattatccaaaaattactatgcactgtacttgtaaatcctaacacaaagatgaaaaaatgatccttcaagagctgcagttttaggtttaatacttttttcccaatatcttattaaaaggcatttctacccaactccgcgtctcctcccccatcacaccatttctctctcctttgcttggcttcctcccccttctttcctctctctgctctcttctgtcaaggtcgttccatcacttgtctctgcaaggagcctcagagacttttacactctacagattgggaaacagacccagagagcaacatgatttacacacacacacacacacacacacagacacactcacgcacggagcatatccagtacttggctcccctcccaatctgctttccactacatatcaagttgacccaaaatatcccctttgatctatgattgtcctttttgatgtattattgtccttatgaaactgcaggctagcagcccttccccgccaaacaccaacctcctccccacagcagttatgtcttagagcagcaattcattatcagagggacctggccagtgccccgctctccctgaaaggtgttaattttgtgagttatcaaatgttgttcgtcgcaggtgaggacatgtaaacagcgtttccccagtggcaaaaggactgggctggagttgaggaagtctgggctctggttccagcttttactgtgactggctatctcacccctccggtttcggtctcgctgggactgtagtttccctctatgtttctccaaagcttccttctttgtagttagtcagaagtgctgttgtggttaggaatcattgaaatgtttttccaactgctttttgtgtgtggtgcgagtgtggtgggaggggaagcttctatggttttagtaaaaacagaagcatcttggaagcagaaataaacatattaaggataaaataagatatacccttatataccatggcaactgctagttggtgacagagaaggaaaggtgcaaattctcaaggtgggaatgggaagaaaggccaagccccaccaccttcatttccacctggctctccctggatgcctttcatgtaggcttaaaactaaaggacttggccgtgctaggatttagggacaagcaatgaagaatgtaagacaggagctagatgaagacaattaatttggactgagattaacacagtgaatactgtctttctcctatcagctgtttaggacaagaccatgttcgtgttgtatcccagggttagggcctgcagtcagtactactgtctaggtctcagtggatgttctgtgggtgcctgtcagtgtggatgaagatgtatcaatcacatttgattttgtaaaaattccctgatcagagaaggcactggaatttgctgcaggactagagcagtaccatgtgaatcatataatctcattttcttcttttttttgttccaaacatttaagaattaaaagtattattaaacacccgggcacggtggctcaggccaggcgcagtggctcacgcctgtaatcccaacactttgggaggctgaggcaggcggatcacttgagatcaggagttcgagatcagcctggccaacatggtgaaaccccgtctctactaacaatatgaaaattagccgggcatggtggtgggcgcctgtaattccagctacttgggaggctgaggtaggagaattgcttgaacccgggaggcggaggtggcagtgagcccagatcgtgccactgc

SEQ ID NO: 315483 - DNA, 4001 bp, Homo sapiens
cagtcagcagcagtaaaatggccggcagacccaggaccgaggcagcaatcatcagggcgcggcaggcctgcacgtagcctgggaacaagagagcagatgggaaaggttagaccacagggttctcttgcttcctgagccctgccttaggggaattcagcaccatctcccttcctccttcttggtggattccaggacttagaaggtgctaatgttgtccaaggtcactaagcactttttaacttttaaaacaactcagcaagaaaaaagggggctggagaaactaaatggggacccctggtttaggccacttggccaagcttccaggatggaggggccaagagtccatttacattattacatccccctgagaaagttcagatgaaaactgaaatctcccaagaatcattctgtgagggcctctattggttccagtctgctattgatagctctacctgtgtgaccttgggcaagttacttaaccatgatgtcttattttccacatctataaagtaacaacaggccaggcatggtggctcacacctctaatcccagcactttgggaggccaaggcaggtggatcttctgaggtcaggagttcaagatcagcctggccaacagggcgaaaccccatctctactaaaaatacaaaaattagcctggtgtggtggtgtgagcctgtagtcccagctacttggggaggctgaggcagcagaatcgcttgaacctgagagggggaggttgcagtgagctgagatcgagccactgcactccagcccaggtgacagagcgagactctttctcaaaataaataaataaataaacaaacaaagtattgataataatataatagtacctacatctctgtaatagaattctactgaagattacattagttaatttatttagtgcttaaaacagtgcctataccaaatcctcaaaaaaggttagttgttatcattggtgttctttgtctgtctcagtgcagcgctttcatcttcaggtgtcctaggtgattttctcctaaccatgtgctttcattcacattggctgtggccctaacccagactaaactaagactcaggcttcctctctttgctgtctccccagaggctgctgtcctcatggatcctgcccctaaattgttggaccccatctcctgcctcacccacagtgccctgggcatccttccccaactgtccatcattgcttaaaaggcatctctccagccctcagggttcctggagggcagacacctgccttggtattcacggagttaacacagtgcccacaacagatcatggaaacaattgcgaatcaaggaataagagaactgaaaaatagaagagtagagcaaaactacatgaactttatcctgtcaagtaaaatgccaagtaaaaactgtattaagaaacagattacaatatgtgtcacatttatttagaataaatctgacaagatactgggagaatttcacagacaaatttgtttcactttcaaatgtaatgtttctcattaaaactctccctcctcttaaaaaaggtggggggggtcacatttattaccctcccttttttgctcagaaggaactagtactagtggcctgggtgaggcagagttcatagcaaagccaggaatctagccgacatctgcctcacacaccacgaccctcacgtgcaaaaaggcctaacttcaacgctgtctcttagcaaggaacgttttgccagaattcggacttcacaagggccctcttccagcactgcccatctcagctccttcagaattaaagataatcagtcaagtgtctactgacttgaagatctccagaaaggagctccaggaagtctgaggcccatcccctgacccagccgtccgcctctgcggcttgtagagagccagtactcacacaaagcaggcagtcaactggcaatgcaggttctgaaatccatggcactggctgtccacatgctacagtgccaaggccatgtccggacaccaaaagatagggacagaggactgttcctgcctccacccaaagtatgagggagggggaaggcaggaaggactagcgccgccccccaccccccccccacccccagagtatgcactcccctctggaggacagcctttgttctctgaaaacaaaccacttggcactgaatgctcagtaaagttaatttcaggagaagaaaacaaagttaattttatgcttcaaagatccctacaaataccatgcccagcttttaataaaatactataggtaccattcatgaagcatctactatctcaaaggagattacatttcttatctcatttaatcctcaaataatcgtgaaagatgggtggttgatctgattttaacttttaaaagaagacaaccgtggttcactgaggctagcaatttgtcccccctcacccagattgtgagtcctggatgccggaggctggcccgggtctgccaacaccagcattagccaaagctgagtctagatctgcgttcgttgacctctggccttctgaaagttcaaaatgaaggaaaggatagcgtaaggcaaaccaggcaagcactgcccgcagctattgtgtgccagaggccatgccaggtccagaagaggaagcaaagagaataacaggacgccatctctatcttcaaggaatttaaaacgtagtgggagaacttcactcacgaacaatcaacaaaaaacaagataaaatgtgcctttgtgaggataagagccaagtactaggcagcaaggagaaaggagggattcagattccgactgcgaggaccggaaatagggcgtgcttggaggaggcttaaggggcgagcacagtcttatctgactggcggcttcagggacaggtttctccccatcttgaggaaaccgggaaaatcctttaagtgagcacaatccacgaaggctgggggacagaagcccaccttgtagggacatgccttgggggtagagcagagattccagcagaaaaccaagggggtgcccgcgacctcgccattgcccaacccattggtttaaatctgaattgaggctgtcgcccaaaatgtttccacaggacacatgtgaaaatgtggcccctggccggcgctaggctgtcaatttttacctccccttcccaatctgagacacgctggaggggtggcggcgagcgaccctcggcggcgcgctccgtatctccccagtggagtccgccctccgaggagcgcccgctcgtccctatccaacccagcggcgcggagcgggagccggcgtcaccgcagccccgcagtctgacgcgcccacagcaggggcgggggtagcgggggcagcggagatggccctgggcacgtgcgggaatcaacgtgacatttcccaaaccaggcagcccagagagccctggacgtgaattgctcagcggctgcgcggacggagctaggagggctctaacctggccgggggcgcttcgcccatcccatgaggaccgagaaactcagcctgagccggttcgattctcctgtcagcttgtgttacacgctccttctcacctctgcgggcggaacctaacgcgaaggctcggcgccccgggggaggccgggcgggagcgggaagcacttcgggaagcggacggtggaaggatgcgggctgggaccgcagtaattaacacggactcagttcctattaggtgttccggtttgttcattctcaaagggacccggccagtgttaccaccggccacattgccactattatctcaaattccagataagaatactgcggcctagagaagttaagttcggggctgcctaattcttttacaacaaggtgggactagggatgtcaaaaacgtacccaaaggtcttcaagcccccaaaatgtctctgtgacgccgtctaatatcccgctctctacccagaggataaggatttgggagccgccgccaagctcgggtccttacccggcaggatgaggatgtccaccaggggcttgcagtggtacagccccgtggcc

SEQ ID NO: 315484 - DNA, 4001 bp, Homo sapiens
ccgtggttcactgaggctagcaatttgtcccccctcacccagattgtgagtcctggatgccggaggctggcccgggtctgccaacaccagcattagccaaagctgagtctagatctgcgttcgttgacctctggccttctgaaagttcaaaatgaaggaaaggatagcgtaaggcaaaccaggcaagcactgcccgcagctattgtgtgccagaggccatgccaggtccagaagaggaagcaaagagaataacaggacgccatctctatcttcaaggaatttaaaacgtagtgggagaacttcactcacgaacaatcaacaaaaaacaagataaaatgtgcctttgtgaggataagagccaagtactaggcagcaaggagaaaggagggattcagattccgactgcgaggaccggaaatagggcgtgcttggaggaggcttaaggggcgagcacagtcttatctgactggcggcttcagggacaggtttctccccatcttgaggaaaccgggaaaatcctttaagtgagcacaatccacgaaggctgggggacagaagcccaccttgtagggacatgccttgggggtagagcagagattccagcagaaaaccaagggggtgcccgcgacctcgccattgcccaacccattggtttaaatctgaattgaggctgtcgcccaaaatgtttccacaggacacatgtgaaaatgtggcccctggccggcgctaggctgtcaatttttacctccccttcccaatctgagacacgctggaggggtggcggcgagcgaccctcggcggcgcgctccgtatctccccagtggagtccgccctccgaggagcgcccgctcgtccctatccaacccagcggcgcggagcgggagccggcgtcaccgcagccccgcagtctgacgcgcccacagcaggggcgggggtagcgggggcagcggagatggccctgggcacgtgcgggaatcaacgtgacatttcccaaaccaggcagcccagagagccctggacgtgaattgctcagcggctgcgcggacggagctaggagggctctaacctggccgggggcgcttcgcccatcccatgaggaccgagaaactcagcctgagccggttcgattctcctgtcagcttgtgttacacgctccttctcacctctgcgggcggaacctaacgcgaaggctcggcgccccgggggaggccgggcgggagcgggaagcacttcgggaagcggacggtggaaggatgcgggctgggaccgcagtaattaacacggactcagttcctattaggtgttccggtttgttcattctcaaagggacccggccagtgttaccaccggccacattgccactattatctcaaattccagataagaatactgcggcctagagaagttaagttcggggctgcctaattcttttacaacaaggtgggactagggatgtcaaaaacgtacccaaaggtcttcaagcccccaaaatgtctctgtgacgccgtctaatatcccgctctctacccagaggataaggatttgggagccgccgccaagctcgggtccttacccggcaggatgaggatgtccaccaggggcttgcagtggtacagccccgtggccatgacgcagtcggcccacagccccttggagcccagctcatccagcttgcggcaggtggggatggtgtagccgcaggtcaccacccagtcattggtggaggtggtcacgatgaccccgatccagcccacgaagctcgtgacgaagcccaccacctgcaggcacgtggccaccatggtggccgccaggatgtccccgtgcctcgcccctcacggctgtgcctgggcctgggctggacagtgcctgcccaggtacgtctcccacgctcgcgagccgctggagggcgacggcccgaggcgggacactggaggtggaggtgggcgccggaggctgcgagctcagcggcgaagggcgcacggcggggacagcagcgctgctgggcagcgcgcccccgccccctctttaagccccgcggctccggccggcgagcaccaatcggcggcagccccggggcgcgccggccaatcgcggggcggggccgggagggaagcgtgaaggggagcagagtaaccccaggggggccattgggccgccccaccccgtccgcagcgcagtccggcgatgcaaagtaaaacaattccatccaggtccagagaaacggagagcgcaaagagggcgtgcgtttgtcgagagttctgttttcctgcgactggtttctcttcttatagcccctctctcatctcagtctctgggtgtccattccgctccgaccctcctcagctcctccctgctcgctccttcttccctgctgcgagcactccaagggcgctcggtacagtcccccgacgacccaggattgtgacagactgaaaagtgcagtagggacaaacgcgaggcattcagtacacacagttactagaagaaagaaaacgatgcttttcagtggttgaacatcatcagcggcaaacgtggccataataatcaacaatagcaactcacatttatcgagctgtgttatatattatgcagatgcattttacatgcattagctcatttaatcctcataacagcctttgaggtaggaacaattgtcaatgacacatactaggccgggagtggtggctcacacctgtaatcccagaactttgggaggccaaggtgggcggatcacctaaggtcaggagttcgagaccagcctgaccaacatggtgaaactccatctctacagaaaatacaaaaatgagccgggcatggtggcgcatgcctgtaaccccagctgcttgggaggctgaggcaggagaataacttgaaggaggttgcagtgcgccaagatcgtgccactgcactccagcctgggcaactgagtgagacaacgtctcaaaagcaaacaacaacaacaacaacaaattacacgcactagccatagagaaacagcacaagaaggttgagttgcccaagttcacgcagctaggaaggggtagataccatgggcccatctcatccctttcacgaactgtttctaggaaactgtcctgatcagtctgaaaattcctaaggggttcatgtgtcccattttagacgcattaaaagctacagcagacttctctggctcactgtaaataaattaatatctgtaccccactgagaaaactgcctagcccagaatgagcgctctgatagtgtaaagctatcatcatcaccatcaacatcattaagccaccatgcatacaaataggccgcattatttgcacctttttattcagatagggaagtcttccttgagctgcatttacattcaacagttttcactccctttgaaacatttggcttatcttattatctccttctatccattcccttggaccactgcctcctcaccaatcatgagacttaaaggtgtgaggatttcagaaagcacaaaaacttcctgctcagcgttctaaaatctaagatactaaccataaatcataggtactgagctttcccaaagccagccctaatgctggttatcagtgcaatcaccatgtcttctaggaaagcctggacttgaggagacaattacatttccctggagaccccaaggaaatcaagtgcacacacagaaatggctcttgtaattgatagcagagtgtcaagtacaagggtcacagtaatcacccaggaagcacagtgactaagaacacagtccaactgcccaagttcaaatcttggctccatcactttctggctgtgagaccaagttactttatcattcttggcctccttttctcatttgtaaaataaggatgaaaactgtacctacctcatagacttttttttttattctgtgagctattaggttggtgcaaagtattaaacataacggcaaaaaccacgattacttttataccaacctagtaatatatatgcagaacttaaagtaacattggtacaaagta

SEQ ID NO: 315485 - DNA, 4001 bp, Homo sapiens
tttttgtattttaaaaaacataattataattatgctcaagttaaacatatttctgtattcatcacctaccactggccatctagataatggcaaactaatgacagcagaacgttttatctgcacttttccctgagcactgttcaaagggcatttatttcattctttgcatatattcatggccagataaaatgcatcactgggctcacttatagcagacatcctttacagtagttcaattctatcacaatttttggaaatgtaattttctagcattaaagaggtattcctaactccattggttttgaaatgccatgttcaagtcagaggcaaattaaaagcaagaaaaagcgagcagcaaaaataatgcacagcaaaatagaatcattattactttccatttggaactccaatttgagagtttaataaagaaaattagaagaaaaatatataaactcagtcgagtatctttcttaaactttatagaggtgacattatagcatttgctagggtaaattgttcccttcaggatgcacattaaaaagcaaattgttttgctatatactcctttttttgagctcttgaaatattgtttctttttcttacctgtgttttcctaagcctcattaatgaacagcagctaattctgaagatttgattttttactcagttctgcctctctcagattcctatggccacaggtaatggttttgaacttcaaaattacttctttctgagcttctccagcgagaaaaataaaatcctcaaatgtgaacccactcactcatcttttgaatagtagtcagttccctagagcaactcattttaagggaggatttaaatccatgcctgtcccccgtacattgggatgcactggaaagacattttctccctcaacattttttcttttacttggaaatcattaagataatgttttttcctcttgcatgttaattgggtaggttttgcatgccttgcattttctttctcaacgttttagattattaacactccttaaaaaaagtctatcacactattcttaatgctgtcatcaagagtaaaaaatttatcttagaaaaaagggtggtactgaaatgttactcaatatgatatatgcagcaatggaagacgtgaatttctggaggtctcagtagcagagatcacttaattacccttgtggaaatttatccttgtgaaaaaaggaggaactatttagtaacttcatctgtttaatgggataacaagacctacctcataaattaactatgaggattaaatgagctaataatgtaaagactcaataaatagtccatgttgcctatttttggtatcattagccttagtaaagatactgaatgttgtacatggcagttgggacttagcgaaaatttgggctggcctggatcatgaaaagaagctgctatcttcttacctccagagagtcatcagcattcaccatccaacagtcagtccaggtggccacaatcaaaaacccagcagagaaaaaggcaaagaagcaagcgatgtattgaagaagatccctcattgtggcaagcagcccatcaggatggcaacatgggcagacaccagccctggccccacttaagtggcgggtgtcagtcttctgtgtttctggtacctggcaatgtgaaaatactggtcttttactttttctcacgccctgctgcaggtgtcttgagttgcagtaagaataatacaaacaggctgtaaccaacagtggggtcctggaggtcattatccgaagcaaccagcctccaatcagaaggcaggtcagtgcaagggctgagtgtgtttcgggtgggggagagaggagttctgtaacgttttctgacccaactgtgggctagtggtggtcaccagaccaagtgccagtgccaagacgggggaaggaggaagggtcccaccccatgctggaacctgtaaactgatctttcttaggccctctagggagagtgagctattctcctccccactcggaagaaggctacacggttgactgagtgttattttattgttaggactattttaatattcgccgactactttagacagacaggccactggtgaaactatgctaaacaagtgctcgctcaagggagtctgcattccaaagtgttgcgtagaacagccccatgaaggacttgtagcacctgggcagtagggacagccaaggctcctaacctttcagcatcgtagagtgggaacaagtgtgcattttaatgcagacagctctgggtggaaattcttgctctgaatttatggtctgagagcccttgggctgtagtttctgaaaatgcatgtattaatattttctttatataatgcttgttcttcatatgaggaataaaagatattgtgcctgtaagtcgcttagaatagcatctgtcagtaatagctaaatggaaaatattaacatgactaagaatttcctatattattacttttccctcatggaccaatgtttgaaaacgcgtctaatgaagaaaaaaaaactgttatattaggaagaaagtgtgtttcttttttgtaaaaaaaagtttttaatatgtaactggggcaactggaattttatctgtatctgaataggtatccttaatgggtctacaaattccataaccaatactctttaatatgctttaaaaagcacatatatcaacattttctcttcatcaggtagacttctatatactaaaataaaaattttgaatgagaacagtaaaaacaaagtggtgattcttaatgtaggagagaatgtcaaaggggagacagagtgagagaaagaaattgggagggagagaaagaaaggagcagagaaaaggccagaaagaggtaattactctggcatgaatcagctactaagattcttattttaccaacagcttataaaaggattacttttttccatttgaaaattatttgatcataatatacagtataaaaggctaaaatcagtattgataaaccatttttcaaaatatattacaataataaactttttgtggctaaactttgttttttctaattttaattcattttattcaagtatataaaacgtaaatttaaatgtaaaagctgcatggaaaaccataggtggaatataagcttaattatttctatacatagggtctacagtaccacccctgctatccagaatttcccttttgaggcttcagttaccagtggttaatcatggtctgcaaaaattacatgggaaatttcatagataaacaattcatcagtggtaaattgaacactgttctgaatagcgtgatgaaatctcaagccatcccacttcacatgggatatgaatcatccctttggccagcatttccacattgtatgcactacccaccccttagtcacttaatagctgcctcggtgatctgacctactgttgcgtatagtgtgtgtaggatccagtactgtccttcgtttctgacatccactgagggtctttgaacatattcctcaaggagaaggggtgattactgtacacattagcgatcgttataactatctgcgaggtacattacagatgcttttattttacttattttgtttaacagttggaaaaaaaatacctgttttttaagtgctcattcaaagaatgtcattgcccacggaatacaaacatgctgctttggtgagtcacagagaatctttccctgtgccctaaaatctgaaatgctattaagatttactctgctgatctgggagagcaaaccaattccaaaagcacatgccctttgcaggaaaagtcctggacttgttgctgacatttcacacagggacttttcacagtgtactttacctgctaacagtgcactccaaggcagtagttcttcaacctgagtgtacactggactctgtaaggccacttgttataaatgcaaacccaggaattccactcccagacatttggattcaggaaattgggagtggaagccaggaattcatattttacatgtgttttgtataaaatt

SEQ ID NO: 315486 - DNA, 4001 bp, Homo sapiens
aatggttagaccaagagctaaggaggggtcagcaggacatgggaacgtggaagaggttcatcttccttctggtccttagtggagggagacctcactgaccagctgccagttacccacccatctggctcacgttccgctgtttatacccagtccctccttctcactttggttctactgcctttgcctttgactgtcctactgattcaatctctttagcatcttcttgccagattaatatccttgaaataccacaatcccaaaccaaccaaccaaccaaccaaccaaacaaccaacctctcaatggcttccaaacaccttagcctggcacccattgctctccataatcatccccacataaaccttcttctcccgccaaggtcattctctcattgcccctgagtaagacttgggcggtggcaccctcatggctttgcccatgctgtttttcctttctgtattgctgccatctccaaatcttaactccttttcacaagacacttgtggtttttctaccttgatggagtcttgcagtttcaccctcttctcctgccacactggccctctgtctccctcacttggcatattgtcatatccagcctggtgcactcttttatatttttgggaatggtaggcccacagattcccaaggttataggaagctctccgtaaataagtgttgaatgtataaaagaataaatcaccgtatgattcaagtcttctgttgttaccttttttgtgtgtctaagtcttgaccctgcagtcaaatggcaaattcctggaggagaaagccccatattttccatttctgatcctgtttacattgccccccttagatcaatgcccctctcaagacttcaatatgtatttatgaaagaaacaagcaaaaataaaaacgacaaatttattcattgtcttactctcttatctgagtgaaagacatttttaacattctctactcttgtgacttgaatttttcttctagttaaaatgaccaatctactaagcaaataaacacaatccttgtgtattgaatatgccaatccctagaagggggcacggcagcctgcaatacctttccctgcatggcagcgcccatttgccacagcagaatcccctgtgcagagagcgccctgagtctggttccttgtcaccaatattttctggagatcgggaacctggagccccagtgcaggggcccatctgacgtcccagggaaacacagccacctagttctttttctctgcctttttcctctgcccgatttctattgctgttgcttacttaggtgtccctggaagctgagttcaggcacaaggaggcctgaagatggaatctgttcaggagataggcagtccccaactcagtgagggggaatcccggggccgaaggaacaaagtggccgaagtctgggcctcctgagtcctgttcctatgggtgattgagactatgccattgctcacataggagttattgaaaaaataagttcctctgggagaattgggcaccatccagttaggggaacaggagctcagacagctccagaaacttcctctccctaaggttcccgtcctcctattccaccctggtgcaggtggctgttgcccctgtcaaacacgaatcgcagttcctccctccccagcagtccctgtcgtggtgcccagacagagcctgcagtttcctctccacctccaatctctccctccagccagccagacacctggcccttacctggcagccccagcagggtgaagtagccccggcactcggtgaagccagagctctctcggacacaggagcgccacagcccctggtagttgaaaacagctgttacggggttgttgtacaagtcttgggtgctccactggtccatgcaggtggcagcaatgatgcccgcaatcccaatcagtgaaaccacgaaccccaagccctgacaggcagtcacggccatggtggcgcacagtgtcgacacagagccacacgacaagtggacagcgcaattctgagactaccgagtgtagggatggagttttctctgagaggctggtgtacacgtcaggaacggaccatgtaatggaggcggttactcaccagtgccacctgggcttgccctactcctttatctattgaagtgagataattcccacaatagggtaccaagagtcatttgttttccaccatatgtacactctactcactgtttaccttttgagggagtttctttcctgattaaccaggctcccctctgtagagggtaaagcaagtgcagaggtggttgcccggaaggcactgcagattggtcaggcagggcttccagtagttaagccacaaaatacttggagatacaagggcttcatccatgtggccctggggactgagatacatgctgccaccttagttaaaaaacttaggcaaggccggttatgaggcataataaggtatagttgattctagttaatcatggtagttacgttctataaagtcacaaagaacaccgaattagtgaatactgaatcattgcccataggggaagtacagggtcaggctcctgcaagcctctggtcacaacattttcatcatcagtagataaacttactgtatgtgtatttctgtttaaaaacagcttatttaatataaattgttggttcattagcattggactcacagccaacagcagtgaaattcatgcctgaatgaagcttatctaacacacatattttctccataaggcacagcacagcctgcctgtgcttctaaacagtaatcagtgcttctgtactatgcttgggggccattttaaacagtgaaatcaacaaaaagcacaaaaatgtgaaaaacgtggcggtacacatacttcaaagaggacacttgtttaccgtatgagagctgaaaaaagaaggaagattttcacgttactggacctcagctgggaacatgcaacttgggcaatgcaaaattttcaccctcggcacatgctgttatgactgcagcagtgccatgagtattgattttggagttaaaataagttttagcaagtaggcaaatttgaaaatatggtacacatggttaatgagaatcagctgtagtagttatttgatagaattgactagttaatgtggttaaactgtttgcagcttctgtggcacctgactgccttaatcaatggagaaaccatgcaggaaggaagatagcagaggtaagaagcaagaagggctttgggctctggaactacacagcttgggttcaagccccactccattgcttactagctgtggatgggtagcagctaaatacttaacctctttgagccacattatcttcatatgtaaaatgaggtaataatagtgcttatctctctggattgttttgtacattaaatgtgaaaatacatgtgaaatgttgagcattacatatggagcactgtactcagaaaatactaggaaatattactagggcagactgataatataattgaaagctgtagcaattgatgatcactctcacattgtgtttcttcacattgatccagaaattaaactgcagcctactcacacaaagtgtctctagttacaaaaaggcttaaaggtttttttttgtccaaatattattcctacttattttgaacctggactcaagtctcaacttttttcaccaactcacagagctatattatatgttgttggctaacatctctgtgttctagtctttccatttctaaagttaagattttggaatatgttagttcataattgtaaaaaagaggtacctctttctttgactatgatattgtcaggaagacaaatatatcgtttagattaaaagtgtgtgtgtgtgtgcattcatgtgtgtgtgcatgtatatgcttgtgtggcagtgggagggcaggaggaagggcatgctactctgatttatgggatgaagaaacttttctcttgctccatgaagtagcctctaagatcacttattagaatcccacagggatccagggaacataatttgaaaac

SEQ ID NO: 315487 - DNA, 4001 bp, Homo sapiens
agacagaacttgacaatgatcaggatcaacagatttccccaggaaggaggccatatgcataagtgaggagaagagatgaaagaggcaaggaggagaggggctgaccaacagggcatgatcccagacaggtggcatgaggccttcagagccctgctggggaggttgaccttagcaggagaggttgaccttagcaggaaagcagggaagataatcttgttccatcaagggggagaggtggagctattctgagagggtgtcatggagataagatccgttgacagaataggagtgacaagtcacagtggacgcaatggggtttgcccatttaggagagtgggaatattcaggagccccatgtatggagactgtgatacacagtgagcaagagattgataatatgtagtggggccctggggagaggttattgaacatgaagtcataagacatcatgccttaattttgaatatgaggacaatattttttctttatatgatagttaaaattagacataactagcaactcaacactctgtgtggcatttcctgcatctcacctctcccctcccactacagcataatccctcctcagtctggttctctttcttttggccaggttctacctcccttgcttccctaagcaggtctttccccggagtcagtcatcctgttggtcctgcaataagtggcttccaaaaaatggaataaataatcaaattcttctactctgacacccatcttctatttctttctgaaaatgaacttggattagttgaattgcttttcacaattcaattcagtttcaagggctctacagcctcttcacaatttcttgcaaatttatttccatctacttgtttataaaaggtatttgtttcagagacattgttctcctttctccatcacactcacatcttggccaccccttagagccactaattagctagagctattattttcttgtttgcattttaaaaatacaaatagagctcccatattattcagaatgcaaagttgctatgatgcatatttgaagtaattatctatattaaaagcaggggtttaatttatttcatctttaggggtgaaaggatgtcacatttataattatatttatattctgacataatataattataattctgtaattatattttgatatacattgatttttaggacagtatacaagatattcttaatacaaatgcagcaaaaggatatttataatttaatggcaatattctttttggcacccacagagactccaactttgaaaaatttaattgaaatggaaagaaaattaaattagctctcaataaacttttccagatataacaaaatactcagcatcctgcttccctgctcccatgtatgtgcaggcaggagcaagccacatgcaagtaatgcacacaatttattttctccttgagaaacacgagtttattccaggtatcatgaacatacccttacaatagacccattcttcttgaggcctgcctcctcactagcgattccttcgccttgagtattaaccctcccattttctcctgcatgactgttgccctattagacacgagccagcttctccttttattcacacctttcattctgagccagagctgccagggtcctcacccagaggtgggagtggggcttaacgcaaacgcccccttccctgctcacctggttcacctggctctaccccggggtgcacggtgcctacctggaagtcccaggatggtgaaatagggcctgcattcggtgaagcctgaactctgcctcacgcagctcctccagagcccttcgtactggaacacggaggtgacggggttgtcgtacaggtcctgggtgctccacatgtccatcccggtggccgcgatgcagccggccagccccaggatggacaggaggaacgccaccacttggcatgtggtggtggacatgatcctggccgcccgccctgccgcctgcgagaagctgccgccctcctgctgccgaaggtgtgaagctaacgcgctcctgaggggagctcttctaatcagatggtttccctaggctctcagtatttgctcacagtgttttccttagatagctcagtttcgctcctggttcaagggcattatttttacatttgttagagaagcgggcccaagaggcacttgtctgctctccgcaggccgggtgggttcagcgcagagccgtgccagggagcagaaggactccctgctccgggccagaccggcctccctccagctccggctcctccggagagcgccgccatctggagaaaaggctgacgtgtccccaccacggggaacgtgactgcagaccactttggctgacctcgcttaagatggcccctgggaagcacccaccgtgctctgtcttaaaccagacttttcacattttctcctcacaactcatgaacgacttttttcacttacatctttccattttgatcttacagaaatgggtagggcaggcactattatccccattttttgggggtgagtcaagaaaagtacagataagttaagggacttgtcccagtgcctggaaccacagatactctaaaaacggcaggggtggggctcccacctcagcttccagtccagcgctctttctctgtttccatatggagcagcaggggcaggcaaaattgtccccacttttgagaacacgaagccaaatcctagatctatgctcttggtccataagcattggaactgggatgagaggaagccagggaccccgttgatttccatgtcatgctttcactcgtgccacaagaaccacatgaggactctgtggctgacacaggaggtcccacaaaggccagaggagggaccagggttagctgggctgaagtccttggcctggtcacggagaggcttaggatctgctcctgatgctgcccctaacttgtcgtgtgctgggcaggttgggggcaaactcctaagcccttgtaggtcacaggttcttcatccacaacatgtgagatctaaactagaacactccagagccttttcagatctcatacactatcttctacattttgcagaaaagttttcactagaattggtcaaaatattaggaattgtataatcacagtagagagacttggctgaagacatcaggtgttatgttttgtctatacaactaaattttgctagagaattggttgacggatatgggggccaggtatgtctggcctctgaatccagagactttttaaaaattttttgagatggagtcttgctctgttgcccagactggagtgcagtgttgtcatcggggtcactgcaaattctgcctcctgggttcaagcaattctcatgcctcagcctccagagtatttggaactatacatgcataccaccacacccggctaatttttatgtttttagtagagacagggtttcaccatgttgcttacgctgggctcgaattcctgagctcaagtgatctgcttatcttggcttcccaaagtgctgggattacaggcgtgactcactgtgcctggcttccagatatattttgtttttatttatttatttatttattttgagagggagtctcactctgtcgcccaggctggagtgcagtggcgcaatcttggctcactgcaacctccacctcctgggttcaagcgattctcctgcctcagcctcctgactagctgagattacaggcgcctgccaccacacccagctaatttttgtattttagtagagatggggtttcaccatgttggtcaggctggcctcgaactcctgacctcaaatgatctgcctgcctcggcctcccaaagtgccaggattgcaggcgtgagccactgtgcccagccctccggagacattttaatgacactctccaaaatctggacctcaaggccctgaaacatacacacacacccacacacacccccacacacccccacactccccccccacatacatactccaatctttaacctttataggtctttacaggttctccaggaaa

SEQ ID NO: 315488 - DNA, 4001 bp, Homo sapiens
atcattacgtcgttttgtctattattaaccaggtgaagaagacagaagttaaaataagagaaatacctgtcctttctggtgggctataccaatgcatgtttttgggtatggtgatacaccgtctccacaatcccactgtgccattgtatcgaaaaagtgcatcattataagtcttttcatctgcctcatcactaatgaattcatcccagatgcttttattcaaatcactggaattttcttgaactggacttcgatattcataccagaagtctgtgccaatggaggctgccatgtagatggtggaaatgaggctaagcacacaagcaattacaaatgctgtagcaaaacggttatccattctggcattcagactgctctgtttagaagttgaagaaagaagataagttagagtttacggacaaataagaaagattattttgaattattccaaatgcaccctttacccaattccccatcccttcgtacatataaccattaagaattttttttagaaagcaagcatgtttttaattaagcttaaaacaaaactcattctcataaaagtacttattgaatgctcacatacccaggatgctacggagacagaggtcttgttctctagtctatcacctgcatactaaaacagacaacactgaaatggacatacacattacagatacaaacaatagacatgcccatggtcagcagtgtaccgtgcacacattttaaattacagactgaatttttgcacgagctgcagaggattaagtgttctgggtttgagtgttaaaaaggcacaggaaaaagaagcagtggaaattggcttctcccagtttcctctgaagagggaagcctcctaaaacaaaggtaagagtcaggagccatacagaaaacagagttgaagatgtttgttaaccccgagggaaaggttgttctaggtgtataaaatagcaaagagaacaataacatgtaataatgctagatagcaatctctccctaatccattaaagctaagccaagcttctttacgctgccaaatgcttcactcctatctactctcccgattccttatacttctgaacctcctcaacagaaatcttgctctctccctaaatcctcagtgcaacatacgtccgcaaaaactaaatgatccctcctcagccagacagaaaactctcaacatatcaacactcccaaggcgtggacagggctcaacggcagtagtaaatggccgcggtaaaatgactcaaggcagatcgcgctgagtcaaatactacacggcaagtatacaccgtgaccgcaccaaacaccttacaaaggttcatgaaaacagactcgcaaactggggttgctgagtttggaaaatgggaagtgactcaggaaagataagagcaatgacaacgaaaactcaaaaagttggatttgtattttgattttttaaaaatccccccttcatcctggtgctctcaaatgaccttaaagggtcccagcactgggaacggcggttcgtccaagccggacgcctgcagcagccacctcctgggcctcacggcggggccggagaaggccagggctggggcggggcagccgtgctcggccccgggccagggtcccccggtacccgaccaggccccgccctagagggctcggccctgggacaaatccgccgctcggaacccgcccagcccgaccacgcccgggaagggggcccctcttcaaaccgccgggaacatggaaccgcgacgcgacccctgcccggcgacgcaggtcccgctcactcaccgcccatcctcctgctccgccagcttcaccctctagctcagaccacagcaccctactctccccgcgcctcctctgacgcacttccctgcagagcccgccccctccataactcccgcgcctccgcccgcccccactccgggccgggccgcggcccggggccgaggggccttgtgggagttgtaggagggacagactgaaagctgtctgaggcggcgataggcattcctggcgccgcgcgcggcgcattgtgggagatgtagttcagctcctcagggcaagccggtacgcagaagggaagtctaggctgttggattcttgcattttagggaggaagggagaatggtccagaaagtaaagcgggcctgtttccggtcatctcgagtcaatgaccgtgacttgtataacttagatctgacttttaggcctgtgctttccctatcacaccaccctgcctctagatctaagtataaatgaacaaaaatgggattctacttgtgaaacgttgacccattttatttccctctcccagaatccctcccattggagcagagcatccttctggttttattgcataagtttaggctaagaagtatgtgacctggcagacagtatccatcaagaatgtaatgatattatttgggtttcataaaatgtgtttgtagctgccttctttttatgacaagtgatactagttttctattgcagcaatgttgttccttttaaattcttttcacttattttaaaaactattaagttaataatactgaggataccagatatgtcaaaaaatgaataaaaaattgtgggtatagtaggaaaaagactgaaatttggggaacatcactcaagcagataaggtcatggacagcattggagattgcagatgatgtgtggcacaggggcaacaatgattctgaaccctcaggtttaacacagaaattcatggacaggaagcagggacatcttaacaataacatgagtggaactattaacgtggcctgggaccagcaaatggtggatttctcaacagtaaccgacagagaaagctgactcaaggaccagaggggctctcaaacccccactctgtcccctaatgccttgtaatttagcataggagaaagatgggagctgcaagttgatattaaatttctaccactttgacagattaaaggcatgatatgtttctctatctgtacttacatttctttgacctgagtgggtgaaactgatattcatatgcagcacataataaggtagtagccaaatatattcaaacatgactctggattttcatatacagcatataatcaaaaaaaaatttgtcagaggcaccaactagagaaagtgatggagaggcacaggcaaattgtcaatgtgtagtaagacacataaatgcccttatactccaggaaatgtcttcatccattggccttcattagaaatcccctattttccgccgggcatggtggctcacgcctgtaatcccagcactttgggaggccgaggcggcagatcacgaggtcgggagatcgagaccatcctggctaacacggtgaaaccccgtctctactaaaaatacaaaaaaattagccaggcgtgttggtaggcgcttgtggtcccagctacttgggaggctgaggcaggagaatggcatgaacccgggaggcggagcttgcagtgagccaagatcacgccactgcactccagcctgggcgacagaacaagactctgcctcaaaaaaagaaattccccactttcagatttacctctccactgagatcatgtggtcagtaaaccaggcaaaagagaagtttaaaggagagagaagaaacaacttcagtctacagataaaggaactagagagagtaactgacttggtagcaaacttggatattagagtaactgactaccatggtaacacacttgaatatactcattttgtgactttggagaattaaccttctttaagtctcggttgtcttttctccaaaatatggatgttgacagtagcatctatcccacatgatcattgtgaagattgagaaaaacatataaaacgcccagcacaggacctgaggtttaggaaagaatcattaagttattagtatttgcaaatatttgttgaatataatatttgagtaagcttagtgagaacagtctttttttttttttttttttgtattctaatacagttcaaatcagtgtggctggttcatttc

SEQ ID NO: 315489 - DNA, 4001 bp, Homo sapiens
cctggattctaatgtatctcccagatgatgttgatgcctgagtgagaaccaccatggttcatgtcttaagagcagagacggtgtttctctgctgtgtgtccagcatatagactggtgcctacgtggagaaagagctctataagtgcctgccatgttggtgggcgggagactgccatgggtttcagcgagaggcagggcctgggtggctgttctgttggcctgtagccctggaactccaggggccccttctatggagaccacatagggccagggttcaagtgtgacagctggagagaaccaaggcatcacgtgctctgacccttttttttttaacatgagtttaaaaagatttacataattatattaatactgaatctttggtaaacttgagaagctggcgatggttttccacattcaaaaattctatgatttgcctttggagctgcatcttttacaaaggctctcccttggtggcgattttggctaatgctcatagacgtaactatgcacggtattgtcttctctttttaaatgaacattttgtggaaggtaatatacacacataattttttaaaatccaaacagttcaaaaagctggtttctttcccagttgagactgcgcccagcccctggtttttcttcccagaggtaatcactgttactcactcttgtggatccttccagaaagaacttatgcacatacaagtaaaaatgtattattatataaatccctttttcaaagcaaatgtcagcatcatactcattctcttttgaatgtttcttttttcactttgtaaactgaatcttgaagatgatttttttatcagcagccagatttgccccattctttgtcacagtgttgtgaggccccatggccccgatgtccctttatgcactgcactagttcctggccagtgggcaactgtccatttatgaagagccccgggagggcctaagggaggcccccacagccccttctttccttttctgtgcccttggtcctagctgcttgtttctctgcctcagtccccaccctcatccccttggactctcttctagcctctgctccctgggggggtgacagccccgtccattgccatgacattccactgatgttgtctcaacacagcctggggtgacctcactgcaggcggggctgcaagggcaagtcttgctgtagccaaagcaaccgagggacaccccaatccccagaggctacaaagcagagcaaagctgcttctggtggactagtctgagttacatttatttcctgaaggctgtgatatgctacagaaatgagaattcatttcttcttctttttcttttccctgtgcatcaagcaacaagtgaggtgcctttatatattttgtatcataaaatcttcatgagaagtctttgaacaaataccactgtccccattttacagttgagaaaacaggttggaagactccaaagcccagcctgtgcagctctccctggtaagggctgagcgctgccagactcccaggccaaaggtttggtttctttaaaatattggggatgaggggaggagagaagagcaaagatcagtttggatgatctggaaggttcttcccaactctaagggtcagggattcttatgattctgacaaccaactctgctatgagagaactcccccaagccccaaagcccactttactcaagttccctagatgactcaaaaggaggaaaatgaaggaaaggagcatgaggacacactaaggagagggggacctgctccctggaagatggcacagggctctgtccccctccttacctttcttggcatttacaatcttcttgggcttctgggttggtggctcggtggtgacctgggtcaggagggagaagaggcagaggaggaggtaggccccccagagctccatgctgctgcgcgggcgggggctgctgctgcctgcagcgggtctgggtccgaacgcagtgacagccacggcccaggctgcacgtcttaaggcagcagccaaaggacctctgtccaggaaaccctccccaacttggctgcaggcgtgccaaaaaaataaaacaaacacacaagcctgcagaaggatgaagtcctgagggccacagagcctctctgccagggaacacccacgcagcatcctggccctgccttctagaaagaagcccttatttcctaggattctgagaaacacacggtggttgtcatcacatctgcggagcagctaccttgggtaggggctgaggctggctgttcactaacattaactcacagaagcttcacacccaaaccacgagggaagcactgtcctttccccattttaccattgaggaaattgaggctcggtgaggttagggaatttgcccaggctacccagctgtcacggggtagcaatgcccccttatagggtgatctggggctggctgtctgattggtttagaatatttgttatgattattttgtggctctgtctccatgtacttgatgcattttttggttaaaaaatccaagggattccttcccttcttgtcttccctttctcctgagtcctgtcctaaagccacaaagtggggcatagcaaaggtggcggagggagaagccatcgtgccccagaggtaccagagaggatgtggggagaatgtgccctcaaggggtggactggtgtggggtgtgggagcccagcagggtggagggagcatcctggggaaagcaaaggccctgcctggagtgctggagtccaagtgaggcaaggaggggatccatgtgggagagaggctggtggcagagacgggagattggttacacacagggatactgatcaaataaatctactgaagacagtgggagttaggtttcctattgtcagagaaggaagttatgtatatggagagaaaactggaatgaatcctgttgtgtgggattaaaatcggaatgatcagtgtacccttgtggccttgaatacataaagataagtccatatatatagatggaaatgtgtgtgtgtctagtccccacagtcactggggggcctggagcagccagccccgcatagcctggagcactcctagcacctgaatactggcttctgaatatgactttccactaaaggaaccagagcaccttgcagaaacggctgattctagcactgggaagtaggagtggggtgcagaaaatgagcccggaacttgttgttttgccagaaaacaaggaagtgcttaatgaataatgggaacacgtcagtaggacacagagccagcttgaaggagccttcagtggtcagaatcagggacaatttgagcaccaacatagtgacagtaacagatgggaaaccaccagtgcacacagatataagtaagtaagggaacgcattgaaagtctgatgttcttcaatgggatgtttacatagcctcaaagtatctgcccacaaaacacttatccattccagagagaaaaagagcaacttcatggtgaagaaggctggcagacatcacctcatctgtgaccaaagtaaacatcaacagggccaataaaaagcttgcagcacctggggggctgcagtgagaatgtggcatcactccataggactccggccagagagacatcagacaatcccaaatggaggagcattctgcaaaatgactgccagtaattttcaaagctcctggctgaggaagtgtttcaggctgaaggagactgaagacacagaactaaatgcaatatgtgattctggactggaccctccattctcaaggatgcagttgggacaaccagagaaatctgatggggtctgaggagcacacggcagtgatgtgttgtcacatgctgcatcatgacagttcagtcaacaacaggccacatatgtgatatgcttccataagattataatggggcagaaaaattcctaacacctagtgatgtcacaaagggttgtaaagtcatagtgcaactcattattcccaagtttgtggtgatgctggtgtaaacaaatttactgccagtcat

SEQ ID NO: 315490 - DNA, 4001 bp, Homo sapiens
tctccatttcactgtagaaaatgtaaaggctccagaaaattcaccagtaccttctccgcttttgtctaaattcatctgtgagaagctttactcacgctttggctgccggtgactcacggttaaatcatctctctcaacttttttccttttcggttttttaatacagttgcatatcacatgacattctgctttgttttcttccttccccttccccaggaaaactaagcaactctaacagccccattaccttaatgaataaaagccattcagtgaaaagaactggtatccacttcatcaattaaaaagctaacaaccaattcttggaaattttctggagccctatgaaaattcatatcacttagtaacctatgtgagctgaaggttggtgtccaatgactgctaagaagatataaggaatgttgcagaaatataaatagaccagcactgaaatttaattaggcactgcatatgttaataataaattcaattaatttagccttctacctatactagaaagaaaaaaaaaacctgggcaaaataataattcattttaaatgcttcagttggtaacctcctttcctgaagagtgatttatgcagtaatttactgactgtgtcttcataaggttgttccaaaccagcccttctgaaataataataacttctgaatgtgtgttgtaagagatataacaaatgacttcctattaattttcatttaatgagttgcctattcacatggtaatttttaaaaattctcttcttaagataaacaggttataaatactgtggattacacttccatttcacaaaaatcacaacaagaaaatctctctcatattctctacatgatttgcaggtcaatcagtttaaaatgttctatactaaataggcatccatttctttcccagttagcacagcagatcattttaaatttctatagccaaatgattccaaattagttaaaaatgaaaactgaatatttagcagcaggaaaggtcttagcaggaataatgggagggagtggggagcaggaaacaaaatcatgagaaaggtggcaacctggttaaatacggagcccatgaccttggttctttttataaagaacaaaaagcataaagatcattctttacagctttcctatttccccaagtttacttttttaaaaagactccataattttttacataaatattaatacttaagcatcttaattgccaatatttccaaaaaccttaattatgtaacaatgaattaactctatattataataaaaagcaagtataaaataataaaaactaggaagaagaaattgctcagagtcataggtttttcatatggttcacaccgatttaaaaagtcctgcagtaaacacggcaaaattctcaaatataattcctcgcaacactgggaagagtctgcctaaagcattaaataactcaaatgcaattgctacttacatgagaaccgaaagggccttgctcccaacccacactgcctcacaccctctccgtggaaaagcccgtactgcatttcacccataaacttgtccagctcctgccctgaggcattgacgagcagagctcccgttttgcagaggacagtggctttgatccacaacggtgtccccaaggctgtcacaactccgagggcacatgcaaaactgaacactccggccatgcaaaaaatgattttcttctgttggcttggcatgatgagaaacggcttctgtgagggcgaggttcaaaaacaagacctttgtgagcaatgggaagggactgcctctttgactgcatttattacggaagctgaacggacagctcccagctgaaaaggcaacttcaccatcgacggttctcgccaggttaaatgtcagtagatgaaggcctcatcatcactcatacttggcttttctccttttctgctgcttcttctccctaattggaaatctttggactaagaatctgtaaaacaagtctttcaaactgccttcaagtatctcctctgtgtcacttggtaacaaaggtcgaagataacagatggagtcctcagtgtaacttgataaatgtttcccttcctcagccttttgtctgattgggtgagttgaaactttcagaaacaggcttgaatctgatggtacattttcagcaacttgagaagttcacttatcgatgtttttatttttgttttttgtttgttattgtttttggtggtgggggaaggagctttagcagaggtagggagaacatatgtacctgtattgatagttgatgtcaaaaatttttaattacagcaggataaaaatattaaacagaatttggtcctacacgaatattaagtgctctggatcaaccatgggtccttgtccttccaacttaatttctcccagatccatggtttatacctaatgtatcaatagagaatttgattcaaatttttcttggcatacagaaatatgaaaatgcaggagcagatatctagatttctaaatgctttcctttaacaggcttagctgctttaggataatagcaagggaatgtgtttctgggtccaaggaataccaggatctgtaaagataagggcatattgatggaaagagggatggtggtcagataggtgactctatggattcatcataaaaatgcacaggtctcagcaaaggtaatctgtttgggagactagagacagttatgagcaaagattaagcagcaggtaggtctggttaaacggtcaagacctggaaactaaagttcagaattcagtaacagctttttaactttgcatttccaatgagattcctccttctacagacacaggactgtgtgtgtgtgtgtgtgtgtgtgtgtgtgtgtgtgtgtgtgtgtgaagtgtctagtgaatgtttattatatgccatgttattgtcctgagctctgacctacaaagttaatgtttagtaagaacttatgtctggcaacttgtgaagtattctacctaaattatcatatgtaattctcataattagcatataaagtaatgaagaagaggaagaagaagaggagggaggaggagaagaaggaggaggaggaggagaaaggaagaaggaagaagaataagaaagaagaaagaagaagaaaaagcaattattcgtatcttatatataagggaattgaggctcagagagtttaagcaacttgctgaagagagtagtggagctgggattcaaatccaggtcttctacttctgaggttgatgttctattccaagcaaagcccctgaccttgaaaagatggcaaacatttcagtttgggttgggttcgtctaggagtaacaggggcagactagcccattattagttacacatattgagtgtttgaagaacacagacatcagtaaatagaactttttcagttggccaaaagcacatgtgtatgctagcttctattcttttgatccacctttaagcatgacagcttagaggaaattaataaatgaagacttatttcacaccattttcagcataaatgagtctctacattatgcacacttcgaagggaactttgaggtatagactcggagtactggtaaacttctctcacagctcgcctctcctaggagtcgcaacagccagtctcgttaaggacagacaactaagtatagaactcattctagaatgccaatgtaccttcggggagaagaggggcaatataaaacatggccacagaagaactgggcatatagaagattccaaagaggcacttaaaataaagtttacaatattagtaagtcttttttattttgtataacttaacacagaataagcaactcatcccagtttatttggccttccaatgaattcaccactggatttagaataattgctagaacacagaataagcaactcatctcagtttatttggccctccaatgaattcaccactggatttagaataatcgctatcatggtccactagcaaaacaagggggtgccagtgcccctgataagtggttatttgggcatatatg

SEQ ID NO: 315491 - DNA, 4001 bp, Homo sapiens
aaagaatggagatattttcagtcaacttcaatattttaatgtagcacaaagctgtgggaaaataatttctggtactacgggaaatatttcaatgtagaaaacacgccaaatctatttctagattttgtgttcagggcaagtttttcttgtttgcagagaaagcgaaaccctacattttagggcttctttcatctggtgaggcatcagcatgcttggcatcagcaaatctggcaggaccaatctggggaagtttaattctgttcattttagttccccaaacatgtatcaagtgcttaagttattcactgagcacctactatgtgccaggcattattctaggtgttggaagtagagccataaaacaagatggacaagattcctgttgtctcacagagcttataacctaatgggagaagacagaccattagaaagcaaacaaacaaataaacgtgatagcttatctccaaaaatggccacaatcaatgcttttcccccttttacgcatgtgtcacttctcatttaagtgacacttctcatttttctccaatgcctttgaacttggattggccttcgattgctttgacctcctgaatatggcagcagaagtacattgtgccagttccaggcctgtttgataagagaaccagcagtctctgcttttttttcttttggaagcttgagttgccaagaagtccaggctactcttctggagagaaaggctgcctggaggagcactgaggcaccagacacacaagggaagaagctgtcctggatgtcaagcccagaaaagatgactccaacccagttgctatgtaactgcaacagttaggagagaccctatcaagaactgtccgggtgaattagtaaatttttgttttaagcccctgaactttataggagagctgttatccagcggtatcaatgacagaagtgtagaaattttaggcagacggggcaggtccctggaaaaacctcacttttgagctgaaaagcctgaaacctgcagcccaaagtgagaacttccatccctgtgtgcccgctctttcccaattggttctttatgaataatgtctttttaccaatagaatgttgccttttccaaaattatgtatggcctgccccaccacctatcctctgcctataaataccccagactcagccagtagagaggagaagtggctggacatcagagagaggaaacttgacttcagagatggtggctggacattggagagatgtgacttgacttcaggggagagtgacctgcccttcccattcccttttcagcttctctctctgctgagagccactttcattgctaattctctgcattcaccatccttcagttcatctgtgtgaccccattcttcttgggcaccaaacaagaattcaggatgcacaaattgtgggtacccaaaaagactgtcaccctggccctttgccctcacaggcagagggcagccaccctacatgatgaagcaaagggcccactgagctgacaacacactgctgtccacagatggcagagctacgagagcattgtaacacaccctctggggccctggggttgcaggcacccctacctggttgctgctgcagggcctgcatggagtttactcctcacagcactaaagcagccagctggttcctgcactcgttcactcgtgtgctccctcctgcaagaggttgagcagggcaggctgagtaaatggggtacccctgttgggagtcccatgaaggggtcaagaaaatagcctgcatcaacaacaagatagtttcagatagtgatacatatgatggagaaataaaatagggtaatgggattttgagtgatctctgagtggatgggcatggtcaggaaagtgaaacgagctgacacctgaatgttgagaaggaaatcaccctttaaagatctacagaaagaactttccagggaaaagaagcacaactgaggcaggaatgagccagtgcagtggagcctggtgaatggtggggaggcagaagtgggattattgtgctgggaacagattgttgtacccactggatcctggcctggtgaccatggcgaggagttggctttttattctaaatttattaggaagccactagagaattttaagtaggagaggaacacagtctccttcataatattaaaagatcattctgaatgctgaatagtgatcacaagggggtggggaagaacaaatgtccagagatctaagggaggctattttcagaggggagagatgggggctggcctacggtgggagaggttgtcagatttgggatacattttggagatggaagataggacttgtttaaaaaaaaaaaaaagaatccaggccgggtgcggtggctcacgcctgtaatcccagcactttgggaggccgaggcgagtggatcacgaggtcagaagactgaggcaggagaattgcttgaacccaggaggcagaggttgcagtgagccaaggtcccaccactgcactccagcctgggcaacagagtgagaatccgtctcaaaaaaaaaaaaagaagagtcaaggattacttcaaattttttgtcctgagcaactgaataaatggtgatgctgttaactgagatagactagtagaagagacaggcttgggccccaggatgggaagtgatgcaagagttctgtcttagatattttacgtttgagttaccttaaaacctccaagtagaaatgtcaaataggatttatgtttctggaggtccagggagaagactggggtgttaaagaggactggggctagggtaaggcaaacaaggtgcctagggtggaaaaggtaaggtggtagtcaccctccagggccagtcctgcacttgcatgggcctgataaagaatgtttccttaaactttatgtgctaagtgcctcaatgacctctccctagtcctagccctagtatttaaacccattggaacagacatcccaaggagatgaacccagggagaagctgtagttcaagagagaagccctggggctcccccatgtctacaagcacagaagaggagaaaacccaaccaagaagactgggaaaagagtgatttgtgaattaggagcagacccatgagtgagacagcagggaagcaaatggaaaaaaatgtttcaaggaggagtaagtagtcatctgtacaaatgcatgcctcatggccacaacactctactcctgaccacatgctggaagggggccaggagagaaagtttcattgggtcagaacaagccctttgccaccgctggatgtaattaactaactacatatgtacatacatgaaataagcttagtgctatccaatagggagcatcctcttcgtaaatacagaggtgtttggatcctgatggtgtttaccagtgtcctcactcaggagtcatggccaggtcatttgactgctgatgtttagttgtactacatttcctttatcttctcacaatcagaaaaatgcacattaaaactttgagataccattttcaatacatcatgtttacaaagatgaaagcatttagcaatatcctgtgttagctagggtatggggaaatggggacccttgtgcatttttcttgggagtgtaaattgttataacctcctttgaggcagctgggcaatctataaagcattaaaatgcacataccctttagctcagcaatttaactttcaggattttatcctatgaatatttttgcacatgaatccactaaagtattacaaggatattcattgcagcatttcttgataataagaggttggaaataacgtacatgtttagcagtagcatattcatacaatggaatattagtcaatgattacaaagaatgaagcaaatctataacaacatgtatggaattattcatcaaaatgtgatgtgaggtgaaaaaacaagccaaataaatgaagacatatgtgcaccactctgctatttgggaaaaaagccaaaagggaatgtgaataataataaatattaatagttatttaagcacttat

SEQ ID NO: 315492 - DNA, 4001 bp, Homo sapiens
cttcaaactcccgtttgcagacatctgcttatatcaattactgtgctacaaagtgatgggaaatctcctcccccccaccccccaaaaaagtaatttgcctgtttaacaaagtgtctatattgggaaagcaggggggagatgtttggaagttcattgttttttattcttgtcttcaccaaaacaacagtctctcagcttgatcccttcatatcagccacttctttaccgcactctgagatattttcataacgagtttttctctcatgaaatttctcatttctaaaaatagaaactgcctgtcaaagatacaccaagaaaaaaaatgctgaaaagaaacagaatgcctgcttataaaatattttcaaaacgatgacaccaaaaaatttaaaaattacagataaacataatctcccatgttcttctcaaatatatcactcctaagttattggagggccagtttctaaagcccagacaaggcgaactgcctgcctccagctctccccaacctccaagagtaatgcagcctgataggcatttcctcccctaagctagtggtcaagtgtagctcaaagcaagcgtccgaatcaggctgtctctaacagggaatctattttctgacaggcgcaaacccctccgccctctgatgattgccaggcaggatttggggaccaagtacccctcattgtcacctggcggatttggccacagtccacaaaccaaacgcaagccctacttatgaacagcgcagagaatcaacaagttatcactaagctgtgcgccccagctaggatctgccacagcctcccctgagcccaccactgttccccaccagctctgctcttccctcgcctccccaccccctgcaagcacgtgacctcctgtttcagacccggccccccaccccagagctcccgacgctcccaggcagctgtcaaagtccggggttcgccggcttccaggctcgcctgacagagccaggcgttcgcttggatctagcttccttccgggcgggaggcgcggggaggtcaagctcttcaaaggaacagggtgggcaggggagtggtgccaggttaggctcctcggtcctcggtagtcagagcggagtaggaaaggcagcggggagcctcacatcccgcgcttcttccggaccccgccgcctacccggagggtacacgttccccggggagtcagagacgccctgggggagcttgaggagtgtcagcggggccttccctggagcctacaagtttccactccatccccgagctgggagacaagtcacagctcggctccctccttgaaagcaccgccgctgatccttcccccaggcaggagcagacacctgcttgtccccacggcgcgccagcgccctgctctagccgtccctgggccagagctcgaaactcacccactgcgctcccaccccggcacagacagccctcaaagttgtccgtactccccagacctcgccttctgctcagcccccggaccccgcccaggggttgagttgacgtccgcgggtggacctctctggtccgctgcgcagggaactgacttcgggaatccagggcgcacagaggccaaagaagctgcggcaagggagggtgggcaaatccagcttgagcctaggtccttgccgctttcaccctcaagcctgccctgcctccctcctgggagaagagcaaacttccccagcacccacctttagccgcgaggaggcggcgctgccggctgtccccgccaccgccgctgccgctccccacgcccagcgccagcaggagcggcacccagcacagccgcccaggcagcatcctcgcagcagccgccaacgagctgcagccgccgcctactgtccgcgccggctctcgcctcccggtgcctgccgcaccgtgggccgcctcgccgtgcccgatgggtgcgcttctagcgctgccgccgcggcgctcggcctcgggttcccgccgctgcgccgctagctcgccggcagcagccgcgctcactggcgcggacccggagcggctcaggcgctcaccccgggacggcccgtgacgtcacggagggagggaggtggctcgtgcatattcatgaacgcgggcatcggcgccgggttccgcgctccccgccccaaggccccgacccccaactttcctcagccgtctccacgctccggggccctgtccaggtccccctgcccagtcgggaccgggcccccagaggaccctggtgggcggctccggagagccctccagccccgcgcctccactccgactctcggaaaagctgccgcaagggatggagggctcccccagaaagtggccacccgaggcctgagggtcatctggggtggcgcgagggaccctgacctgccatgccctttgaactgatatctgggcggagaggactgacgggcgtcgctaagggtcttgcccttggctgggtctctgggcgttctgcgtcgactggtctggggagggcgccaggcgcacactagagcagcgcctagtggtgctaggggttgtcgggcagagtagatagccttggacctggatggcaatggcagggctccgcgtcatctccgagaagcaggggcagccgcggctcttagaggctgatagaacagctagatcagaaaacttggggtgctgggcctgctgaggctgcagtggcgggggcggggtgtcaaacttaaaattccctgcggtatggtgccatgcaagaagttgccacctttatgttgtcactccgcatctctaagaacaggctacttgacgtcatgcattgtaaaatctcgtgccgttgagtattgtcagttccctgagtgcaggagccagtgcatatctttgcatcctcaaccatctctaggccgtgaaaaaattacaaaggtactcaaaaaaaaaaaaaaaaaaaacagtaaggactcagaataaatccttgaccatatttacctaaatgaaatgccaacatcacacacaatgcagggtttatgaggaatagtttggaaataaagtagatatggaaatacagaaacaaacaatattatttatttagtcattgattcaagacgtttgctgagcatctagacaggctgtatcaccctgacagtgagcactggattagtcgttggagatccaaagacagaggagagagtgggtcctatcctcaaagcttttgttccctgcttggggagccagagagggcagcaaaggcaattacaatcccttgtaagtgttatggtcctgcacattctttatgttgctagctatgagcctatacaaatcaattaacaaaatgtatatattgcaagagtgcctaaacagcatcctctaattaataactgtagtttgaggtactcaacaaagccataaaatccattaacagcactcctgcagctcagcctccctctgctgccctggcagctcactcagagcctctgcagtggtgaaagccaactcttcaggatttcaggcaccaggatgtgcttggggacagcagtgaatcatggtggctgcatggggctcagacccatgtggggctctttaccttcaggtctcctttagcccacaaatcaacatgtgcgctattattctcatttcacacatgatgaaatagaggctcagggaagttaggtaacttccttgttcagggtcaaaaatctagtaaatgtcccaggccgacaccaggaccttgcctttgtcagatgttggtttcagaatctagaaaagatggcatggaaaggtggtagctgacccagggaaaataaaaaagccagaaaatagaagagaaatgtaaatttgtctcattttcttccatttatgctccacccaactacatatctgccctcctcccttcattttctctaataagtagacctatcttactgacttacctgcactgttctttgatgtcattatactgggctttgttaagatcactgattggtcctaataattttatgtgaagtttcaaattcagaccaaataatgagaaacagggggaaatgt

SEQ ID NO: 315493 - DNA, 4001 bp, Homo sapiens
actggactggaaatgaaattacctaggttctaaccagacttgactctaccagcaactagctgtgtggccttgggtacaacacaagattggagtggcttatgagtaactggaaggtaagcaagtgaagagagcaagtatgaagacttttttcccaaatttccttgtctaaattcaaaaagtgtagatatatggaaatctttaacctctctcattctcagtctcctcatccgtatgagattactttaaaggtcacttcaagttcagaagtaccataattaggctgggtgcggtggctcacacctgtaatcccagcactttgggaggccaagtcaggcagatcacttgaggtcaggagttccagaccagcatggcgaacacggcgaaacctcatctctactaaaaatacaaaaattagccggccgtggtggcgggcgcccgtaatcccagctactcaggaggctgcggtgggagaattgcttgaacccagtaggcggaggctacagtgagccgagatagcgccactgcactccagcctgggcgacagtgagactccgtttcagtaaaataaaaaaaaaagataccataaattatatgggcctaaacttgaaccttccttactcacccctcacttatactctaccccttctaccctcaagaaccaaatcatggtagtcatcctgaaaccaagcatcgcacagtgcaccttactatctaaacctttgctcatagggctgcctcttctccagctccaaccactggaaattccatccctcaaagcccagatcaactgctaactgcttcataaccacctagtccaaaatgaatatgatcattatgttccagaactcctctatgcttcaaattagagtactccctgatctaccactacctgctggactagtcacttaacttctcttcgcctcagtttcctaatctgtaaaatggagctaaaaggacctaccataccacatattattgttggataatagagaacacttagcatggtaataacatgttcaattaaaacattatttctgtgctacatatattttccatgctccttgaaggctccgaaagagcattttccatttctgaatctcccaagtttgacgccatttacctctcaatgttttgactttttgtatccataaaatgaaagaaatggactagaccaactaccattccctccaaaaatgttatctattcccttgcaaaaatagcctaacgcaaagatactgcaggtgaccttccacaaggacgggaattcgagggtaagttaactattgctgcaaacggaagtggctggaagcaaagagattaaaacaacattcaagattttgaagatcctttccaaagaaactgactcctgccatagtgatggatcctttgaaatatgtttttaagttgggttacaaggatgaactcggggtccatgaactcccaaacagaaatgtaaaactgtgcgccagaacaaatatacaaatttttctggggccagagtgtctgcagcatacattaaatgcatctgtgaccttaaggggcgaaaagagggtgacaatgaagagactagtcgcgttaagttggaaaccacaatggatgatactttagacaacaaacgcaacctcagataaccataatccccaacaagtgagaagatgacctcagaccgggcgaagcagccgccgggtatgaggagacgctggtggaagcaatgctacccagagctctgcacctttcccaggtcggcatccagcccgcatggcccgcggcgtgagacccggggcgaggcccctcggcaaaccccgcttcccgccccggtacctgcggggtcgagcgccatctcggcgggccgagaagaacgtagccgcttggcggctccggggcacgcaggaaggggagtggaggggaggggcttgggctcggacgcacgtgcgacccccgggagcttcccgcaacagaaacacgggccctttgcaaagcaccgccaggacccgttccctcttccttcccaggctcctacttccgccgcccgttgcgcctgcgcctttctggccccgccccaatcctgtaactagagtggaactgacttcgcagggggaatgaccaggaaagggggcgtgtctgcgtgcctttggggcgggaccgtgcaggacgcgcgcagcctcgcttcaggaggcttgtgcaccagttgcagacccgggtcggccgtgactggaggcggacctgcaggactttgggactgtgcctcactcggtgactgggccaaagtccgagccccgtcccccatacccgccttcggagaaccaaatgaatcatccagttcctttttttttcttcgttaacgttcattcattcataaatgtctatttcatgcctgccaagttccagccacggttctgaatacgaggggaaaataacaataaaaataacgtccctgttctcaaggagcagtgtggcagaggagacaaataaaagcaacacgctgttaaatgtgataaacgccacacgcactagttgttcacagcttgttctaccataaaggtgatatggtgtgtgcaatatcgttatttctccttcaaatcaaagactgtggctctcctagacgttaaaatatgggctctagaagtacctctatgttgtgaaataatatcctcaggacgtacagtatgatttgggtgatgttacaaatcctgcctctatcagtaaaagctgtatgttttgtgagagtaaaatgaaggaaggtaatagccgtcccgctgaagacccactactcacctcttctcaatagaagaaactttctaggtggcacttaggttcatttccactcacaaaccagccttcagaagtgcttccttgtcaaattcacgtttaactggctcgagccacgaaagggtgagctgaggcctgggacagatgggacagatgtttagaaaaacaaggagcagctgcttcttccctgcaagggattcagggctttcaaaatgatcccctccccacctacctgcagtccctcctcccctgctgctgcttccgcctggtcagttggcagaaaagctgaggcagttgagcagggctgggaaagtgggtctctgctcagcaggtcttccgtttaagggcctatttgggcataacggcccttattacagctgtaggttgaggtgccaaggtgaagaattaacgtttcactcacccagccagggaatcaggtccttttccttgtatattttgtaaatatgcttagaaatacaccaaaatgactctggtatgcctcttttattgttctgaaggtgaaggatttgatttagaaagctaaagcaatctttttgaggagatggagtatgaaaacacaggtcagacacccatattcaagaattaaactaaatctttctatatgcaaaagggtattatggtaaaggaggaaagtttgatctgttatcttagtgagttgagtaagttctattatttttctggactttggtttccaatttacaaggttgttctgaggaataaatgtgatatcatacaatgcatttgaaagactttaaaggaccacttctaccatttctgccatagctattacttgaaacattactatttaacatttgtttttaaatcaacacatttttaaaaacacttaaataggcactatttactttagccttatcctaagcaacagtatctgtaatatcatgggttttgtgtgccccatagaatgaactgctagacgtatcacaccaggagaagcactagcaaaaacggtagcccaatacctgatacataatagtatatctctctctactcccatgttaaaccagatactttggggggaaactgagtctttacaatctatacctagggaagataagtcattttttaagttaagcgaatgtaattggcaattaaaaacagaagaaatttcctgaggcatcgcattattaataggcaattctttgggtagtaactgcaaaaggagctcaaggaaagaggagaggacatcatcc

SEQ ID NO: 315494 - DNA, 4001 bp, Homo sapiens
tttccttcttttttatttaaaaaattttgactacttcctttccttttccttgagaaatcagggatgatggggccaaaaagactaagggccaaaggggcccttacccacaggggcaatgagcaaatacataagtattctgaggataacagaaaccaccttatcctcactgttggggaaaggagttacaaatatggaaagggttaaaagccagattatgtctatggtgttagattggaaatgcagctatcagtgtgatctcatagtctttaatataaatagacagagcaacagatataggcgcgcgtgtgtgtttgtgtttcctagcctattacctgaaagggcctggaagcaatgagctcacgcaatccccagatcttggtttctaaataccattttccataatggatggaggtcttcttgaagatatggctaattccagagttgggcacagaaagtacaagatgcttatggaacattttcttgtgccagaaggtaagaaagtactcagaaaaacatgaggaccacatctgagatcatttgagcattaaaataaataatgatattagtgatttataactcattcaataaaacagcaatttatgagctcatgttgatataaataaacacaaaaataagtgaggagaagggaatgctcttcttcactctaagaaagtttatttaagagcaatatgtttacctagtctccaagtatctccccacaaaatatttattaactgcaaaaggaaaaaccataattttacagtaaatctaacagataccaccttaagcaagtgggtttggttacaagactaactccgtttatgtgactcctgatatgattaagaagaatacagcattgtttctgtagtattcctgccataaaaatacacaatttcaatctcacaatgaggaaacatcacacaaatctaaactaaggaacattctacaaaacgtactcttcaaaaatgtgaaggtcacatataaaaaaggaagattacagaactgttcaagattgaaggaacgtagagacaaggcaactaaatgcaacacataatcgtggactaaaaaaccattttttttctataaaggatattattgagacatttggtgaaaagttgaatgggatctatggattagaaagtaaagttgatttactgaatttaattgttatactgtggttatgtagaagagtatacttacatttttaagataatcacactaaagtatataaattaattcagaaaaaaatatacacacaccaaaataaactcacgggtggaaaggaggatgagagagagagacagagagagagagagagagagagagagagagagagagagagagagagagagagacagagagagagagagagaaagagaaagagagggagaatacaaccagtggtaaaatgttaaacattggagaaccttagtgaagagcatatggaaattctttattattcctgtattttttctataagtctgaaattattttgatgttaaaaattaaaaataaagagcatgggctttggagtaactcagattcaattttgaatcctcagtcttatatctatcatctgtgagatcctaggaagttattaaattattctgatctttggttttctcattagatcaccaggagtaggactaatttaaagggctgctgtgaggattaaattagataatgcatgacttgagcactgggcaggtggtaggcatgtctggtaagtgatctgatacataatggatgctgaaatatatatttgttgaataaatgaacaaactcctcccttctatccaacccctcaatctgaacaagtgatcctacttaaagaaaattagatgcttcaaattttagcaatcctaagtatgaaggttttcttaacacttgaataatataaaacaaaatgtcaaataataataataaacataccaccatgcattccgatgttgctctagagtttcctcagcactttgccctcgtgtctcctgtgacactaaatggaacaggcaggcattcaagtttgagtccaacacagcgttaataatagcgaatgtttacagtgccttgggttatgggtgtcaaagaaggggtcatgcccttgttacttaaatcacaaacaaggcttacatcagctcatggctgcagggtacaaaatgaggtgcaatttaatgtccatctgggcatctgttcctaaggtgctagcactgctgtctgtggttcacaatatatctggggtagcaacacagcaaagaatgggacccaggttgtgcttgggaagtttctactctcagccaagatgtgcacatgaatttaaaattacctaagagggtgtttcagagttgctggccaaagagtggtgtcttctaatctggagagcagctgctgggcacaggcatgcaaacacacatacacagacacacacacacacacacagacgtgctcacggagcctgtgcctgcctctacttgtctgctctgcgcagatggttcctggcttttgggtcacctcatcctgcagcccagtccagttagaacctttcttccacagagactggcaagctgtggggtaagagttttggtaaggctgcctgtcttcagagcatgaaggacactgcccggagagggaagagggcaatatttagtgtttgggcctacttgttgttgggctccccactgcctctcctttgcagagctatcactggcccctggttgcaaactctcggtggctttcaagcctacaaaacaaaaactgagagggtgtccaaaaagagaagaagaaaacgttgttgttggtcctggattccactgttggattttggtggggatgagaagaaggaattaccaggtgtgatcaacacctgcacggtacctgcacggtaagctaagtgtccccatccttgctgagaagaggctttgggatgtttctgtgttattcaccagctaggagcggccaacaccactctccaaaagtaggatcttgtgaatattatgcaagggaacgtagtatgattaagagcttatgacagatgatgacttttaggctaaaatgactaagagttgcttgcaaaatagaggaactatcctgacagtaggtaagttttactatagtgatacacatgaaagaaaaccaaaatgaaactttaaattgttatcctgttaagagtaagatggatagtcaaaaattaaagaaaaagtatgtttggataaatggctttccttcttaatagcttgattttgtaagctgatgtgaatgatcaatatacagtgtcaaaatcatcacaatgtgttgaaaatggagaattatactgaataggttaaattgcagaggaggaattctcttttcatggaaagattaatggaagaaactaacattttcaaatggcaactatattgtatcttttttcttttgtttgtttaccttctgttgatgttaagatttaatgaatgagagccagagaacagaagcaggtttctgagataaggtttttggcaggtcttgggagatacctatcaagaacttgttctgtaacaccccacagaagatgactggatatccatgggcacatcacatctggatataaatgggaaatgatgctaggctgctgccaaatgatatcacagaaaattctgctcactgtactcctcaatgggaggattattcaatgtttagggtggctgcacagttttgtatataggcgctccactgaagagagatatgtgttcagttaaaatggttgtgacatattcagttattcttttttctttccataccaattaatgattacatatctttctttattcattatctgttcacatctcaggaaggaatagaagaggtgcaacacatacactgtttaactacactaccatattccacgtgtgtattagatatgcataaaggagaacatggtgtagttaatactagagagaatgcattgcaattacagcaatgttcctttagctacagttaaacttgtttttcctgtgatgacattttct

SEQ ID NO: 315495 - DNA, 4001 bp, Homo sapiens
tgcagtgagccgagatcgtgccactgcactccagcctgggcgacagagggagactccgtgtcaaaaaaaaaaaaaaagaaaaaaaaaactgttggttggtaaaaccctaaaaaagatgatctttaagggctctttacagattatgatacaaaggcccagagaagtcacaaagtagtagcgggaaaagcgtgactttcaaaatcaatcacacttgactaaactcttcccagacctcttcttcaatgtgtgttcctaagaacacgacttaacttttttctgtttcttcacctatacaaatgaagagaatacttaccttttcgggatgttatgaaagttaaatcaattcatatttatgaagacatttgtcacataatagatactcaatacatgttgactgcctttcttccaacggatgaataacttgaaagtcacacagctagtgaggactagaaccaagaattgggatccccttcaccactcaaacagaattcaactatttcttaaatggcctctgttcatcttcaatcatatcataaaatagagctttttaacacctgagttgggaggggtagttattaaagtaaatgtggaacaccacagggctgcaaaagagtcaggaagtttaatcaaggaaatgttgtattggctacctttctaaaaatgacatctgcttagtttgtacctgaaggcttgaccttccggaaacaatgcaacaaatgaagttggttatttttaatggatatttcacaactagtatttcaagattgtttgcagcaaataggtatcaagtgtctaacatgtgcagggccctgtggatgacagaagtatgaatctgactttggccctgtcttctcttgtagagaaaagaggcagaccttgaggagtgataaaaaccaaccaaccaataattgcatggtaggtgtgatggaacttaaaaagttcaaggctagcctgacatggggggtcacttaacgctactctacttggggatgaaatgcccactgcatcaggagttggtaaacacagcagagcatagtagaaactattcaaattgtgttaactgaattctagtattgtttctgaaaggagctagctttgtgaacttgtcaagttacttgacatctttaggttatgtttctcatctgtaaaataagtgagttcaaaggatgatctctatttaagcctccttccagttctactattccaaattccatgataatgatgatgaccacaagaaatacagtaacttatatttaccacacattatatgtcaagcactatgctaaagtgcattactgtactaacttcacttaatcttcacaactttacgaaatggacattattgttatcattattttacagatgaggaaaaggaggctaaacagtatcagaatactggagtcgtgatttgaatggagggagtctgaagcagcaacccctgcttctgacctcagtctgaattgaaagcagttcatgggtcacccttaaccatcatacaaagttgcctctcttcacaaaaactgtcttatccattctcaagaaataaggaaaagagaaagcttgtggaaaggatccttcctggctggcagacagatctgagttaatgtcacagctgtctgtttcacgtgttaaagaatctcttgcaccattttccccgagatgcttgcgcgctcccaaggcggtgcacacccctgctgggcaaacaccgcgatcgccagaagcgaccagggctgaggcgcacggaagggctccgggagaggccccgtaggagcgcgggcacagagtgggtacctgggctgctgcctgctccagtcggctggttctcccaccactcgtctccgagatcgtctgccatttcagctcaggtctcgacgtgggcagaacatcacgggtaggcgaccagctgcggagaatcacgttgtctcaaagccaggcggccggcgtagctacacgcggagctcccgctagacactgtcgcctccgccccgcggcgatgacgtcacacctctgccccgcctctccggcagccgctcccagactcgtcgcagtttccacacaggcgccgacaggcagaagcagtttggaaacgcaacataaatccccccaaagcttaaagacaaaaaggaacataagacgaaagggattgtcatcgtttttgataatgcattttaaaaaattttgtttacgtgttacgtttcccgataagattgtgtcgaaagtgtgagacaccatgtgaagacgatttttctccgctcagtttcaaagaacttgcgcagcgggagaagacccaaacatgtgcgtgtgttttcgcttgtgcgtcagtgtttcagagtttatgtgtttgtacagtttgctcttagaaaacatgcgcaaggatccatgaccatgaatgtcgggcctttgtggtaaatgtagttctgctatttatgcaatatgagtaaagaaaatgtaattggcctggaaaggctcgcccacagaaagacgcaagtggctcgaagacccgcaagttgttttcctcatactccctcggttgtgtgtcccaccccctatttgggaaacgaagtaataagggagtccattgcttcgtaactataggtaagagacccgcagtgcctcttgtctcagtcccaacgtgatttggcagggagggactaggaaaacccgctgggcgccaagtgctggggctagctgtgaagtaattgtggacggtatttttcaggacatcaaacacagacgtaaaaattatacaaaatgtagtaaaagcacgcaacgtgcctggtactatgcatggaatagtaagatgagtccattcagatgttagcctacagtagtggaaattcaatttgtaggaataaagggctagacttctaataggatacatcctcggaaatgacaagacagggaaacttaatctgatgaggctaggattagccatatgtggaaaattaccccgtgtgcacccaactcatagatgttttataaatgcattactgcctagactttgtccgcacactctaaatgccccaaaagggaagatattatgtataaatatggcaaatgtaaaataatctataaagatcaaaagtaatatggcttttgtgaagaaatgtagatgacgagattttcgtgattaatagatttttgaaaaagataagaaatgccagtgtggaagaggagttgctatggctaataaacatgaaaagaattcagtctgattattaatctgggaaatacaaaaaaaacaccacagcgagaccgtttttcaggcaataaatcacaaaattaagaagtatgggccgggcgcggtggctcaagcctgtaatcccaacgctttgggaggccgaggtgggtgaatcacctgaggtcaagaattccagaccagcctggccaaaatggcgaaacccatctctactaaaaatacaaaaattagccgggcatggtggcaggcgcctgtaattccagctacttgagagtctgaggtaggcgaattgcttaaacccgggaagtggaggttgcggtgagccgagatggtgccattacactccagcctggttgacaaaagcgaaactcggtctcaaaaaaaaaaaaaaaaaaaaaaaaaagaagtctggcaatactaaattatggagtgtctatgcattaatgggaattgatacctgttttgtaccatgaactatgaatggtcttacattatattccacctcgcctcagcctcccgagtagctgggactacaggcacatgccaccattcttggttattttgttgttgtttttgttttttgtagatatggcgtctcattttgctgcccaggctggtctttaacacctggcttcaagcagtcctcccactccagcctgccaaagtgttggtattagaggcctaagccactgtgtccagccattttttacatttttaaagcattgtaagaaacagaacaaaacaacaacgacaacaacaaaaacgtaaagaaaaatatgcagcagagactgtagccctcata

SEQ ID NO: 315496 - DNA, 4001 bp, Homo sapiens
gggctgggcgcagtggcttacgcctgtaatcccagcactttgggaggcccggagggcgaaaatcacctgaagtcaggagtttgagaccaggctggtcaacacggcgaaaccccgtctctaccaaaaaaaaaaaaaaaaatcagccgggcatggaggtgcgtgcctgtagtcccaactactcggcacgagaattgcctgaacccgggaggcggaggtttcagtgagccgagattgcgccactgcccccagccttggcgatagagcaagactcggtctcaaaaaaaaaaaaaaaaaaagcttcagatgaatattcttttctgttctaaagagttctactattcacgtagaaaattttagctttactgcagagaaatacagctaatacctaaaaatcatcatgtgacagctgacaagagaagagaaggaagaaggaagaaggtagaaggaacagcttatgcaaaggaacagtggcaggaaagagcccctgatgcctcgtaataaattaaaggtggccagtgtggaaccacctagagggagactgggagaaagataaggccagatcctactgggttccataggccacattatcacttgctttcaaatgatttcccagtcatcagcagatgtgatcattttgatcgctaaacagcagtgccgattttccgacttctgtttttctattcaataaaagtaggtcactagagttctaagaatttaacttcgggtcatttgagttgtaagaatttaagttctttccaaggaaaccaatgagctaatttttacttagaatggttaaaaaacaaaacaaagtaagacaaaactcataaacatcataagcattcggatttttcctaaactggttctattgcagaaatagaacctaaactgtttctatttttcctaaactggttcaaccatcagtggttggaacagtacataggagccaacacgactgtaaagtgaataatttaaatctcaaagatgctttgatgttttcacgaacaggtttatggtacttcaactgcttaaaataaactcaataaaatggaaagatgcataccatgtcctagttcagctatccgcacatacttacaaaaagctgtccttttgactttccacttagaacccatattgctcaattttgaaataattcttttccagtcaatataaaacttttagaagacaatttaccggacacacatacacacacatctcaatgccacgcgtggtatcgcaggactttgtccagcaagttaaactgcccccatgggctcgcagcaggaaaaccgcaagagccagagaaagataaacagcgcttcacagtctaaatacaggcactgtgggcgataatgcagggtagcagcagagagaagagaggaaagtcgccatagaggatgagtgaaagatgttgaagtggctgacttgggtctccgacgcatttcctgagcccgcctaacaggctgggtggccccagttcgtgggatcccgatggggagagccttgggactgaggggccgcccggcggaagggcggagggtaacgcccccttccccaggctgagagggaaggaactagaggtgtggaaacctccttttactgaacaaccaagctgaaacgaaggagctcggcggcctcccaagcccgggccagaccccgctccccagcccgggctcgccctccctgaccgcggactcaccagctgcaagcccttgagaacgcgccggagcaatgggagccggcccatgaaaaagtaggcagcgaggccgctccgggggcctctggcggggcccgggtcctcctccgtagtggggctgtacaccgctccgttctccatcgcctcgggccggggagcgcggcggccgcagcaaccgcgccgttgacttctcggactccagaagtccccggtagccgggaggcggccgtcacttcctgggccttctccccggcttccgcctgactccgccccttcccgcccccgcccttggcccgccccgccccctctcagcaaatttgcttgttagctgttgggattcttccgactttcatccaagaattgagttctttctgtgagcctttgatggatttctcacctccctccatctttcatcctcctgacattcattcacttagtatttttgcgtactttcggtgtgcagtgaaccccgttctaggtacttgggtgacagccaagtactacccaaaatcacaggatccctagtaacagagacagacaataaacaagaaaacagatggatagcaatttcagatagtgataagtgacgtgaaaatatgatacgaaaataatggattcagcatttctggtggcttgataaatttattaaaaaaaaaaagaagatggaggaggaggagaagaggaaggagaaggaaaaaaggatggagaattgggtgctctacttaaatggccactactaaactgagtggtcaggaaaggcctctctgaggaccatgatctttgaattgaatgagactcaaagtgtgagaagccaggcttgtaaagttctggggagagcctttcacgaaagtgcaaatgtcccgaggaccaaatgagtttgactcaatctgaagcccaaaggcctgtgtcgctaggaataagtacgggaggaaaggagatgttggagatgtaggcaaaggccagataatgtggaggccttgcagaccaagggaagaattcgtatttcatttgaagtacaatgagttgtctgtaaggactttcagaatcgctccctcccgcgtctcccgaaattccatttaggctcacttttcaaaatcatttcctttttctctttcttggtcaccaactgctacagtcacatatgttaattttgtgtgaacttgtcaaggaatgtaattatattttagcaactgaagttgattgagttacaggatgttcacaacaatataaagtaggttcgacagtataaagtcggttacattcattttcaaatgagaaaactgaggccaagaggctgaaatcatatccaaggtcaaacagccaggagcagctggaatgcaggcctaagcagtctgactcgaaaccttgctgctaaacgctaacccagaaaacgtcagcttctaactcatctctccattggagtctcaaaacccatggaagagagaaggggtttctgctgccatcagctgctacatcttctccgtggccccaaacctccctttcttcttccagtaacaaacaaaagctcccattcaaatgaatagagacaagtagatactgccctgcaggggccacctacaaccagccagaactacccttctgtctctgattacatgcactctgaatgtcctcccaaggccaagatgccaccaattctgtccaacaaggaaggccactgtattttcaccagggctacaaggattcattgccccattattcttcaagtcactatcatcccaaattagacactactgatgtctaaaagttcctttgaaattcatccaaaattaagatgagttgatgactagagagatggataaaagatttgtgataggccaggcgcagtggctcacgcctgtaattccagcacttcgggaggccgaggcaggtggatcacctgaagtcaggggttcgaaaccagactgaccaacatggtgaaaccccgtctctactaaaaatacaaaaattagccgggcgtggtggcgtgtgcctgtaatcccagctactcgggaggctgaggcaggagaatcgctcaaacccgggaggtggaggtggcagtgagctgagatcgcgctacggcactccggtctgggcaacagagtgagactccgtctcaaaaaaaaaaaaaagcaggccggtcgcggtagctcacgcctgtaatcccaacactctgggaggccgagggggacggatcacgaggtcaggaaatcaagaccatcctggctaacacggtgaaactccatctctactaaaaatacaaaaaattagccgggcgtggtggcgggcgcctgtagtcccagctactcgg

SEQ ID NO: 315497 - DNA, 4001 bp, Homo sapiens
actagaggcccatgccaaccacacaaggttttaaaattttttttgtagagatggggtctcgctatgttgccgaggtttcatctccattatgtttgtgtaccaaactcatagaccaacaagaagacttttcatcccacaatatctttgtccagcaaactcaggggccaagatggaggcttctgatcccattctctgtctaccaaactcatcccttccaatgctcaggtaggatatgtctcaccccagcccatcttttaaggatggtgagatgggctggtctcttctatttggctgatcaaatctcttagcctgggccaaaaaatgccctgctcaaacccaacaatgctcagcaccagatttttttgtacgttgctgaaatggctcttcctagtttttggtctatctagacaccgttcttagggaggcaggaactcagcgccccttctctttaggtctggcccaagcaagacatgagggccacctcatgcacactcagtgtctggaatggcagtgctatagatgcacagacgtcctgtgcccaaccccctggggccaggccaccttagcaggccccagcttctgggtgtgtgaccttgtccagccccacactcctttccccacacctctttttgaaacttaccgctcccctccccaccgttcttggtgcaaacattacaatggtggagactcacaaacagcccaacccagtttcaaaacacatcatacaaacggaaaagttgtttcagattacaaacttttaaagaagaaaaaaacgggaggggagaaaagaaaagagtggggaacaagagaatcggccaggcaacgtctgccctggtaggaggcccttgtgctgagttggtcacaatccaagcccagacactcatcctgcctggctccacgggtgactcccattcaacagtctggctcccctacatgagtaccagcccctgacaacaggcctttcccaactgaccccctgccctccagagccccctgagacccgggccctccctcggaacttgagggcgcaggggaccaggacggccgtctcaacggtcccagttctttttccccactatggaacacaagaccctctgacctcctccttcgagcgaaactgcacacagagcagggaagccctgccgcgctgggttcggaggaaagaggaggccgtggacggggaagaggtcgggtttcgctccctcagcgccgccgcctgggcgactcttccacccccggctcgggttcgaagcggcgcggcccagagaagaggaagaaagacgaaaaggaactttgcccgtggtttcagtcagtaggcgggtcaggcttcgcaggggggtggccggagaaacttgcgaccctggcgacctgggtccgcgggagcaagggccggggcggctctggggactgagctccagcgcgggggctgcggcagcaactttcccggaggaagcctgccgcgaactttagcgacgcggtgccccgcccgctgcgcgatgctccctgggctccggccgggtccagacgcccggcgcgtccgctcccggacccctgctttcccgggacgccctgtagaacctcggcctcgcgccccgcgctcacttaccatttgcgccactttcagcagggccgcgtgggtgcgggggtagctgaggtccagcagcccctccaaggggctcgcgctgggctgggccgcgccggccccgggtccgagcgcgctgccgctgctgcacgtggtgcggacgagcccggctccgtgcgacattgcgcggccccagctcgctggccgcctccccgggcagctgcccaggggccagatacagagggcgggccgggggcgggcgggggcgggcgctggcgagggcggggcgcccgggtccctgccccgctgctggagacgcggagccgcctctggcgggatccctccggtgactggccggccggcgccttccagaaaggtagcggcagtcccggccctcgtagatgcgcggaagttagactggagcgagaggaaaccggatgccttgggtcgtggcctctccgaggtgggcaaggcccggaccacagctggtactgagcctcctgggattttgtgtgggtgcggctgcggatgtgtgctgagagcactttactgaagtttaacttacataaagtgtgatgcccagaccttacgtgttcagctccactaatttttatatatgtgtacacctgtgtaaccgtcgcccagatcaacaaatagaacgtgcccatcaccccagaaagttccgtggtgggccttcctgacctaccttccttccctggccccatccttatccagcctcaggcaaccactacagtgtattctgctttctgtcactgtaggttcattttgcctgttcttggacttcataaacttgaagtaatacagaatattctccttcaacataacaaattagaagatccatcctgttgggaatataagtagttcatatcagttccttcctttttattgctgagtagtactccactgtgcaaagataccgtattttttaaacgtttacccagttgatggacaccaagcttgcttccttcctacctgcttgcctgcctccttccctccttccggcctttcccccctccctcatctcttttctggctatagtcactattatggtacacgtttttttggtggatacaaactctcatttctctgggacaaatatctgcaagtgaacgcactggttacaaggggagcatatgtttgcttctgttagaagctgtcagcctggggaacatggccagacctcatttctacaaaaaacaaaaaataaaaataaattagctgggccgggcgcggtggctcacgcctgtaattccagcactttgggaggccgaggcgggcggatcacgaggtcaggagatcgagaccattctggctaacacggtgaaaccccgtctctactaaaaatacaaaaaattagctgggcgtggtggcgggcgcctgcagtcacagctactcgggatgctgagaatggcgtgaacccgggaggcggagcttgcagtgagcagagcttgcgccactgcattcgagcctgggcgacagagcgagactctgtctcaaaataaaaataaaaataaaaataaataaataaataaattagctgggtgcagtggcacatgcctgttcaggaggctgagtctggaggagccttggagcccaggaggttgaggctgcagtgagccatgacagtggcattgcactccagcctgggccacagagcaagaccttgtctcaattaaaaaaaaaaaaaaagacaagaaaaagaaaaagctgtcaaacagctatccaagtgacattctattctgtatcccttttgggttgttttaaaaatgaagaggccaggcgtggtggctcacacctataatcccagcactttgggaagtcaaggcatgaagatccctggaggccaggagtccgagattgcagtgagctatgatcttgccaccgcactcttgtctgggtgacagagtgagacactgtctcttaaaaaaagaaaaagaaaaagaaaaggaaaaaaacataaaaatgaagacaggcccaaacgggactaccaaaacgaggtatgttatcatgttccttttgagcagtgtccctgtggccatacttacatttattcatttggagataacatcaaaaaatctggctgggcacggtggctcatgtctgtaatcccaaaatcaagctcacaagcccaagtttgacaccagcaagggcaacatggagaaaccccatctctacaaaaaaatacaaaaattaactgggcatggtggcacatgcctgtagtcccagctactcaggaggctgaggtgggaggattgcttgagcccgggaggttgaagctgcagtgagtcatgattacaacactgtactccaggctgggtgacagagcaagaccctgcctcaagaacaaaacaaagcaaagtgaaacataaaactatctttgtgagtttattccctgcca

SEQ ID NO: 315498 - DNA, 4001 bp, Homo sapiens
aaaggatacatgctaacatgtcaacagtgattatttctagtaatgggattgtgggccacttacatttctttcacttttgtatttcctgaaaaagcgcagtacacagagcatatcgataataaatcagaaaaaaacccaaaggcgttatacttcatgcctggcccaaatccaccccaaggtagaaggcccatctctgtcattttagcttttgtttgcgctgctgaagcagaggagcctgccaactccttcatttgcacagcaaatatttgttgaactcctaaaagctaggccctgcaaggcgattccaataccttcagcttttgagtctcctgaagtcctcaatactcgctgagggaaccagctgggagaggagctaagccaacacttctcataccttatgtgcattatgaccaccaggggcttcatagagcaggtccgggtggtatctgagactgggggagcaagcaagctacttgaggtacacaagatttacttcaggtttctcaaaggaaccgcccaggtcttcagtcacttctgcaccatgatggtgtgcccattctctaactcccacataggctcattttcaattcccaaatatttaacaaaagtctgtgagagatgacagaggggcactgctggggcagctggaagctgtctcaactgcttgcagttatgagcacggccctgcagaaaggcaggcctgggtttgaatccatgcttcaccatccaccggtgtgatttacgtcccctctctaggccttcacaggggagggtggtcgttggattacacgagggtatgaggacatctaaagggcttgacaagatcctggtacacgaagaagactcaaacagtgaccacctctaactgctgacaggactccagtcctttctcagctatgaaggactggctgggacttctgggaagatcacgtgagttttcagcctctatgccctccaatgaagagaagaacgcccatgccctgcctccttcccaggaatgttctgagcctaaaccaggatgtgcacagcaccatgcaaaagacctctttggtcctaaaataggttatggcactcagattttattcagtaaaattttcctgactcacctcaatgttactaccagggagataattaggaaaagaaagaagccctttcctcttcccctgatcttaggaagctttattttcagggaggaggccatccacgtggagatcaggtgagaaaggcaccaggtgtctctgacactcaacacaaactcaatagccactaagccaagcttcctgctcccaggatctgccgccgccaccgagaggacccaacaagctgaatttctcccacagcaagacatcctgaggatcacaaccctttcttcccaggacagcccgagtttcctggaccttgtttagagtctttcactttgggaagaaggcgaggctgagcaaaaacggttccctaaagcccgcgggaagatctgagcaggctccatcccgagaagcacggcggaagcacgcgccggggtccagctgagccccccgccacccccggcccgtcggcactcacgatctcggccacgatgaggaagccgggcagggtgcggaggaactcccggtcgtaggcgaagctgctgctgctggtggagaagttctctgcgaaggagctggcggtggtggtgactgtgtgcgagcgggcgcgctgcggctcctccatcgtcgagccactgccgggctggcgcgtccccagggaccccggcgggtctggggctggacgcgcggccctgcgccctggggacacaggcgcgggggaggggagcgcggcccgcgcggggcaggaggtgcgaggggggcgcccgccgggggctgtccaggcgcggcgggtgtccctctagtgcgcggtgcccctagcgcctcggtgcgcgggctcccgagctgcgctggggccctagaggaagaggagagcgagcgaggggaggctgccgggcagccggggaaggcggtggaggcccggaggaggggagggggcggggagaggggcgggcgggaggcgggcaggagagggaccgccccgcggaggcgccgcggacgcccgccctcttcacctgttgcccgactcccagcggcggagaaggcgccgcgtcgcacccagggtggctgggttggcagcctggcgggcggcgcggaggagagggcgcaggggtccttctggccgtcttccgctccccctcccggcctttacttctgtcaggccccgcctggcccaggcccgcagcctgtttccttccacctgggcgggtcgggggctgcgggcattggggccccttaaggaaacccaggcctccagggactccgccgctccaggactcggcgcggagggaatgactgagcgacgaccgaggcagggggtgatgtggtacctcgaatgctgtggaaatggcaggaatgatgacccggccggaccttagacccgagatcgatgagaggccgccagcactgcccgggagacggcccgctcttctccccctcctgctgcggccgccgccagagcccggtgttatttcctgcccctcctgtcgggaacaatttgaggaaccaacttaatcgcttggctttgagggcgcgacgcttccaggcgctctccgcggctctgtcccgcggaccggtggagcctgggtgacggcgcctgggccggaggaggggagatgtttggggtccctggccaggatgaatcagcgtaaccgtcccgtcaccctcggggaaaaaaaatgtttcaagaaggcttgaagggtgtgatttgtgtaatgttaactttaggacaaatgagctgtgctttcctggcatgggaaggggatgggggtcctcatttagtgaggcagtttgtaacagggtcagggaagaactgagctcggctgcgtgcgtttatcggctgtatgacccagagcgagtggctctagtttttggacctcagtaatgccatctctaaaatgcaggctttgacagatggacctctgaacaaaaagattatcttccgcttggtccctccttctattttgtgaaagggtagcaagaaacattttatctggaagccaccaaaagaaaaggaaataatctttggctataaatcgagggtatctttgattcacagtgaaggcatttctgctgatctgttccaagacaggttaaaaacgagatcagaagggacattttcttcacagtgtcttatcaagtgtgctgagaagaaagcaaaaacgacaatctaataaaataaaacaaggaattagtgtcttttaagtctagggcctagccaggaagacctccaggagtaaaagttaaggcttcaaaagcatggcaaagatgtagatttggagagattccatccatgtgcatttggtaagcaccttgggctggtgggtaaattcttaaaatttaaaatatagcacttctccctggagcagtagttctcaaagtggtccttggaccaacagcaggtaagttccctgggaacttatcaaaaatgcaaggtctcaagccccacccccagaccctctgaatcagaaactctgagggtggagccaggaagctgtgtttgaacaagccctccaaaagacactgatgcatgctgaagttagctgctgctttagagaaactgttaatgagtttggggaaataagagatacatacatgaaatggctggaggagactcaagcattatgcatgacatttagtgaacgtaaaagacggagtctagacaactttatttccataatattaacaaaggacaatcctctcttaaaattcctggggtcagatgaatttctaaattcagattttgtttttcaatttagaaaggtaaaatgtgcatgtaccatatattacataatacctttggtaaggtctggggtgacactctaatatactaattttctgcaagggaaatcatgaatgacataagtgtatgcttggattatctactgcaatgtaataaatgttcacaaaatattagtggct

SEQ ID NO: 315499 - DNA, 4001 bp, Homo sapiens
gtttacaggtgtttgattatccttaaccagagtaactcattagaagcatttaaaactatttaggaggggggagggggaagcccaggagataagtactatatctcttatctttttgaaaccctcaaagctctacactccagttatactgcttgaacaaacaaataacataaaattgctaatttaaattcgaatggaaatagtaactggttacgtttcactccaaaattgggtcaaacaataggaaagggggaaaaatctacttttaaaaatgtaatttaaaagcaagatggggatattcattagacctccttcactttgagaaagacaaaaaacaaattcagttttggcttatctcacctgagtccttctgaataatgcctgaaacacactagctaaaatcacagacgattactgagcaatgttctctttttacaagacccccaagaccagaaacagtcacttcctttggaagtgccctgtggctgaggccatatggttaacatgtgggaacaagcacaagccttacccataataaaatcaacacctaaacccaaatgtggaccattatgccattctaaaacaggttctcacgatatggaaaaatctagatggaggggagctagttgaatttcgtgtctcgtttgtaattacatctgtttcattaatccaagaaatgatgcagactaccgcccgctgctgtggttttggaggtttgacaaattcgtgttttttctggtaatggcgcttttaaaggatcccagcaacttaaatagtgttaactcttggaatgtgagccccatcagccccttttggaatggtaatgtaacacaagcaacttagtatttaaatgacgataaaaattcaagaatcggaaaactatcaaggatagggagtataaactctaaaagctcccaagtcttccagcagtctcgccactccaaacacaaaggcttcttcaggaaccctttgttgttgtttgtttgtttgtttgtttgtttttttaagacggagtctctctctgttgcccatgctggagtgtagtggcgcgatctcggctcaccacaacctcggcctccggggttcacgcgattctcctgtccagcctcccgagctgctgggactacatgcgcccgccaccatgcccggctaattttttatttttagtacagaccaactttcaccatattggtcaggctggtctcgaactcctgacctcgtgatccgcccgcctgggactctcaaagtgctgggattacaggcgtgagccaccgcgcccggcctaagaacccttttctaaggcccccaaaacccttggcacatggcccgccaggcgcacgaccccagcacatggcctgcacgactatacccaccccatccccccttcatccgcagccgggagcctttccccaccacacggactccttccagtgagttcccgccaaatccaccctcggtccctcattccgcgaccctcgaagcgtcagggcctcggccccaagggcgcacgggcgggcctcctctgccctaagcctgcggcctggggtgcggccgtggcgccgaaagacccgcatgctcggcgacccagctttccaggacgaagaaaggacagaagtgtcgtccgacagcggtgcgccagaaacccgggtccgaggcggcggcagcagccgagcttcccgcctgacgcagcagaggcgcaggccaaagtgcggccgccatcgccacctcgccgctccctaccctctctgtccgccacagacccgacccgcactgcggctccgtcagcgccgggcccctcccccagccctcaccttccgcgtcggagcgggcccgcagcggcggagactcggacgcaggcctggggaagacggctcgcaaggtagaggctgtttattttgagggtccttgcctgcgccacacgcgggtctgcacacggccccacatacgccgctgcgcacggctctcctccgcctcgcccacgcggccaatcagcgcgcggggttcggcagtccaatcagagccgcccgcggcagggccgcccactagagcgcggcgcggggcgggtgtttctgcgcgcagcgtcttttcccgccgtgccccgcgcgcggcctttcacgccgggatccgggtcccggtgcttctcggttcattcccagctgggtccgggcccggccagactgggtggaaatctggctgaccttggtggtctgtcttggccagctggagcaaagggatgccaggggacgggtctcggtgcagtgactgccattagcttggggccgcagaaagtttctcccctttctcgggctcctgccaggcccttggctttcagagccaggcccgatttctagataacatttaagtttgcagaaaaggggatgccaagtcacggtggtcacggctgtgggatgcagcctctgagatttgtattaatttttgtgagccggggaaaggccttgctgctttctccgccaggactgatgtgtcttcccaagatgaaagtgcctggtaagggcgaggggcctccctgggaaggtcatgagcatgtaaggtaatggggcctagactgtgacttttggcacgtttatgagtgacatcccccgggagggcaaggataaccatttgacctggtctgtcatattcaggaatagacttcagtttagttgtggtattttctccaaaagagatttgtgtatatagccctagatagtcttgtcaagattaaacccaatttaaactgttaactataaaatattttagaattttgtctcattctagaatggctttattcgaaacaaaaaaaaaggaagagtcccaagtttcgtctcagtgaaacctgccagttcaacactatgatttatttttctttttttctttaattttttttttttttaagagtagggtcttgctctgtcgctgggtttacaggcataagccaccaatcccaaatcccggggctatgatttttgaaatcatgttcgtgagaaggcagagcacatgtgttgagagtcagactttaaacctgggttcaaatcattagtgcttaatcattgtaaagcagttaggaggttgcgttcaacatagcaattatcaaagaatgaatgtataactttaaagaccaatgatattttaaacttttttttttttttgagaacggagtctcactccgttgcccaggctggagtgcaatggcacgatctcagctcactgcaacctccgcctcctggattcaagtgattctcctgcctcagcctccccagtagctgggattataggcatgcgccaccacgcccggctaattttgtatttttagtataggcggggtttctccatgttggtcaggctggtctcaaactcccgacctcaggtgatccgcccacccaaagtggtgatcgtcctcccaaagcactgggattacaggcatgagccaccgcgcctggccgaactttttaaatttatttattactattttttgagacagggtctccctctgttgcccaggctggagtgctgtctcagctcactgcaacctccgcttcccatgtttgaccaattctgcctcagcctcctgagtagctgggactgcaggcgcccaccaccacgcctggctaatttttgtatttttagtagagatggggtttcatcatgttggccaggctggtcttgaactcctggcctcaagcggtgctaggccaaagtgctaggattacaggtgtgagccactgcacccagtgcccccaaagtgctaggattacaggtgtgagccactgcactcagccttaaacatttttttaattaaagcaacctaaggtaaaattttttaaccaaatttaacccattcccaatcagattgaataaatgcctagcagcttatgtgttgtgctaaaacacgatatattatctgccaataaaaaacagtattttgtatttatatagttttattaccaagaagcttactcagctttatgatttcccctttgtaatctgattaaccttcatagtat

SEQ ID NO: 315500 - DNA, 4001 bp, Homo sapiens
gagctacactaaacactcatctattttattcaaatttaaccttatatcaaagcaggaagtttccttcaatatggcctataaacttaaaccaatgaaaaaaacagtcccctaatcactgtggaccttattcttcaactacacacattacacagctcttaccaaacaggagtgcagctaggatatgcctgtctcctccaacagactgaacagcaggtcttcaaaggcagggagtgtgtcatatccattattcaacactcaatctttgcgaatgaataaatgaacaagtagaaggctttatgactgaggatttgaaaactggatgggctttaggtctaaaagggtgatttcgggcaagcgcaatggtatgagcaagtaggaatggtaaatgtggggaacacagacactattctaaaataaggaggaagatgttggtcccctggtccagccttggacaggccatgccgttttcctgtctaatagtctctccctcatccacctttcctcatttcttatggctcattccctcacttcttacatatctctgctcaaatatcatctcaccagaggccttccctgaacaacctatccaaaatttcacagcacattccttataccctctcaaggcctttgttctgttgtttttcttcttagattattgaagagatcctctaatgatttttattcctctgtacctaaaatagaattggcttaatttccaagtgaagttcatttgtcagttattgtgaccagaacctactaaaatccacagcacactgagtttttctttaattttaaattaaattcactgtaaaaattttaagttccatcacttttaaatcctgtcacttaagttctttccaataaaacctggatgccacaaagaatatgaatttcttgcgggaaacattccggacaaggtcaggaaataattttatattccttaatgtggaagattctaggaatgggagcaataatccataaagaaaaccattgagattaagtaatttcgaggaactagagcaattaagtaccaaatgcaagattttaggagcacagactgtagagagacaataggattttatgcctttttaaataagtggtttactttgagaggccaaggcggaaggatcgcttgggcccagaagttcgagatcagcctgggcaccatagcgagacccccgcccgtctctatcaagaaaaaaaaaagtggtttttacaaagttaatttcacaggagtcaatgaccagaggaagccacatgtggtcaaaacagcccaggtgaatcccagcctcagccacgcgatattataggcagatgtgtgctccagggtgactttctcttgtctgcttttcccacgaagaagcggaaaattctgcgaagcggcaaaatacatttaagctttttgggccggagttattctgaagagcagggcaaaggcggccagtggcgacttcaaatactgcacttgagtaaaacaactattggacccggggcccgaagactcatgttagcgacagccgagacagaggatggggtaaagaaatgcacgcccaaattcaagtcgccctggagtccccaccccgggccccgccgcctccgagttcagggtccgcccggccccgcacgtcccgccgtctcgtcgctcgggacattggcgccctacctgcaggcttgtctgcagccatcttcccgcttcgactcgggttcttccctgcaggtggcgtggccctgactcccgccgccgggctggccgctgtcctggacctccgaggacaactctgtgcctaccccggctccgggcccccaggttccggctagaggagtgggcagacggcgggctgaggaagtgacgagagctagttcccgtcgtctagcaacagcaacagcttccccaccaagggaccgccacagcctcccgccatacacagcttccgcctcacggcgtcccggtacccactacttccgggggcggcagcctgccgcgcctggagcgccggcgtgggaactgctactggccccgccccacgccgacgtcccctccgcgccccgcctccggccggacgtactctggctggaacctctggatgttcacagggctgacgcggtgggacgtacgcgcgtctgtcctttgcttactctaattaaaacaccgaggtgtcagagcttttgtccctcaatgttacataatattacaataaccacatctgacatttatgtgctaagcactgagccctgcacttggtctgtactatctcattgatttcttgcaaccccatgagagaggcgctgttgaggattcccgtttaaaaagaaacgccttttattttagaatagttgtagttgtgcagaaaagttgcaaagatgacacctagagttcctgtctcctcacctagtttctcctattgtgaacatcttaattattttactatgttacgttgatcacatctaagaaaccagtttgattggcgcactattactcactaaactacacattttattcacatttaccagctttctttcaatgtcctttttttgttgttgttccaggatcctgtccaggacaccatattgcatttattcattatgtcgtcttaggctatttttggctgtggcagtttctcagattcttcttgtttttgatgaccttgacagttttgaagagttactcctcagatatttggtggaatgtgcctcaatttgggtttggccaatatttttctcatggttagactggggttttgggtgtttaggaggaagaccacaaggtgactggctgttctcatcacatagaatcaagggtacatgctgtcaaaatgacatcactgatcatgttaaccttgattacctctctaaggtagtgcttgccagttttctctactgtgcaattactcctcctacccttccacactactttggaaccaagtcaataaatgcaacccacactcaaggtgggaaggcggggtatttaagctctacctcctgcagtggggagtatgtacataaattatcttccccaagggaagtttgcctcttctccctcacttagctatttatatcagtatggactcatggatgtttatcttataatggttacattccaatactacattattttgttgctaaaattgtcccagctttgttaattgggagatttttcaggtttgtacctgtttttttctttttttttaacttttgttttaaactttcttttaaaaaagtatttgtttttggccgggcgtggtggctcacacctgcaatcccagcactttgggaggccaaggcaagtggatcacttgaggtcaggagtttgtgaccagcctggccaacatggtgaaaccccgtctctactaaaaatacaaaaattagctgggcgtggtggtgtgcacctgtaatcccagctacttgggaggctcaggcaggagaatcccttgaatccgggaggcggagattgcagtgagccaagattgccccactgcactccagcctgggcaacagagtgagactctgtctcaaaaaaaaaaaaaagtatttgttttttcttaaactttttaattcaggctaacatacacaaagaaaagtgcatgaatcataagtacagtgtattgacttttcatcaactcaacacatacatataactagcacccagagaaagggcagagctttacccatatctgggagttcccctcatgcctcttcccatctctccacaaagataatcattatgctgacatttaacactatggattagcttcacctgcttttaaacttaatgtatatacattatacaatatattttttagggtctagcttcttttgctcgatagtatgagattcattgacattgttgaatgaagttgtatttgtttctcattgttatatattataatgttacattatgtgaatattccttaatttatgtattcattttattgttgggcatttggatattttatctattttgaatagggccaatatgattactctagtatgacttttgatga

SEQ ID NO: 315501 - DNA, 4001 bp, Homo sapiens
ccgtgaccatgccactgcactccagcctgggtgacagagtgaaaccctgtctcaaaaataataataataaaagatatgaataaaataaataagtaaaatatgccctagattagatgacattctttaatgggacttttgggaccaactgtaagagcaccttagaaatacagggcaaaggggaaaacccaacaactcacccaggtgttgaaaattttgagcttctattctccactaaaagtagagtagttcatgtggccactgctgttagcaaccccagaaaatggaagtatcaggctggacatggtggctcacgcctataatctcagcactttgggaggccaaggtgggcagatcacctgaggtcagcagttccagaccagcctggccaacatggtgaaacccgtttctactaaaaatacaaaaattagctgggcgtggtggcatatgcctacaatctcagctacttgggaggctgtggcaggagaatcactggaacccggaaggcagaggctgcagtgagccgagatcacgccactgcactccagtctgggtgacagagcgagactccatctcaaaaaaaaaaaagaaaagaaaaagaaaatgtaagtctcctaaaattctccagaaaaggagagaagccaatttaagataaatatataagctgggctggacacactggctcacgcctgtaatcccagcacttcgggaggctgaggagggtggatcttgagctcaggacaacatggtgaaaacccatctctaccaaaaacacaaaacttagccaggtgtggtggcacatgcccgtagtcctgctacttgggaggctgaggagggaggatcacttgaacccaggaagtggaggctgcagtgagctgagattgtgccactgcactccagcttgggtgacagtgagacctcatctcaaaataaataaataataaataaataaatagataagctggactctaaggctgacaagagcctctgaaattcccatttctacacacatttcacagaactgagctcaataaataaccttttacatgttaacgaaccattattttacctaccttctttaacttcaggatgaaaattttctgtttttaaaaaaacacacttcactactcaggaggcttaggtgggaagattgcttgagcccagtatatgactaccagcctgagcaatcagtgagaccccatttcttcttcttcttcttttttttttttgagacggagtctcactctgttgcccaggctggagtgcagaggcacaatcccagctcaccgcaacctctgcttcccaggttcaagtgattctcctgcctcagcctcctgagtagctgggattataggtgcccgccaccatgctcagctaatttttgtatttttagtagaggcagggttttaccatgtcagccaggttggtcttgaactcctgatctcaagtgatccgcctgcctcggcctcccaaagtgctgggattaccagcatgagtcaccacgcccggccaagaccccatttcaaatacacacacacacacacacacacacacacacacacacacacacacacactctcttcaacaggattatttttattttccttgtgtatttgtacatttctcgagttttctgccagaaatgggtattcatttttgtaatcagtttttttaatgttttaaaaacatttattatttataactactgacttcttaccagacagagtctgcacataatcccacagcatttctttatttgcccaaaagtagtctccgttgccaattgaaagagtatacgaccgttcacccataagcttgactttccttctactctggcctaatgaacatggctgaccttctatgcgtacagagctctttgacccacaaaccttgacagtctttacaccaatagacttcatttctaaataaacaattgcctttaggtttgaactaagcagaaaagaaatgcaccacgttttcaaaactgaaaatcatcagttaactgaaagcacagacacattccaatacagaatgttaatcattcaaatctgattggtggagactacaagctacactcatcaaaatacagctccactgatatatcaagaaaagaaaacttttccaaagaaaaaagggatgttaaaagacctaaggaaatcaacaatcacagtcacaaaataccaatgatgcccttgtgaaggaaagttttaaatcttaagaaggatgccacttcgaagaaaaacaattcaggcccactaatgtcactatacagctaggttaacatacctcacatatgatttctatcatctgaacaagtatacttgacttaccaaaacctcaaatggtttattcactaaaccatattccctccactggacaagaggagctggagaaatgggaaagcacacacttcgcagcccaaagaataagccatttgtaacaagcaatgttacagaattgagcatcctgcccagtagtgtagaaataaaggaacagaaattcaaatcaataatatcagcatggccagcacggtggctcaggcttgtaatcccagcactttgggaggccagggcaggaggatcacctggggtcaggagtttgagaccagcctggccaacatggtgaaatcccatctctactaaaaatataaaagttaggctgggcgcggtgactcacacctataatctcagctctttgggaggccaaggcaggcagatcacgaggtggggagtttgagagcattccgaccaacatggtgaaacccccatctctactaaaaatacaaaaattagctgggcgtggtggtgcgcacctataatcccagctactcaggaggctgaggcgggagaatcacttgaacccaggaagcagagattgcagtgacccgagatcatgccactgcactccagcctaggcaacagagcaagactgcctcaaaaaacaaacaaacaaacaaaaaactgaaagaagaaaaaacaatatcagcatgctttaaggaagctaggcaaagcagaatattgccactgctgatgagtattttgttttcacatctaagaggaggagtttttatgcatagaaaagactgagatttactctagttttaaaatattaatacttaatttattaaagttacaaattcaaaaagcctagattttactcaaatttttacaccgaacttagacaacttattctacttggaggtctaattttaaaggcctgtgatgaatgtctaaactcatttcaaagttcaccttcaacataacatcttcaaacataaaatgttaactacttaaaaaattttaccaagactacactttcagggatcatttctacagtttgttactggagaagtttctctgaaagtgtagagtaccaaacactttttttaaattaaaaaaaaaaaaaatttatcaagtgagaactattgcaacccccccaccaaaccccaacaatatattcaattttaagtataattgctagacttaaaaagacaaaatttttgtattttaacatgtgtcaagaaaaaaaaatttcctgagaataacttacatacctaaaaaattaaacttatagtgactcttaggtactctctaatgtccacaaaataaaataactgcaataaggtttcaatttaaattcacaagtataaatcaatattcagtcaattatacattttaaattgaaatcataagactaatataagtgccgggcatggtggctcacacctgtaatcccagcactttgggaggtcaaggtgggaggatggcttgagctcaagagttcaagactagcctgggcaacatgacgaaacctcatctctacaaaaaatacaaaagttagccaggcgtggtggcgcatgcctatagtcccagctacttgggaggctgaggtgggaggatcgcttgagcctgggaagtcaaggatgcagtgagcagtgttcatgccactgcactccagcctgggtgacagagtgagaccctgtctggaaaaaaaaaaaaaaagac

SEQ ID NO: 315502 - DNA, 4001 bp, Homo sapiens
tacatatatgtgcaaatatatataattacatataatttgtcacatgtaaattaatccaattctcccttacaaatccttataacgttttaccaccatatctagagaataagttgacctttaaattctttatgatgtcttcacatcttactaaagtggacactgctttttctatatatttgttcgtaaatatgtaaaacatttctcaaaaatgctgaaacacaatacaaatttcacataatgtaaaattacaactaaaaatgtgaaaccttttaaaagctgatctcattttcttttgctgcctttctactttctaaacatgtcttcctctttctgagtatgtctttctgtgaatgtctcctcaactatttggaaaatttcaacattgcttttacaaaatttcatatcataaacagtaatactgctgcagtacattttgtgtcacttttgctccttttcctaaaacagagattatatttgaaactttataaatgaagaaaagactccaagaataaaatattttaccatattgaactttttccaaagcccatttgaaagtcagaaatttttaaacaactattctttttgtcctcagtacttgatgagtagcagtcaatgaaaatgttttaggaacaaaattgaggcatcacagtaaaaatctgtaaaaactacaaaaaacctctttcttttaaaagttaaagattttaatctgtaactattattgattatggatttttgctatatattatcatgtaaatatttgaagcatgtttgaactttgacataagagcctaaaagtctattccaatctattcatgtctttaaataacatgtgttttacctgactactccatttggcctcattccgcactcattttcttcttttagaaaagtctcaagctacttttttcttaggttcctcaggtatcatgaagaaattatgtttatgtagaaaagtggtcttctaaggagatgagtattaaattttaggagtaatgctttttatgacttactttcaaatgggttagccaaaataagtagacagataaaaaaaaaaggaaaaagcacacattcacacacatatatacagaagaaatacagtaaaatggtacaatagctacatctcaataatacctacagatgtattcattcattgtattattgtttcagcttttttggtgcttgagaatatcataaaaagagggaaaacaaaataaaataaacaaaaagttagttatatatacactattttaaaaaaactcttcacttacttatttctccagaaaataaaataaaattaacaaaagaaaatacaacaaatgatttgtaatagttgcttttgtatgtgtcaaagacgataattttttttcattttttctttctactttattctaaatttcaaattttccaaaattaaaaaataaaattgtatctatattcagttttggtcctttagataagttatttgctaaaagtaaaacatatgaaaataccagcactttttaaatttatatgctcctttgtatgtgagatctcacctctttaagttcctttggaaaaaaaatgtcacaaattaacatgctcaaatttgatgttatattcataataccaaagcataatattacagtagatctgtaatatcagatgtcattatatttgctatggaaataaaaatggcttacaaaaataagggaaggaataagaacccaattatcagattagagaatttaaattttccttttgggaggaaaaacatttgtttttctttgctactggtggagttttatttcaacatctaaaaattatgtaagcatatgactcgagtatacttctaacctcaacttagaaaatataggatttttttttacctcctaagcagccaatgaatgaaagcaggatcaactgtttccatggaaacatcatctttaattgccaaatgcaagagtaactcttgtccagtctctgatgaatagaatgctttctcttcaggtaaatcctttaatctgtaaaatatatgtacaaagaagttcgttaaaaaaaaaaaaaaaagctgctttaaaaaagagattttcttcttttcgtaaaaactgtttatcatttggagacactgaaaaccctcagataaaacaaatctgttttgatacaaaatagaggacgcttgaaatgtagatacttaaaaaacatgtaactcataggtagatggaaacgatcttatagaatttgaaatgtttaccaatattaaaatattaaattttaatatattaattattaaaaattttgctagataatttcaagaaagaaaacattaacctaaaattctaactttttccattttctctaacgatagcattctggcaaaactaacagagtcaaataagcagatatcttgaagcactaatttttgcagtttctgaattcctaataaagcatgcaaattatagatagcattatcaatgtccatcttagacctatttttttagaaaactgcagaaagctcccaattatgtatgctgtgtaaaacagattttaaaatgctaatggtagaaatgttcagtctgagaaccttgcaaatgaaaccattttcttttttgctttaattttcataaacttgaatatgttggttgagaggaaataagtatgtgaaagtcttgtgtcattttgagtggccacttaaaactagttaagcttcatggttaatgatcaagtatgcgcgatacacagacctaaatctctggactcctacaattcagttggtaccacacggggaattaatgattttaaagtttgctactttagtaaggaacgggtacaactctctgattcagcagctgctactgattgagctgttttagttgtcactgacccaaagagagaacttggcctcctgtagacagtggttcccaacaatgggttcctgacatgtggcgtatgcaatcagatattatgtacgtcccaaataataagaactcaaataataaaaatatgacaacttgaaaaatatgtacttaaaataatatgttaagtcatcattcctataataatattcttaggtgcctgcaatctaatatatattcttgggtaggttgtaagagatggaattgcggctagaatgcctaggcatcactccctctaggtccactggaatctgaaacaaatgaaaatacaattgagaactgctgttctaagaattgcaggttaacaacttacagtagtaacattgacctttaaccttcactcaatatccccactgctgcaaactgcatgtctcagtttgggttccacaacacaaataagacaaaatgaattcaagtgcaagtaatttacttgggaagtgaaggacaaaaacagacaggatggagaagtaagataggaaaaggaaggcagcctagaaagggtgaaatataaagccttctaacaccatgggtgactggaagtccagttcctatagaaccaatgcctaagagtcatccaagagtcatccctgagttattcttgcaaaggggcaaggcagcaccagttcccataatagtagtaattgcccagtacttgtaacctcctactagggcagtaaataactccagaggtggaaaaaggaaaaaaaaaaggaaagaaacatatatgctagctattaaaagtggtgtgtgcactggagtgatgaaggcaagaggatgagtagggcacacgcagtgtctgctacactgtgcatagaaaacaggctttttgaagttatttttaacagcaccaggtcccacgtgattgatggccaaaattactgaataatttaaatatacgagggagagacacacattccacctcaatcaatcattatactgctcaagcctttccagtggctgattttccctgcttggaccaaagggtctcaggtatcttgccttcctttcttccttccttccttctgctcaatcaatgacatatcctatgtccacaattattttcaattactaatttaaatgataactgaaatcattctagattagatttaa

SEQ ID NO: 315503 - DNA, 4001 bp, Homo sapiens
gatatgcaaagaacattttattctcactggatttacaaacgtttaaaatataatttttaatatctagtattcaaaactaaattttaaaaatgatgttagtgtcttaataagcttcgttgcttgacattaccattttcatacatgagttacatagttttcctaaacaatgcaatgactaagcttccatatgtaggttgaatcatatgaaaccgacactgtctaactattgttcacctacaaaattacaattttgtaggtttactctaatatattaaaaatcataaaatcataggatttcagagttagaaacaaagtttgagaaatctagtgaagtctttggcctggtttataaaaattccttctagtatgaagtaatggtcatttgatatctgctgttggtatatttggaaaaacgagcttaaaataatacataaacaggaacaaaaggagcatttaatgcaaactaagcccaatactcaaattcaatggatctttccccttattatcccactttagggtaagatttcgttttaactaaaggaacggaaaaggaaaaaagaaaacatatctcaaatgaatatctaaccccacaatatgaaagccaactgaaaataatttagttttttaaatggccagagtaaagggcattcaggacttactatctagactaaaaatataatgcattgatttctctaatctcaaacaaaaggaactaagattagcattcttagataacactctttcatttaagtagcctggaagaatcaagtgaattattcaaatccagaaaggaaaaccactaagaaaacagatattttaatgctcttcagtctgcaacctatgcaggaagagagaaatcagatacaagataaccttgagctaacatggttatgagggattctttctaaatgaatgattttaggatgggtcagtcctgagttttacgtcaggtagggcaaaagggtacagacgagccttccttcctagatctgttcccatcccataaaattcagcaagaaaacaagaacactggtgaccaaataaattaattgtacccttttattgtcttatccctataaatgaatttacctttctcccttggtccctgtaacttcttaatttattaattataagaagaagactgctattgcagtcttaccaatacaaaattattaacctctaacttcaactttttgaattacgaaataaaaggaacctaagagaccataggattcatctcactgactataaataaggaactgagcttagggaaactgaattgcccaagatcccaaagcttgtaagagcaagatcaggccccacaagacttgctctacactgctgatccataatgtgatggcctagcaggataggatactatcccctttgttgtaatttggtcatttttggtatgagatttgagggtatgtgtgtctgtgcatgtatctgtgtgtagcttagacaagcattagcagagttaggactcaatgttatactcattaattaatctttcttaaatggtcagtaatcctttttaagtccaaggatcgtccgcataaatcaaactctgtaatgccacaggattatcggcaactgcgtaaccaaatacaaatcacattattaacacagaattaccaaaatataaattgctaaaagaatcaaataaattgataattctccagtatatgatatatgcactaaattaaaagttattaaaacagagaactttgcacaaaattaaaaggtattaggttgactcacttaaaagacgacgattgagaatttttctaataaaaacagagccaggccgggcacggtggctcacgcctgtcatcccagcactttgggaggccgaggcgggcggatcacgaggtcaggagatcgagaccatcctggctaacacggtgaaaccccgtctctactaaaaatacaaaaattagccaggcgtggtggcggcgcctgtagtcccagctactcgggaggctgaggcgggagaatggcgggaacccgggaggcggagcttgcagtgagccgagatggcgccaccgcactccagcctgggcgacagggccagactccgtctcaaaaaaaaaacacagagccaactgataattaaaaatgacaacacataaaatcatttttacaggagtaagttaggttccaaaacgcacagtttggcaacattcggatttttaacatagcaaaatacatacattttattaaaaatcaccaaatatttaaagccaaataaatagctgaagggaaagcattaaatacattgaagattgtatttagcaattcagataacaaatttaagatattttctaagatttttttattttgaaaaatctacaattttattatacatcagcaaatgaaattttatgattaaaaattttctattattcattttattggcaaataaattttggactaaatctgatgttaaaattaacctactattttatagtttaatagaaaatatattgctgttgcattatatattgtttatataagatttagctatatattccataattcataaggaaaagtagtcccgtcaaaatcagtaatcaaaactgttatacaattcctagaagataatacatatttattattccttcaccatataattatttacttatttaaataaaatggtacatatcccaaaatacgttattcctcaaattcaattgttcatagcctgcaaatttaaaaagtgaattttacaatgaggaataaacctggacttttttttttctttagtcaattactttccaggggtatcactggttttataaaaacgtctcaatggcaagtcatgttaaaaaacgttcttcactggatttacagaggacctgattttattatgatattttataatctgtttaataagttaccctgatgagcaagaaaattatcacagtaaatctattttaataatggcctataggctaatttaaatctgaatatctgaagtaagcaaaattaattatttaatcttcatatgaaagtcaaactgtctcacttgaaattaaaggataaatttcatcagatcataaaaataccaatattcattccttacaaactaaatgaaaacaactcccttcttatcacttaccatttctttaaaatccctgccaaatttttagaccagaaataaaatattttttaaaacctgaaatctaaccttcaagaaggttatattaaataagttagagaaggtgcacaacaattataaagcttttaaatggcataagcacaatccaagatttagaaatccctctctctttttactctcaaagattttacactaaacctttctcccttttcgcttttccttttgtttttgtttttgagacagtgtcttgctctgtcgctgagtctggagtgcagtggtgggttatagctcactgcagcttcaactcttggcctcaagcgatcctactgcttcagcctctggagtttctgggactacaaacaggagtaaccacacccagcttacagtaaacctttctaaatttaaattcaatgtgatattctgcctccctctcatccctcctatatagccaatccaccactaagtcaagaccattttacttcattcacatctcttcatcttcaccaccacctccccacaacctaccactactgactccacaaactttagtagctagtatgatcgtccctcttacctcaaccctcttaagatgcttcactgtcttcccattactcatagagaaaaggccaaaattcttcaattggcctacaaatccctgcactgtctggtctttgccaaatattcccaccatctcatcttctaccatcctccatcttgctctctgcagtccagctacactgaagaagtttcagttcttaaaatgtgccatgttccttcccatttcataccctttcttctggcacgatctctcttaaccgtcttctgcctactcattctatctccctacttgatatgtgatctcccttgctatctccctctc

SEQ ID NO: 315504 - DNA, 4001 bp, Homo sapiens
tacttcaatcaaaacaaaatatcatgacagactgaatacagaagtatataggagaatgcacttttattctagtaagacagacattacagagatttgcaaaaatataaaccaagctactcttttcattaaatatttttatttggaaaaatatagtcagttttcttatgttaattatttctaacatatactggttgtatttttgttattttaaagtaaattaagttctaagttaaattctccatttaaattaattatatggcatatatgggtagatataactcacataaacaaaggctctttgaggtatccaataatttttcagggtaaaaaggagtccttaaaccaacagtttgagccctcctgcttagacaagcagaggaacttctagataaatgaatcaacttaagcaaaacctcctataagtaaatttaaacaatattcattggtgaataaaaaaatgtaactgtgacattttgccttctctgggactatagagtgagatgacttgaattgcatttcaatatattgtccttgatatgactctttttttcatggcttaacgtttcttattaggtgaggactttatgcctccactcctgtattaattctctctattattcgcaacgtttgcttaatgcgtaccccttaaaaactgtagcaacatactttattggaactatcagatgaaagaaagaaacaaaaattgttgactttatcttaagtgacaggggaattgagggtatcaatatcagttctgtctaggacaattaagcaaactattgccctactgtgaaattaccttatgtactgtgttcagtctttggttactctgtcctttaagcttctttgcagggctgaatattatcttgtgatcacatatacatagcacatccatggggaattagtatgctctgctgtaagatgcttaagtattcatttattgatgaccttagagatactcaaacaccatttgcagtgtcatcaagcctacagttttgcctttagaggcaaaggactgtagcacaaaggctctagacatttagtcttacatgtaatttgaagaagaaaaaaagggtttttttggactcaataaccaggtgaccaacttagaaaatagaaagtgaaaaagtcagttgttcatccagatgttttcatttgtgacactggtaatggaaaacgcaagaaagagtatccggatgattgatggatttttttcaccttacctattgtattaaaatgttgtattggcaggaaaagtaacacaggtagaatagcagaaaaaagcagttctagctgtgattcccattcactgcattaccttgaataagttattttgtatctctggatcttattttccttaattataaaaatcaaagggttggccccagcagttgcttccagcttaagtattactggattctgtgaaatacagccttgtttactgctcaaatattagattccccatttcctaattatgaagatggtttaactctcataacacctgttacaaagagaagaaactgtacaaagatattaaatatcaggctcttgtagttcacacttcattctactaaatgatgactataattctatcagtctttttgggcaaaaaggaagtgactacagagacagaatgaagtgcaaagatgaataattaccaagtgaattaaatacattttatatttccctttcctttcttcaaagataattgccttagcgctctcattctactttgtgtagactggctaaaatgcctgatgtgacagtaagctgttagctttccagagtagcaggaacaccttctcttgcatgtcatttaatcttcagcttcacaataccatgggtggacaacctaaacatagagcattctcactatgtggttcccagacaagcagcatcagcattacttgggaacttactagaaatgcaaatgcttggttctaccctggacttaccaaatcaaagcctccatctggtatgttcccactgggaacatagaacgagacccagaattctgtgttgtaataagacttccaagtgattgtgatgcacactgaagtttcagaacctctagcaaagcattcgaaatctagctctgttttttactgtataaacttaaatcaattactttaatctctttgggactcaatttccatatctataaactagacagatgtaggaatgaaatgagcatatcctattggctctaactccaaaatatatctcaagtctctccatttctcttcctctcttacgtcctaaccaacaatgtctctcacctggatattggcaatggtccggcttttgctcttggtttccaatcatccattcaccacaaaacaacctgagcggtcttttcaaaacattaatcaaatcgagtcaccctcctgccttgaaatgctgtaatggcttcccattttactcagagaataaaacccaaactctgtgcctggcttacaaagtactgcagtctgtcaccttcccaagtttcaaacctttgccccttgctcactatgatttagttaacactgacttccctgctgcatatcaagaaagtcaagtagttttctgcctcagagtctttgcacttcctcaccttctgccagcaatgcacttccccttgaaagcctagctcattttcatcctttaggttttgggtcagagggcaattcccagacaagtctttcctgactacttcatcttatgaaatctttctcttgctctcagctactttctatcatatcaaattatttatttatttatttatttgagatggagtcttgctctgttgcccaggctggagtgcagtggcacaacctcggctcactggaacctccgcctcctgggttcaagtgattctcctgcctcagcctcccgtgtagttgggactaccggcatgcaccaccaccacacccagctaatttttatattttagtagagacggagctggtttcgaattcctggcctcaagtgactcacccacttcggcctcccaaagtgctgggattacaggcataagccactgcacctggccaatcaacctcattattttctttatcactcttaccaaaaaataaaatttcctagttaatttatttgcttaatagtgcattttggttaacttccagtaaaatattaggtccttgagggcagggattttgtcttgcagccatagtgcctgataatgtctcccacatggtaggcaataaaaaaaaatttgttaaacaagtaaataatgtattaaagtcattttggaaaatgtttatctttagtaacagagatccatagcattttaccactgaaaataaatctatttttaggaagtttttaatgccaaaaacagactgagaaaagtagattcaactagaccgtacaggttatagcaaaaacaaattgggaagatggggtagggtaaaaatgttctatctctgaacttgcttcagttcttcatacataccaaacatgagtagcacagggtaacttaaagacatggctacagtagggacaaaccaaagggcaatagggcttccattattcagacactgggaacaatcatcatgcctagtaggcttttgaaagaaggcaaaatggttttaatgcaaaatggttttaatgcaagaaggaaaaaaattgccattttgccaaccctgaataggagttagcacacttctggttgctgaagtggagagctgatgaatgcaataaacaacctggaacccaaagaagcaggtttctaagctcaaacccatggtttataattcctaggttgtaagaaattcttgtcaacaaagacagaatgttcatggataagtgactggggtactttctcaccttttatcatctacatggtgattttaattatcataattcatttaaattggagacctatgcagctggatattaggaacacagcactgggaagacccagaccagaaaaaagtgagaggaaaaaagatgacagccaagtgcttatgtataattaagctctcctgtggctgtga

SEQ ID NO: 315505 - DNA, 4001 bp, Homo sapiens
tggaaaaataatgacgtttatcagcatcatctctcctcaacaagacagagcagttgaaaccagcttcaacaaacaaatcaatagctattttataaggtagcaaaaataatattctcatgaaacttgtttttgatccttagcaatcttacctactcctgcgacccactgcagatattcccacaaaatctttaaagaaatcaagataaaaatagcaagaataaacttacgggtaacgtgaattttctcatgaatgccacccaaatcacctccaggtgcctgtcttcatgacacactgttctttttcacccacttgggtagagagagagaaagagagaacaaacttgctattaggcagacttgggaacgctattgtatggacctgctcataggcaacctatacagtctttacgctcctaccccactctctaaaggacataaaccagaaatctcaaaaaacaaaaaaatacaagcgcgttccaaattatcttgtgtgggtatccaaacgactcagttatgtggagttactccttgaactatccagctcccactacagaaaattgaaagagcttcccatgcagttaaatgccactgttattctgacaaacatgtgcccgcccctatgttgattccagcaggaaaactagaaaaagttccacgacattcctttcaggaactcctcttacaaataaacctccaacacacctcaagatccggcccactctcctccacgcagaccacacacccagggtgctcagtcacactgactcgccctacacaacctccgccagcttcttcgcaccgaatctgcagaccctggccagcaagcaaccgcctgatcttcccgacgcgcgaagccgcctcctcgcaggagcttcgctgcgaaatgtttccatgcagccgactctctggctggttcagagggattcaggagcccacgtcctcctaccctcacctccacacccttcataaatagtaaaacatatacacgaagcacaagagagaaaatgcacgaagattttgagccccgcgttccagaaggagagtgagtggattggggtctgtggggcgcccggcgcacagttcgccgccgtctgggcccggggaggggacggggcggttgtcttgcctctcgaaagaaactggaaaccccccagaagttgctggaaacgaatgccacccaacaggctcccgcggcagagactggggaagccaggtaccttccctaagagcaggcacctggcctgtcgctcgccgccgcagcctcagcgctcagcagccagcccggcacccagcgggcgccacagacatcagcctccgtctccacgcggctccttccaccacggctacgggctcctgttcctttagtcccaggtccctccactccccaggttcgcgtccctctgctgcgggctgtgactgggctgtcagaagaaaagccccgccgggaacccggcgccagaggccagggcgcacggagagggggcagtagcccgaaccagtcggaggagctgacttgaaggcttcccgcagcattccgggctctcggttccttgttttgtggctgcctcgcagcgcaacaaacttattttccggctgagaaggagaagaagggtcgctgtggggtgacggtggcgtcgtcggggccctgagtcctccgcgctcaggcgttcagctcccgctccccgaccctgcagggcttccgggctctgagctggacggccccgcagacgctgcccggccccgcgggagtcagagccccgggaagcgcccctgtccttcgggcaacccgcgcggaccctgccctttcccccccacacccgcgaccgcgtccccggggcatcgcgcgcccacgcaggagccggacccgcacagctgccgcctcacttacctcagcaccggggcgccgggctggcgagagcctcgggtgcggcgccggcacagtccgaggggcccggggcggcggcgaaagctccctacttgcagccaatcctggcgtcgaaccccgggctccgtctggcgcggcgctgccctccctcccggcgctcgcggcggctggaaaaacctggcgcgccggagttcgggctgccggctccttagccgcggggcgggggagacgctcggggaaggggagaggcgcgggcgggtgggaacgggcgggagacgagcggggacggggagacgcgccggaggcccggagcccgcgcatgctcagtgcgcggccggaggaggcgagcgctggggacgcagcacctgccccgcgcggccgagaggcggcagccccaggtccccagcgcgcgaaattagtaaagggcgcctggcccgattctcaggcaagaggagattatcagccggattcccgtgcggggacgtaggggttgcgttgttcagcggccagggatgcgccgaggcgatgtctcctccctttacaacccgagtatcggggcacgaggaggcgcgaccttcctgggtacccaaacctctggcctccgggagacgcggaattcgggggatcgttaaggcgccctggccagggaaacagatgcttctgcgtctgggctgaaaattgctgaaccggggaatgtgggtgggcgggtggcattgaacttaggccagaagagggggctttggtaggtttttacctgcctgtccttaggcggaggacactggctggacaggctgcgttacacacctgaagtctcatccacgcaaagtgctttcaggttggaatgtggggcgggggcggggggaggtcagagggaacagttgctgtaaattaggtacaaggatcaatttgtggtgtgttgtgcgcgggggtggggcatgtcgaaagccttgttattcgaaagaatgtgctttgaacgacgttgccacggtcattctacattatgaatctactgtttccttgcagaagtggctcccttcgccgcaactccacacctcggggtaaccgtagagattggcagcaatgccccagcccctcaccagcactgtgcaaagtgactttgacaggcagagaaaagccaacccagtcgaattcgtctggaaagcattccagcaacccagagaggagcctctgtttctctctctgggaaaaagccccaagggttttgctgaacccaggtcttcctgctcatctctcagcagttcagagctacataaacaacttctgaccatttacgcaatcatgtaaacctaccctgacatctccactatgtggaaaagatgttaactggaaaactatttttaaactactgcagtaagcaaataaacatccaactccaacatatatatgcagcagccttattagttcattcagtgttggtttggtttgtttgttttgtcttctgctttttagaattaattattatctttataattcctgttcgagaagtgggcaaaaccaggctagtgataggtattgttgtggtcaaatttttcatcacttgaaattccatgactttcatgattgctgagattaatgctaaataaagaagttacccccccgcccccaccccaccccaacctccccaccaaagtttcctgattacttaaacttggagagaaattttcaggctttttcctccctccttgcctggtatgtgtctgtaatagaggtacttttgcaaaactggaatgttggtgatgcaggtgttttccatggtaaacagccactgaggatcaatggttcccaggttcccactcactttgaaggcttttgtgcttctgccggaactgtgacttttactacctgtactatgtatgatttttttttacattgattatttctctgcaactagtcaattaaaagtacatatatataacttttagtaagactgtttatcaaaatatgcttcaccagaagttctccagaaaatattcctgtgtagtcatgcatactcctaacacattaaagggaaatgtcgtgttttagactggacacagaatttcagaaaagaacaaagaataaaatatgctgtcacattctcccactgggactatac

SEQ ID NO: 315506 - DNA, 4001 bp, Homo sapiens
taagtaaacaagtgaatttgttttcattaaggaaagctacataaaaattctaaaaaaaaattctggtccttcactacaaatattcaaaggaagtaatgcaatgaagtcatttataaatgattgacttttttgctaagatgtgataagttatgcatttatataacctcacataaagctttatataaaagtttccacatttatatatttgaaatctttggactgcacagccatgattattgcttaaaaaaagaaaaagaaaccccactgaaacatcaaagatgaaatgcttctgtatttctttttttttacacaaattgtgtaagtatttttgtatgtttatgtttgttttgtgaacatgcgtatgtttacacatgtgtgtgaaggaggagggaaaaagagtctgcttaaacatttctttccttataaaatacaatgcacataaattggtgaaaccttcaacaacaaaaataaaaagatgataaacccatcagataaatgaaaattgctcaaaacaagcaattcaatattcagcatatgcttcttcttttacagacatcttcagaaaacattgccactgtagataaaattatgaatacctcattttccaaattgattctgtgtgattctactgttcactctattttttctcagtataacttctatttagtcattctgtgaatgtttctcagaggacatagtcaggatgctgattatttaaacataagtagttttcatttggagaagcaaaaactatgaattccaattttccccccaaaccccaatgttacagtatcccattaacataatgggttatacgtggctaatctcagagctcttaaaagttttgttcccaagtcatcaacttctgaaagttttcataaagtattataagaaccttaatactgacaacttaactggtgtaaatggtaaaggaaactccagaggctgttatctagaagctgggtataaagcaaaatgccagacaaaatttggtgagcccatatgacctccagtcttgctttgctccccttaccaaattctcccctaggaaactttataaccattcttttaaatcatccggtgagaactgcaaaccccacccctcatccctttgattaaaaaaaaaaaaaagacaaaaaacatttagcgatcacattttcccatctgccgttacagaaagggcgtgtagccatctgaaagtcccagaattagcactgtcatcccgtcttgcccattagttttactgcagcaaagactagtgaaacactgagaaatatacctgtagtctttctttccctggtttgatcctaacctcccggaatacagattcaatacatttctcccacacaaggaataaatgcattttaaacatcagcatcatagaaacacagcatcaataaagcagtgacttctcccccaaccccagcttttacctgttatgctaatacaaagacattgaaaggaagaaaagctgcagcttgcccagcaatattctcattgcagcagacacagcacaattttgtacttacagatcttaccagggaaatgtctcgggatctttacagtttttctgcagaactctgtttcaagctctcagccaggcatgctgtgcgtccaggcagaaccaagccgtatggaatgtctatgcagctgggagataatgggactctttttcccagctgggactgcaagccttttatccactgagtattgcgtggctcttctctggtcttaagcatgaaatacgctcctctcctgctgcattcctgtcggagccagacaatcagttcttgaggcacatgtgcaaagctctcgtttggaatattcaaaaggaaaattctttctacattgaaagccagctctatcttcatcaaccttcacagaatcagagagagctgagagcagctgccattccagggccatgaaagattaaattcaccctcctctttctttgactggagatagtcactcctgtcgggtcatcagaaaatctctcttattgaaaactgggtcagactaactacttattaggtttccaacaggaaaggaagtaatttttttcttcctctggtttcactgcattgtcatttgcaagcaaagattaagctggtcaagggtctgcactgatttagacagtattcaaatgtaagctttttgaagcatgccagtaactcctattagtgaaggtgaagagaaaagggaaataaaatcaaatgattgtatgcactatcactaaaacctttataagttgtattttttaaatgtgtgtatgaggcttcttaaagacaggtaaagaaagtgaagtcaaacaagtccaaaagagtattgctgctttccgagtaacatatttgtaattccagaggcagagaacaagtgtctatgtgtttgcctaagagctctgtaagaagaagaattgtttttgtgtttcaccctgggccctccaactaaactttttaatatgtttgggtcttgtcatcgggttttgaagggactaactgcttgaaggatgaaaactaaggaataggaattacacatacatgcacactgagactctagtgcatacaaacataactataacatgagaaaagaatgatagtttggacttattttcatgttggcatacaaagaaattatactcttagcatcttaaagtaagtggatactgagaaaatgaaatccccaaatcaaatggaaataagtcaaaagatatttcttggcctcagtttactttcatctgatgagcaagaaggtttctatgactacattttatgactatgtcctatggatttcttcacagggtctaaccaacattataagaggctttagaaaggagatgatgcttcctaacacaaggtaaactcaaaatgggctaccctattgtttctcccaattcataagaaggcaaactagactaataattttatagaaagaatatctgtttttattgcctcttttttttttttttaaaaaaaatagaagtatttcttgctctgtaggaataaaaatatattttatttgtaaaaatgccaagatgactttttctgcagagttttaagaaaaataatcattatgtagtaggctttattttttttttgtggaaagaaattcattcaagcttaaagaatatccctttactcaaatctccaacagtctgactcatattcaaggacagctgattgctttgctttctattttacccaaaaaggaataagaaccagaagaaaacttcaataagctcctgtcactacatctagtcacatacttggcccctgtgaccacagactctcccttcatcttgttacttgaggtgaaccgtgctccctccttagaccaagccatccacctgtgctttagatagtcttctactcaagggaccattctacccacttgtctctctctgtggaatcatcaactctccctaccttctgtagcatcacaacaaagagatttgctgctagttggcccattttaaaaatcagcacccctttaacataccgtcttcctctgtctactactgcatttccttgcttctgtttatagtaaaacaccttgaaggaattctctgtacttactgtctccattcatcttttctcattttatcttgaatctgctttgattagtcttttgtccccactgttccacataagtgtttctggtcatagtcaatattaaattacgcatagaataatgcaatggtcaacttagtcctaattttacttgatgtatcactcacaagtaatacagtttaccaagtactcctcctttaagcattgcttttgcttaatttcttaaattttcttctcgtttactacctgctccttctcagatccctttgctgatatcttctcattttattaatttttaaacactgggggaggaggtgtgggtatcaaggatctaaaacaaggtctgtacactacaggctacacagaattactaaggaaaattaattaagacctaaataagtaaagaaatatgccacattcatgggtcaaaaacac

SEQ ID NO: 315507 - DNA, 4001 bp, Homo sapiens
aaactttattttcacaggctcataacattgctagcaatggctcccaattttactgacatttccaaagttcttttcaaacagagaggtgattagtttttgaaatctgtgaaaaagccttttagatgttttaacttaatatatatatataaaataattaaatataaaatcattgtattgaatgttttctatgctttaacatattaataatagttcaatatcataaccacacagggtcctccggggaactactttaagataatgctagcaggttccctatcaaaaccttacatcctgcacccacccattgaagaaaagggaaaactgagaaatatctgcaaataaatttgctccagagtctccaagtaagtcagcagtggatttagatttcatattttaagttaagccactgaaaggagaataataataacaacacaaaaccattcattcgtcatcaaagattaatggctcaggttctcagcagtgatgaagagcctgcctcatctgaaggagttatttaaaaacttgggaattatcttctctactttaattcatatgaaatctcaggattcctacttattctattggtaaattgtagcactgtaaacttaaatagaaaaaatggaaaaaaatcttgcagtgtgaattttttcttaaggatttttgttcagaattcacaaagtaaatatatatcttccaagatacctaacctgacaccctgagttaacaatgattaatttcagaacaagcagttgaataccaaaaaacaaaataaatgtgatgtatgaagcactacatcaacttatgaagatcctggtaagagaaataacacgctaccagcttggggatcctgagagtacaaaattccctccagcactttgaaagaaccttacctggagacttgcacacagtacaaactcagaaatagttgttgaagctctgagtgctgttcttaggaaatctcaaagatcacagtttcgtttgggacagaatagaattcccacaaaccaagagtgtttagaagttatttttataactgaatacaccccagtatctaatgcctttgactcattacctacacacccattgctgtttatttgggggttcctgcattggggctaggggctcaaatgtaggactaagtgacttctaaggcaatggttctcaaactttagctgcatcagaatcccgtggaggattgttaaaatacacattccttatccccattcccagagattctggttcaacagggttttgtggggtccaggaatttgcatttctaacaagtttcaagggcaaggcgatgctattagtccttgcatcacacttcggatagcactgctctaaggtcctttcgaattctgagtctacctttcagaacctgtcttaaccatctgtaaaattccttagagctcagatttgggggcgtcaacaggtgcaaatcaccagaaaggagaatccttctcacatccacctgtctactcgaggtttcctcccccgcctgcctcaggccccaagtccccgcaccgcatacttacccagctttcccggggtcaggggacactccggaccctggaaaccgcccccaactctccagaagaggctgcaccgagctcctgagcgcagtaaacgcgcgcctctcgggcgcccgcggcgcagttggatagagcgcgcgccggaagccctggtccgcgccgcacgccctggtccgcgccgcacagctgcaggtggattcccgcagcgaacgcctcgtgccctgagagggtcttttaagccggcgctgacccgtgcccttggcctggctcttccctggggcttttaactcttcacaagttttaatgtgagtgtccagagacgctccagctgtttgctggctttgtttcagagaagccgccggctgccaaatgaacttagggagtcagaatttctcagaaaccaagggcaatctttactagcagccgagctgcggtcacttctactacttagacagaggaatcgccatttggctccaagtcccccaatttctcagaggcagcctcccaacgaaaatgcccaaggaggagcaaagtcctgggggaagccctacaagagaaaaagtaacgcacccctgatgctagaggcagcaggagttttatccagcaacttctagaaagggcaggatggggaaatggagcaggcaacacaatgaagttgtgatttttagtacatggatcatagtgaagaacttggaaagcatagactattcttacatgcatggcttattttttgttggtttgcatggacgtgtactcaggttgagattttatattacatatctgtataacacctgccagtaaatgtactcctagcttgagtggttaagttcaatcaatccattgcttcagcctgctagcttcttcaggctgtctgtgaagagatatgttacaattacttacactgatgaaagtttattaaaatgtcaagaggaaacataagacatgggagctcacccttgctcagcaagaacccgattctgagattgcttctgaagttaactagaaagtttctaaatatgtgttagaaagagtgggttggaagaatgaagagagggaagtgtaatgaggactttcaggattttctccttttattattaaatttttttttttcaaagagaacacaaatatgtgtaaaccaaaaactgtttgttttttttgttgtttttcattaataagaaaaaactgatgtaagttgaaaatggtttttctaaaaaaaaagtgtattttatctattttgaattcacttggaatagtcagggttatggggtgttctgcacagaacatcctgaaatcctggatttgaatgccaagacttgcccttcggtatcagtgagtctcagatttgtccaggttttaacggaaaatgttccattggtcaccagagtgaagcacagagagaatctatgggctggaatatcaagaagctagagtctggggggacaaaatatacatctatttcacattcatgcctggcccaggccgaaattttgctactatgatgtccacataccctcagtgtgtaaagatttattaattgagatgttcttccccaaccaagagtaatgccccaagggagaaagaaggcctactttatacttcaggagaagggtggggttttgccttcacaattagggtaatatccaaatagtactgaagccaaaaggaagttgtgggtttgtgttttgggggttcttttgttgtttagaaacttctctagaaagtattattgtagaaatttttttacttgcaatatatttgtgatttaactttcacaatcatgaaataaaagtggctccaggaatctacaacttttccacagattttaacatttcctttcctttcttctgcttataaaattgaaacaaggttttcccaaaataaatcataatgtgaaatttattcactatttagaattgcatttattctattaaggatatattaacttaatttacttcagaaagtagaagtttggagtttaatatctgaaggaattcaggcactaaaagtgccaacttttcaattttctaacagaatagaacacaattgaacttactttatctgacttgggtttcactttccattttctctagaaaataaaaagatattgaataaaagaaaagtaatccagaatttcaaaagtgtggaaaagacattaaattttttttcaggcttcatcattagttatatttgccttttattaacccaaccttcataatctgtatttctgcagctgttttaaataagaagataacatcagagtaaaagatagcaaattctgctctaccctgcactcgttgattcccactgggaaatattgatggtatgtctgcaaatgtgaaaaccgtactatcagaaataggcaagatgattttggatgtgagatgatttaaatggaatatgattaactttctcattgatgcaatcagaactattaaaagataaaatagcatttttcttacatgtgactca

SEQ ID NO: 315508 - DNA, 4001 bp, Homo sapiens
ttttagtttccattaaaaatataagttttatataggaatgtaatactttgcttaacctttaaagcttcattcattgttagattcaacactacttatctggtactacatttttacatgatatagaatcattggattcaaacactaactgttgtttagtaatggtctgctggtttgaactcagagctctctctaccttagcataagatccatttcttgtctggggtagggagggaagtatatgtgtggtgtatgtttaaggaaatacagcataatggaacaagtcatgaacaccctgactttaccttcagctaactctatgagctctgtcaagacattcaatacacttgggccttagttttttcttctttaaaataagtagattcagccgggcgcggtggctcacgcctgtaatcccagcactttgggaggccgaggcgggtggatcatgaggtcaggagatcgagaccatcctggctaacaaggtgaaaccccgtctctactaaaaatacaaaaaattagccgggcgcggtggcgggcgcctgtagtcccagctactcgggaggctgaggcaggagaatggcgtgaacccgggaagcggagcttgcagtgagccgagattgcgccactgcagtccgcagtctggcctgggcgacagagcgagactccgtctcaaaaaaaaaaaaaaaaaaaaaaaaaaaaagtagattcaactagaaaacatctaaggtacctcctcactctgagattccaattatctaaaatggttactaggtaagttctaatcaaattagaataacttcaatcttttcctttctacactggctgggaaaccagctttggcagacctgtgtgttatttcattccttttatggccatctgatcgaggcataatgggtaaaataatttcttgtcttttaaataacccaaatctaaccactctgagattcttttcatgattatacagccagcagcatctcaggggaagaaataagtgagagtgtatcaacaccttcctcccaaagaagcctgaaaccctgtgaagactgccaggggagccctgccgtgggtggcttgatttgtgaccaccagtgactttctattcatgaatgaagccctacatcttttgtggagaaaggaaatgtagatgagtggcacataaggcggactcaggttctgataaggtccatcactacgtctgaaccatgaaacaatggaggaaaaatcatggcttctacttgagaagctcaaggcttagagatacatcaaaggaagatgtttgcagggcaaagtctggtttatgtcttcacaaaacttgcttacaaggtcagtgtcctcgaggaagttgtaaaagccaatgtaagttgctctggacaagaaccaattatttaggagatggtgaggtggttaagggtgtgctagtgtcttaagtccacaggacagagattgccaacagacagaaggcagtgctatgaagctttctctccagggaaaaagcactttcttcacaataagcagccaaataatttaatctggagcaaatctggacactaaaccaagatacccttttgacacaaatgaattaggatgggacattccaagttttccaggcctgagcctaatattaacagaatttttatgcaacctcccagaagacctaaaaggggttgaagcaggacaaaatgacagctctcatatctattattaacaaggaataagatccagaaacaaatgatcttcaaaggaatatggagtgaccttacaaagaatttgacttaccgcccttaatctcactaccatcaaaatcaaaacaaagtgatacaaaacttgtaacttttaaataggtcaaactcatgtattatctattttctataatcaaaattaagaattctttccagtttttccttaccggaatcttggttcacagaaatatgggaacaaattatcacgaggaacaaaattagcaacatcatattatgacctgaaaaatcttcaacttcaaatctgaaaaggcaaaaatataaacaaattgttgtggatattatttgggaattaagactcacatacaagagcatacaaaattatataataaattgggtgtaacaggggacaaggaatttctgaggttcactgaccttctaatatgtgaaatgccttagagaaaacaatccatcaatatttacaaagtcgtaagagtttttcttgtccccagacctagtagaaacatgaaattttggacagttggtagaaggagccagatggattttagtgctaacaatattacgcgttcctagtatttattttcctgtaccctagcgccatcctctatctattcattgctaagacaattcagggttcacagttaggacacaccccaagacctatttcataatctcgccatcatgaatatgtaggtgtactttatctttgaagactaattatttttagatgtgatcaaaattacacgttttttccttttcctccctaactgaaacagtagctatttcaaaacaagcagtgattttccatattccatataatgtcttgctcctcagaataaggagctcagcttacaccattttatgtccaacttcccagaactgcatgaggcaagggttttccaatctcattttggcctaaagcattttcagccaccttgaaatgttcattttatggaatgaagcaggatattaaatgcattgaaaataaatatttaatgaagcaggttgggcttattttttgctcatttattaattgaacaaaaaatgaattgatccattaataaaccagtgtctccatgtcctgcttaattgtgcaacactatatatgtttatctcaccctataccaggcaggctctgagtttctaatattcaatctcttcagaaaagggacatttatcatgagaagttccatccctgtttcctcacctacatcactgtccttctgacattctgcaacttgagactctcttctagtccttcacaagtctagacgatgtagagttttcagtctgtatataaatttattagttctattcaagttgtaaccagtgagctagaaaaagatgtcaggaggcaatgtgtagtacaaaccttttcattttagagaaactaagtcccaaagtggatttcccgaagtgaaaaccaagtcataccatctgtacaatttttattaatgtgtataacaataaataataaattctgccatttgttgagctttcactatgagccctgccctgtgccaacagctttacatttgttctcctgtttgatattggtaacaactctagcagcaggtattattactattcttgttcttattttgcaaatgaggaaacagacttttaaggggaagtaactgatgcaaggtcacattggtaaagtgagccacaatttagactagaacccacatctgcctgactccaaaacctttaaaactcagttaccctgcagattaaactcaatgttatgaacacaaaatgtcttctagtttcttcattctacatcttttttctaagaactaagagactttggtacttgttttcatacctttttatttttgcttataaaaccagggttttacactattttcttcctttctgtttatattatgagctttataaattattgtagtcttttggagttatgagagagaaaatgctttgggaagaatccatagggccaatgtcaaaagtttgcaaacagtcacaatgggaagaaatcggtattgagtgaaggatgaacatctggacagagaagcgaggatttggaaaggctacaatagtcccaaagcagcatgcagcatctggaaatttccatatgcagatgtcaatcaatacctctagtatttactcaaaagttaagttctctggattagcatcttgtggaacaattttcttgcagtctttcaatggaatccaaagtctagtgtgctgtaaggctatacaatgttgaagcccggtgaagcgttcttgaggtgtgtgtgcctgactttgtgtgtgcat

SEQ ID NO: 315509 - DNA, 4001 bp, Homo sapiens
agtagtgtcctcaagatgctgaagtcattgacgaagaagaagaagtcactggtgggctgtgaggcaactcgcttcagctcctcagggtcagcattcttgatccctgaagtgacgacccatcaggactcagtcacccacatgctctctgactgcccccaccccccagctgacctgtcactcctgctcggtccttacccacagcaaatagcttgaccccctgccccttcagcctttgggcagctgtgtccaccaggtcctgggacttcccgtctgtgatcaggatgcagacctgggacaggtgcaggggtcaaatcacggttcccctggacacttcatttggggtcatcttgggaggcatggtaggggtagggatcaccttggggacaccaggtcgggccagctggggcaggaagacatggtcagccacatggagaattgcagcccctgtgcgagtgttgccccccttgtagctaagctcacggatggcgcggatcacatcacccccagagccaagtgcatccaggccgaactctgtcctgttggagggtaggggtggcaacaggctaggactcaggatctcttctggccctggccttgaggaggcctctagggtgagggttacgggtatcaggctctcttgaggggtcccttcgttctgtcattctccacacccacttgcctctggaacccccaggttaacaaactccccaggggctcctttgtgcaccatctgcaggtgggcctgggcagacctgaaggagcccttaggggctcacagtctgtggggaacaagatgctgcttaattaaataattgcaggaggaggggtccagatgtaggaaagtggatgctggccagatggagcacctctggtgaacggctgcaagggttagagggctagaacgtggagaatccaacaggcgtgggggccccctcctgggctccccatctccagatcagaaaacacagcctcactgtcttgcaccttcctgtcttgcagtagcctggaggtgcctcagggcacgaaggttctacctagggaatccttacctctgtctccaaaggaggtcctggctagggggtctctaggttccccaaaacttgtttctgcaaagacctggcctggggtttccagggtctcctccctctctggggaaggagtcttggtggggatctcgtggtccccagcccccagggcccctactcaccgtgggtcatcgctgtactgcactgtggcaaagcgcacaccctgtgcactggctgctccagagaaaggcagcaccagcccttcgagaaagctgcggacctcgcggaaattgctgcggccaatggatgaggagccatccagtaagaacacaatgtcagcggcgtaaaggcgcgtgcaggtcactggggcgggcaggagagatcagggcctcttctgggaggccaaccacccgcctacccgcacggtggcctcactgggacttgggatggtggggagagtaggcctcatcttatgcaaaccagggccgaatcggcctgagcctgagggccttggagggagttgagctcggtgggtcccagagcagactcccgcggagggttgggggtgtgcgggggagggagagtcgccagcacgggtgtggacttgggactgaggtcagcctctaggggccggcgtggattggcataaggcaggggaccccgcacgcatccagggagccagaatttgggtaggaacaggataggaggcggtttagggaacccagcaccgatcgcggagggttcggggagtcccagaattaggaggaatccgcggggcgtcgtggagttggctgggttgtgggcggggggtgttggggatgaaggccgagtggagcggagggtggcacggtgcagtgccccgggccgggtcctcccttgcggtgcccacctctctccctgtgctgggctcgcactcggggcgcctctgccaggatcccggcgcagagcgcggccaccagaagccgcagcgtcatcctaggcagtaaaagccgtcagctaggacccccgcctctgtcccttgctcccccgtggccttggcaggtccgagcccagcgcccctccagcccgagtcctggtcttgcctgcgcgtccgcccgctcccgccgccgccgctgcagtctctcgggcagagcagagaaaagtccctgatctcggggggcggagcggcaggcgggaacccaggcacccgccctcacccatatccctgagaggtcgccgccccccccacccctcccccagacaaacgatatgacgcacttaactataaaccccccgaccccccgtggcttctgggaatttcccagaaggttctgcatgggcagatgctgagggagtacccctaactccatctaaggtcacaggtcttggctgctttaggtcaatcacagtgaccaggctgaggagtggacaggttcctgcagagccacaaggcagcagcgccgtggggggtggggctgcagttggggatgactcacccccaatccagtgggggtgcccagacaagccctcaggccatgggtcccgccggccactcctgtgattcagccatctgtctggtgggcctcctgggccccacccggatctccttgacaggcaagaagccctggcaaatgagtgactctgggccggtcttagggaaaccaaggtccccttggcctggatccaagtaactcaccccctctttgtaggggataagccggaaggaggagagaacctgtgtcatgcttatgcatacatcccagtgtcccacatcccctaccatgtcacaggcagatgcaatccagctgtgcctgcagggagggggccgcccatctgtggagggcgggaccacccacagtgacagctcatctctcaggaatcgagccctccatgccccaggccaggtccccctacctacatgtcctcacccacaggcatcctctccttccatctacttttcttgtaggtccctgccacccatctcccctaccaggccgaggtccccttgggccccttcctcctttcctcactgccctcatggtacctgtagcttccagcttcataactgccccctaccttactcctgtccccttacccaggctgacttcacaccctcccccagcttcgcttctgaggctgtggacagtcctccaacacacaccacgccagggccactgtccgaaggaggtggggctctgtatatgcatatctctccattagatgggtgacactaaggcagagaggcactgctaagaagggcaggcccccatctgggtcctgctccccctttttttcctgctaatcctgaataactctgggcagcccagaaagcacatctatactcaccaaggctgctgggccccttctaatatgcccggccccacagcctcccctgggatccacagggagatatggggacagcactggctggactcctccacagcccgaggactctggtgtggccagagctggaggcagtgaagaccatccatgctgcctgctttcctattgcccaaggaaggctggggctctatcccttattactgaccccccaaactatcctggggcatagtgctatgaccttattccaaggtcagggtctcctcagccatgtcccaggaccccccatccctgcaaggtgtgctccaggtggggggctgcagagaaccaggtatgttatcacacaggcagccccttccccctaagactgtcacctcctcccgtgcagccagggcgggcaagagcaggccagtggcatggacagtacggtacagacatatgtgcacacgtgggccagtcttaggggagacaggaggcccagctgggagggtgggtgctcaggcaaacctcatcagaattgaggtgcctccaaaagaaaggacaggctgctgtgagagggtctctcaaagggtgctgggagaggctgttgagaaggtaggagtaaggttggaatgactccacgtctggagcttctatgagactcacgagcaggagtgt

SEQ ID NO: 315510 - DNA, 4001 bp, Homo sapiens
tggtccggtggattaattgccagagaaagcagaagtaaacccttggagaatacttttatccccaaacttaggaataactggaagctcatttaaactgggagcatttccccctccaccccaagaaaagataacttccctcaaggggatctggtgaatgaagcagcgtattttcatccttgtgataatgggtgtgagtcaggcactaccataaaagaagaattaacttgaatgtgccacatacttggtctggccttgtcccatacctgtactcttgtcatggttgattacctatgtgcatcagatataaagcaagcagtctgcattgtggcatgagataaaaggtatgttaatatgctcaggtcacatactatcttggccaatagtaattttatataatttgcttaaaggaaactgcacttcttgcaatatttttttccaatgaagaaaaatttaacgtgacagaagctttatatataactcttgcatttgagtaacagcattgaatcctctccatctcaagcagaacttttaaatatttttattacttttgatatgcaaaagctaaggagaaatggtttggaagacctaagttaaatttctaatgagtcttgtttctttaataggggagaatttcatacagcttcggtgagttttttctttccacatgagataatataaacaaacaaaaaaataaaaaagtgaaacatttctcttcttactttaagaaccttaagggctaaaagagtggtttggtttcctgactggtacttttggtttgccttctctaagtggtcttgagcaattccccagaggaaacatttgaagagggtttttctcccacttgagagagtttcatcccacacaacccacagaatttgatggcaaacttcatggaccaagtgtctggttttacagaagtggctgtggagtatgtttttcctttcacaggtgcacatttattctaccttaggaataagaagagatcattttcttttaaagagggtagcttaaacactgaatatctctgataattggatgccagtcaggtaggttgtgatttactaaatgcgggggaaaaaaggtggaaagaaggattaaaacttccaaagcctttctcgctgatctttctttacaaccatctggtgtgcacagaagtattgtataatctggcctgtattattctcttactgtgaaacatattgaaacactttatgtttaggtgtgtgtacagaaattcatgaagttcttttatacactttcttagttccatcgtaattctcattttaggatgtcgtgaaaagatagcctggtgagagagcacattctaccctggcttgtgaatttggatttgttccttcctatctaccagccacctgattacttactgtccccgtgcaaagggcacccgttcacatcatttttttccaagcgctaaaacctggaaagatatttttttaaaggactcacagaagctgtcttgggggtttggaaaacatcacaaaattgttagcagaccttttgactgtgctatttttaggaagttaactgtgttcttttaaagtacatttttgacaatgggacaacgttttccttgcccccactgatgtgtgaaatatgtacagtgaaaaacgtcagtacaacaccccaaacagatacattttaacctaagcaacagtcagcaacaggagaaaaagtgatttaaaaagagaaaggtttcgcaatatttatgctgctgtttcttccctgaaggagcttttattttaccattcaaacagaagtttgttttcaaaccagttgctagttaaaggagcagcggatcgcgcatccgtaagaatcagctctaaccaaacagcaaacgcgttggccagagggtgacttattcccccatagcaacccctggtaggtgagctgcctgcagaagtgctgtcttaccttgagcacgtaagatcagggagagaggctcgctggctcccacggagaggatcggggaagggctgtgatccgctgctggtaacatgcacttggcttttatgggcaggtgggaggagctgctcctcatagtaggtgggcagggaaggagcggcgggcgggcagcctctggaggagctggacactcttctctggggaggggcgggcagagactggagcccgcaaggcggaggagagacgacggggcggggggagggggagcgcggtcacaacggaggaaggagtggaaaagggagagagagggagaagggaaaaaagagagggaactagaaatagtgaaagggatcttgaccacagatggggaaaggtgggggagaaaatgaatagcagagacagagagagagagagtgtctgggaggaaaggggaatcggagtattttccgtttttgcatgacattttttggcagagggagttgtgggtgattgtgacttttgaaggtgttttctgtgaatttgggaatttgaaaagctacatagcggtccgggagaactgaagggtttctaagcgaggcaagggaggtgaagctgggcgtccgggcagcagagccaaagttcagggtggacccggacctggagctggaggcactgacatggcctggagccaggcagcccccagccctcagccccgtcccaccgcccgcgggtgaaaatcgccccatccctctccctccaggcaaggcttatttgacaaggaagttcctgcgctgcctgtcctctgagcatccagaggccccttttgagacttcggcagcattaaagtaaatccagcaacggggaggattcgcgtggacttgcttgtggagacaggaacctcagaaccagcctgggtcttccagcatctgcttatgtaacgtaggatttcagagctctctgccctctggttattttcggtatttaaaacactctcattcctaacaatcggaaaacgtcttggtgccacagttctttctcagtgtgtcttaaacattaagagaggattcaaccaacaagtggctaaaggatcagtctgaaattactaagaaatgcattcagagaaagaaaaacaagctcctttcgctgctgagtggtgactcacttcctagcccaagcctgatttttgccaccaaaggaattaaagcattttaaaagagaacctgagacttggggtgggagatacagtaccgggagggggaaaaggcgggaatgggaggggggagggatgggtaggctggaaataataaaggaacgaacttgtactgaatatgtatatatgtacttcattcagtgttcaccgcaaccttatgaggtaggtatgattcatattgtgcagatttatttattttttttttaatttaaagaaaggcatctctaagggtttaaataactagctcaagctagcgagagggggagccacagctagcgagcttgcaaaccttaggcactcttcagtacaccaggctgccgtatagaacacctaggttcgtctcaggttagatcctgatgtcattggctggtagcaggctccaagagaaggaaacttgatggtgaagagcagaattactcaaacttagcactactgaaactttcgggagaatatttctctgttgtagggacctctcctgtgcactgtagaatgttaagcagtgtccgtggcctctacccaccagatgccagtagcagtacccactccgcactcgccacccagctgtgaaaataaaaaatgtctctagatttagccaaatgtcgctgagggacaaaatcccctcctcttcttaagaactattcgtctaaaaaaggcccacaactataaaaaagcattttaaaagaatctattaagaaaatacccagtagtgccatttggataataataatacctacgtccatatgtgccgagtttacacagcacttaggtttttacatacgtatttccatctgttagcttcaagagctcaaagcctcaattacttcctttgtaactaagcttattctcaattggttacgtctgggagtcaacgaaataaactcccatgtgc

SEQ ID NO: 315511 - DNA, 4001 bp, Homo sapiens
gcaaagagttcaaaagaaaaccagaggttcttttctctctagttttctgaactccttaaccactttggtgctatttaaattaagtaatacaaaatgatggtaaaccccagtttgcagatgagaagcttttattcattcattcatcaaatatttattgattactatgtgccaggcactgttctgaccctgggaaaacagtaaagtacaagagagacacatgccctggccacatggtgcttatagtgtaaggccactgtctctcagaagtcagggagctcatcagaggcagggctagaaccagaaaactgagtttccttaagtcctaaccttcagcagattctcaaaggaatccatgacccaaacatgattaagaaccaccaaattaggccaaattaactctcaagcttctcccttgaactggggaatgaataatgactactcactcctagaagaagcttgatgctcttaacttgaatttgcaggggcatgtgggcacacacccacggtgacaccaccactcacctttcctgcccaccctcctgaattctccacaaatctgcccccacctccttctgtttctcacacttttataattagcctcacaccagtctctgagtcactccctcatggcccacaaacgttggctacacaacttgctgatgagctgtttttatcaatggacagcagttgggagctggattcagagatgtgccctctctgagagcctggcatttctggccctccctgtgtttccagcaaaggcagcgatagtgaaatttctgtctcagttgaagtatttatgagactcatgttggaggcataactaaaactttgctggggagagtcaggggtcactgaggtgaattgaggggggctgtgagggtctgcctgcctccttcaagccctccggaaacatttgagtttcctcagaaaggtttaaataggccatactagtaaccgaatacttcccctgctctgggtcagacaagacaagggcaacaggctgctgacctcagaaaaggttgcaggctggcagacacagccccttccccaaatctcccagcctcatacccggcagacacactcagctccagacctggctgtcactgtggaaccccctccacttctccctggaaagctcacttctctcaggacctccagctgccttgtctgaggctgaagggaagtcgcacccaggaagacaggtctggagaaagggaaaacctagtcctgaggctgcaactgccccgccgctgttcaccccccaccccaccggcccctgccacctgcattttcccttcgagggactattgtggccatggatgctatctgggtctggaaagaggtttgtttactccacaacagcccctgtgaggcaagcccccttcgaagaggtcagagatgtatttatagaaacatctgagactcacttctctattacttgcacacctctgtctcttttaagctctcccaaattcctgaccaagatgaaatcatgcagcaaatggggagaataggggaggcagaaaccatttttcaaagtgtctctgctttgagcagccaggtaggagccggttggaacaaggacagaaggggcttccgagacaagctcgggtgacaggaagctgctggggtggccgtcttccttccaacctccctccaccaacagttgaatggcaaaaacatcaggacacattgcaaaacaatcttccttcctccccctgtcccctgacagatggaagagaggaaagttgtggccatcatttacctgctgagattggaagaacgctgttgatgaaagtcggctgagacacgatagagaggaagaaaagctgaagataaattcccaaagtcattggattcaggacaaccatgctggccagggtctggcgagggtcaagttagaaaggaggctgctgcggagccttgcttatctctgcttttctcttcctcactgctgtttgcgtgcgcgtgtgtttgtgtgtgtgtgtgtgcgtgtgtgtgtgtgtctgtgtgtgtgtgtgtctttccctctttctctttccctctccctcctcctcaccccctccctctctctccctcccccacctctcctgtctcccatgcctttaccaagaaagaatgccaaccatttcccattaaactgtctccatgctacagagagttatatttatctcaagctccatatcaaatgcccacattaaaattaagatgtcaaaattttcttttttggagactgaggtaagtggctagtgaagaggtgatgagaaggcagccaagtctcagatgttcactggaggcagtcctcaagggcagagagattcctaattggttatgtgccaccatctacctccttggaactgggcagaaacaactctcctgattcaaactgaatttcatggagaaaaacccctccactgtcagcctgtgacatttttacccattgtgtaacaaatgtaaagttaacttttaatttttttctttaatcatccaataaaaaggaggaaggaagtagtttatatttccaaacagctttctctgtgaaaaagtgtttctctctccaaaagctgcaaccttttgattcaatgcaaggcaaaataaatgaaaacagtaaaagtatagaaaagtgaatgatttttatcaaactatattcagaaaaataacatcactaacttaatctttggctagacaaaattattcaaataaaaattatcacattcttaataccttttatgagtttataaaagcctgttatagagatgattagatgactaaaacaaaataataattcacagagttgttcattttgctttaatttacatattacatgcctcataggagttaactcagaaacagtctgctagttactggatgctggggtgggcatcctgcccctgtgctcattatggggaaggtggagttgggtcagggcgtggtataaagtgatattttacagctgtagcaccacacttgggcttgactctcagctctgagtggcagtggacaagctcacctctctaagcctcagttttctcatccatacaatggagacaatgttccctttaaaggtttgttggaaagttaagtgaggtaatggggatgaatcctacacggattagaacttgcacataggaacagcacaaaggagacccaagggagccatggtagcctgggtgcaaagatggcctccaaaagtcctcccaacccagtgtgtgcatgacactcttcccagcaaaaagcagggctagttcccctcccttaaatctgaggtggctctgtgacttactttgaccaatagaatgtggctaaagggacactgtgccatctcctggcctaggccttaaaaggcctggcagctcctgcttttgccttttcttgaaaatcagctgccactttaaaaagtctggactattgaagaggccacatggagggggaagcagccagcctccagctgttctgactatcccagatgcagcatcaacaggcgagtgaggccattttggaacatctagccctgtcctggtctcagatgatgccagccacaggagtgaccccaagtgagaccctcgaaagaactgcccagcccagattacgaagtcatgagcaaataaaacggctattgtttcaaaccagtaagttttaggatgacttgctcatcagcaatagctaactgatacagagttgataaggaaagcttttgaaagcatgaaaaatatacctgaactacattcaaaatttataggacagattaaagagagggtacccccatttagctgctcccaaaatttttacaagaaggagctgtgattgctggccaaactcaatcaggacattctcaggctcactcttgttaactcctggagccccagcagccagcttccagtggcttggagaaggtacagtctacctgggaggaaggtatcttttgagtaacttggtgtcagaatatgaatttttactatctagctcagattcctcctctgcaaagccagtatgacttc

SEQ ID NO: 315512 - DNA, 4001 bp, Homo sapiens
tctccaatttactcttggaaagacatggatttgattaaagagtgttaagtctaggtgcaagtggccatgtgagccagtacaactcacttactcaatctgaaacttagtttcctcatctgtaccacaaagagttttgcccaaatcatctccaaagtccttttgcctttttttttttttttttttttttttgagacgaagtctcactctattgcccaggctggagtgcagtggtgggttctcagcccactgcaacctccgcctccagggttcaagccactctcatgcctcagtctcctgagcagctgggattacaggcgagtgccaccatgcctggctaatttttgtatttttactagagatggggttttgtcatgttggccaggctggtcttgaactcctgacctcaggtgatccgcccacctcagcctctcaaagtgttgggattacaggcatgagccactgcacctggcctcctttagtccctttttaaaataagtatgacaccagaaccaccactgtatccatcttcatctaccctcttgcaaggccagccccacaataggttactggaaatagccatttccatttctgccttctgtttttccatcaagtagccttccctcccaccccctcaatccaacaaatgtgtcattagaaactgtcaaaggaaagaagtgacataagcatcctgcctcagcaggttgagagaattacaagtgcagccatttaactgttctgcacctgcctgtccagttggtggactagtcagctttttacttcctcctcctcttttggggcctttccctgcctgtgggaacttgcatgagagagacagaccccaaagaagagagaaagccaagggcacacgctgtatggcagctcagagtgctttgactttattgtagtgagttgggtctcagctacagtaaagttcttacattaactgaatgcaatttgcccaaaattccccccaattcacatgttccagagaaggctgcaccctacaattttccttcaatccccacaacaaaccttgaaagacaaattctgatcctaaaagttgcacgtaatttgaacttctctgaaagaacatggtagagtttgccttctgctgtatgtccctgagcaggcaaggatacaacctacaaagaacaatttgtggtttggtggctgtgcctctgagccaaattacccaaggcagtccactcaagagtgatggagactgtctcagccacccaacgccagcgggggcccagactacagaacacgattttacttcaaagccaaggtaccagctgccagccaaggtaccagctgccagcacaaggtacttgtgtcagtcaaggtcacaagagggacacagacaagtgcacacacccgttagcatgtatgccaggtccccaccaactctactgtgaaacccctttgcattgcaacttcaacactggctgagcagtttaaaatttaaaggctttcacaatgagaaacagccctgtgaaagaaaaacttaaaaagaaaaaaaatttaaaggctgctaaaacctcctagtacagtctgctttccaagagtcttttttccaaaacaatgcatgtgcatccacacacacacacacacgtgcacacacgcacacacaactcacccaagcagcctgccgagtaacagagcagtcctgaaatgatgagcagatgagcgaggctgaatgatgagcccgtcattgtgaggcagggcccaaagcggactggccagggaacactagccggagacaggctgagattcgtcacgcctctgagtgctcccagtgcctggcctgtttggcattaggggtgggagttggccaatccctgctttgatgttgcttctgctccagatgccaggggtctggagccagtcctgagctcctgggagtagcaatgggtaggcagccctgctccagctgcccatgaacactgctgtaggggaggcttggaggacaagagtgccttcagcccaggggaggatatgaggttgggagcccagggatacttatccccctgcaagccaagaggaaattgagagcaatcaaacaggctgcttttcatttggctcaaaaaccgacttgactcaaaataccacagcagtattgactgctctggtaagcctcaaagtcaaccccccaccgagaccgtccaaggggagcctgccctcctctgcttcagggaagaccttcatggccaggggtctcagctctaatcctgtctgggccaaagtgttgctgacaaagctaaacgtaactaaaacaacaacaacgaaaccacaaacaaacaaaatatatagatttccaaagggcatgtaggcaagtctttttggatgaagcggcatataccagttacatgcttaaatctatctggtactttataggcacacccagtgcacaagcatggacacacacaatattttagattataaaagacaagattattattatactacttagcaataagcactgttgttttgatcagcttagtaaagaccataagctatagcaggagtcagcaaacttttgctataaaggtcaacatagtaaatatttaggctttgtgggtcacatggtctccgttacaacctcactttgccattgtacaggacagcagccatagacaatacatgaaggaatgagattggtcatgttttgtaaaagtttacacaaatataggaggcaggctggattcggcccacaggctgtagtttgccaagccctgcactataaccttcaaaagaaaggacacttatgttcattcattcatttactgttttattcattcagaaacacagtaagtaccaaattgtgcaagacataatgactagacacagttcccgcccttggaatgtgtcgttcagtgtcacgggaagagtactggccctggagtcatccaagttgggcttaagtcctggttttgccacttagtagctgtgtgaccttgaggaagttattcattctttcggagtctaagctttcttacttataaagtgggcgtgcaaagccgactttgatagtttgctgtgaggattagagctacagcttttggaattcctggcaccgaataagggctctcttattgacatattcttggataactgttgtataaggtaaaaaaagaagagtggctaacatagggcagggatgcctgaagggatttatagaaggaagaaatgggtaacggttgaggggtagagggtccaagtgagatatcaaggaaggattcctggaagaggtgggatttgagctgatacttgaaagcagagacttgctatatcaagatgggaggagtgggaggtgaggcttaggctgtgttccttctctggggaattcccctttgtccttctcagaaactgggtctaagacctcagagaaagtagcaataaggccagggagtcctcagtcctgagtcctagagagttgcagaagtatctgcatcacattttcctgactttctctattctgagtcatattcttgcagctcttcatttttcaaatttcatttcgcaaaccttcagagatggaagttttgccacttttcacaccaaaagcacttactgtgttttttttaaccacatggcatcaaactttttctaaaaaggtttgacatatgtaaaccactcagctgtagtttgtttcattattgtaaaaacaaaagtagctggactagatgatcgctggggtcctgtccaacttggcaggtgtttgaatctctatttgaacctaatggttcaggttcacgaatatcttctgcctcttctctgtgtttctctccttctgctactctcttttctgtctctgtctttctctgtctctgtgtctctctatctataactttgtctcattctctggcattgtctctgtctttccaagcatgcaccatttaatttaagtcaaatttctggatgtatgctcaactacttttaattgctctccagccaagtgtgccagcctgggattaagagccctggtctttagccctggc

SEQ ID NO: 315513 - DNA, 4001 bp, Homo sapiens
ttgaacacactgaaaataaaagaaaatgaatgatttgtgaaatggcttaaaaatgaacattaaaaaaacaaagtttcaaaccgcatcttagttaaggtggtaaagaatacaataaacaggacacaaacctaaaataattcttatattctatgttaagttaattttaaaaatgctatacctgtacatctagtcgccattcaaggttatgataactgggaaggcttggtgccaattcactcagaatcgttctgatctcttttctgttgtccagataaagctgaagcaacaatttgtttaattcttcagagaatcccagaacaaaaacagagtcttggaaatccagttcagaaatctaagtgaattgagtttaaaagaacatcaaaatttatctttgtctagctaaaataattgaaatacacaaaagaatatgatatcctctaatttattctgtctagtaaaagaaacagcattccttaaccactgaccaccattccaaaatctgtgttaccaatacataaaagtactttactaaagtataaaatggaaaaaattgttaagatgcccagtttcccttcctgtccttcatcaagccagatactgctgatacgcaaacaaaatactgatacagtctccctcctcttatgtatcttcttaagatacatatatggtttaacaacatgcagaattagaggtacttctatactagctatttatactagcaagaggtattcatatcagcagatgatatgatttttattttttaggtatgtcttcaaaaaatcaattataaaccattaacaacattattaaaacacacaggtacctgccaggactatgatgtagagtacaccagaccgttcttaagaatccagccaacacaaaacagtccagaaaatcccttaccatgagctttgagctctcagtgaggagatacgttaatccttccacaccatgctggacagtgtcactactcacattgagttttcctgagaaagaaaagtaaaaacgagcaaataaattactactgtagtatttatcttgttcatatttgtatttaaaaataaacactattcattattacatgttttcaaacactgcatgaaaaacagtaagttggccagaggctcctgctccttgtcattccactcccagccaaatgcctttggtatttcccaccaagtaaccttaacaaaatgcagaactgtggagactagtatcaggtgcgtagcccttctcttgaatacgtagctccttcaagtctggcagaagaggaactcgacagggattgacttaatcccagagactgcctcttacccaggggtaaaacaacacttttttttttttttttagcaaaagcggatatctgaacaactaataatgataaccaaatacttgcaatttacagttgacccagctattccacagactttggtatatttatacaaaacacttttcagtatttctgaaagtaaggtggtattatgtacattttaccatgagaaaactgatttaatagaagctttaacaatctcacagctacttaagggacgggcaggatttgcaccctgactgaagagctctgctggttttattctactacaatcggaacaagaccctaggactcgcaataatccgtttctctcccgggagacagggaatggctcgcaaccgccctagaagcctgcggagccttcccctttcccttcttactggcggcgccttcgtagatttttgggtttgcgccgcgtctcaggaattccacagcaatccgcccaaactcggcgaccactgcaatgaaagtcagaaggctgttgagtgccaggcgctgcctttgacctcctccccagcccacagaacaccgcccccacgcccgctgacccgcgctgtccacttgaggcaggaaggccaggtgttccttatgctcctcggacaattccagcagcatcttcactgtcctacgatttcacccggcagcgccgaccccgccttcgccacttccggcgcccgtgtcccggcgcctagaggctccggcgtcgcagcgtccggagctttgggttccggcctacgaactaacgcgttacactcggacgttccctgcagcgcaggctgaggtcagaacattgaaatcatcccgcaaagatgcagtgagcgcctgctgggtgcaaggtgctaggctctatgggagatgaaaaggtgtttcaaatccgacacgccccctcgtggagcatacattaataatatcaatagttcacatttgttaagcactaaccgtgtcaggaagtgttcttacatttattaaatacatttggagttcagaagaaccctatgaggtaggttccattataatttccattagagataaggaaactgatagacaagtccagcaactgacacttttataaagctaatagtttccagagcttctatgttatcttaaatgtatctcagttaatatcctcaacaaacatggctttgtttttacagataagacacaaagctccagagattatgtgacaaagcctgtgacagagttagatggagagggttggatccctcacttacctgctgcaaagcccatccttctacataacagcctgaaagctgaaagcttctgacaagttttatgagtgattataaattaggataaagataatgatgacaatgaccgatgcttacaggattcagagcaatgtttttgtttgtttgttttgttttgttttgttttttacatggagtctcgctctgtcgcccggctcactgcaacctctgcctcccgggttcaagcgattctcctgcctcagcctcccgagtagctggtattacaagcgcccaccaccatgcctggctaatgtttgtatttttagtagagacgggttttcaccatgttggccaggctggtcttgaactcctgacctcaagtcatccagccaacttggcctcccaaagtgctgggattacaagcatgaaccaccacacctggcccagagcaatgccttttaaaaagtatttagcgcctgtgataatttagttccttttccaactctcttctcacctgctgtggttcaaatatcagagatgataaagttgctaattgataggaatatgattcttcaaatcttaaccccttgaaaatggagggtgtggaggaagagaggggaagggaagaagactcttcatatctgtcttttctatctaaggcttgagacaactctatattctgagtctcccaggcagactaaaaattggaagagtttttcaattcacttctctgtgtctactttgtccttcacatctgactgaaattgtttcttccactgggacacagaaagacaggtccttgaacttattagttagttcttgaagtagcatttgcagagagaacacaacttttacttagactgtgaattgcagattagcaaaaattgcatcatttcctgaagttgcctttattcacacattattgagaaaacatccattattaaagaataattttcagaaaaggtaaaatcatgattcttctacaagtgtacaatgaacacatgtcaaaaaatgtattgaactagttaattaatgagagaattacagcattctgtaattaatgagagattacagtaaaaaccagtttcaactgattcaaaagaggtattcaagaactgtacatatatagggagtaggaatgctgaaatgaatttgcaaatagacacaatattatgccaatatgaaatggcctttcttgtctgtaatctcagggaatgaagtgaggacaggcgaggtgaaggtgagactagggagtagcacaataggctgtctaaaaaaggtggtcaaggaaccaagttaggccaggtatggtggctgatgcctgtaaacccagcactttggaaggccaaggcgggaggatcacttgaggccagaaattcaagtctagcctgaccaacatggtaaaaccccatctctactaaaaatacaaaaattagcaaagcttggtggcatgtacctgtggt

SEQ ID NO: 315514 - DNA, 4001 bp, Homo sapiens
ttaagaacagataccataacacaagactagaaagccatgatggatttaaatttcagttccaccactcatttcagatgtgcaatagtgggcaaatttacttaacctctttcaagtttgacttatgtaaaacaggaatattattattatctacctcttagtgctgtaagaattaaattcagagttagccagttagagcagtgcctgacctacagtaaccacttcacaaacatataactctatctcccagctgctgtgagaattaggcagccatgtttagcaaagtgcatggcagacactaaatattctatggtaaatgtacaaatgaatgaattcacgttttgtattttccacaaaggatttaaaatatataaagaatgaaggcaatatttcattatagaaatacactggtaaatgtaaagacggcaaaagaaaatgaaattaggcagatccaagagccttttccaaaaacgtccattactgcaaccacagcagacccaaactacatcaggtagttagtaatacgaagtgctctaattaagaggcttgaggtcttgttcagggactgtaacctgggtgcccaagaaagtccacggatagtgctagcttcggcagcacatagagaggagattagcgtggcccctgcgcaagtatgacacgcaaatccgtgaagcgttccatattttttataaaacaaattaaaaaaaaaaagaaggtccatggattgtgggggggggtgtctgtgaatgaatgcactgaattttatgcaaaaatgtttgtttctctgtgcattttccctgggagtattcctaactttttcctagttccaactttgccacaattaaccttgtagaaacataatttaaaaaaattttttaacttaagatgagggacttaatccctagcgtcttcaagctccaaaatgtttgattctgtgcttcataacaagtttttttttttttttttttgagacggagtcttgctctgtcccaggctggagtgcagtggtgcgacctcggctcactgcagcctctgcctcccgggttcaagcgattctcctgcctcagcctcctgagtagctgggactacaggggcccgccaccacgcccggctaatttcttttttttttttttgcattttcaatagagacggaagatattcttatactatcgttttctttccttattattataacactcttgtgcaaactagtctagggcgttttttagggttacggtgataataacaaagtgctctaacaattactattcttaccagccactggatttgcaaatgcataaaagcacaccagccagtgttataaacagcacccccttcctcccaacccttcttctccccttagaaacctaacagctgagatatcaaagcatttgaaattccatttttgactccatatacatttgtttttggcttctttgcttgtttatagtttgtagccagcacacactatccccagaataagcccaacaggagtgtagattaactaccaccgttttaaaggcaaactttagttttaccaaagcctcctacggagttcaacacattcggcttctgtgtttccctacaccaccgatcccgctgcagactgcaggagctctggcaagcgccacaagcgccaggggagacaaaacccctcactagcaggctttgcctccccaaatcaccccggtcccctaggccccaccgccttctcccttcctggaatcaaacgaccaagaccccgcaaggcctgaggcggcggccgcagcgggagcccagaccactgcttaccgcggccctcagtccagaagctccaggaatcggccgtaacctatgggaccccgctcccttctacgggatctggacctaccatggctgcgtcggtccaatcccgggaaccctcgtttgttaccggctactcaggccttgagataaacccaccgatccactgaccgtcagactgactgacgtggaacttccgggagccgattctcgcgatagtcagaggccagggccggagcgcctgcgcaaactgcgcgcagggccgtcgtttcccaagccccgccccagtttcctaggcaacgtggccttccagaccgctggtagtggacttgaggctgtcgggaaggaggggtgtggcctagaccactaagggccgtgacgtggtgccgctgagcttggaccccgaccagaagatagagattgaaacgatgaggaaaacgaagtgcctaatccccgctggacgctaactgcagggcaagctccccagtgttgtagttgtgtttcggaggccgagaaccgctatcgggcttcctcggactctggccctggaggggggaaacggcgagggagaaggcgaaacgagtctccagtgtgttcttggggcctggtgcgaggcccagagaattctctgcaggcctttgcccgggcactgattaaggctgcgaagagacgcaccgggctgcgggcttagtagcttcaggcttctgaagtcagagggagggctgagagcttacacttctggagctccccgggagacggcaactacccaaccgtgtgggtgtgtttgtgtatgtgtcttttgttgagcttcggctggctgtgttattcattcaacaaatatttatcgatcttcggcagtgtgtcagacataccttcttctcaaatcttcacatcaaacctgaattatctccatttaatgatgaggaaactcgggctcaaagaagttaagtgttctagccaagactgcatagtaagtggcagataaaacctcaaagttgggccgggcgcggtggctcacgcctgtaatcccagcactttgggaggccgaaacgggtggatcacctgaggtcaggagttcgagaccagcctggccaacatggtgaaaccccgtctctattaaaaatacaaaattagcctggcgtggtggcgggcgcctgtaatccaagctgttccagaggctgacaggagaatcgcttagaacccaggaggtggaggttgcagtgagctgagatcgcgccactgcactccagcctgggcaacagagcaagactctgtctcaaaacaaaacacctcaaagtttgtgctctttctactacataaaaatatctcttcattaatgtggctgaattctaagggcctgtgccataggggttacactacacaataaagttcgagaacatttgcctgtcacacgcactgcacatctcctgtatttcctttttttttttttttttaagaaaacatgtggaccatagaaaacttgccctctggttacacgtacaaacgtgtatttttaacttgagagaaatcttaaagtcttttcagacctccagattttcagaaaggcaaaaagaaaaattatgtatttgtgtgtgtagataatgataatcagagggagatgattttgcacgaaattatttggctttagtaggagccttgagctaatgtgactctcttcatgggcctcagttttcatcatcttaaaaaaaatccagctacatggtttctaaagatccttccattttttttttttttatgtttctgtggcattcaatagtggaaaaaagagtctggaactggagtttagtgccagcagtgtgatcttatgtaaattgagactaataattctagtaattgcatactttgcttactctatggagtgactgaggatcctgagttgaaaaaattatatgaactatacctaatttgcttgaatagtggaactttcaatatttctaactcctgaatactcttgcacttgagagagtatttttggatttggcacagtactaagtgatacaaaataaaatgatgtatctctattgtcaaggggctcagctgggaatgcttaaatctttgtataccactgggccacctaagggtctacctagctggtgttgcgggcctgaaccctcaagtgtcattcttacttggactatatcttttctcatgttttccactgcaattagccaaaattaagtcctgcaattgtagactgtaaa

SEQ ID NO: 315515 - DNA, 4001 bp, Homo sapiens
tcacaccattctcctgcctggccaacatcgtgaaacctcatctctactaaaaatataaaaatcagccaggcatagtggcgtgcgcctgtagtcccggctacttgggaggctgagacagaaaaattgcttgaacccaggaggcagaggttgcagttgagccgagatcgtgccactgcactccagcctgagcaacagagtgagacgccttctaaaaaaaaatacatatatatatatatataaaaaatatatataataaaaataaacaagtcatgcaaaatctctacctgcataatggccacagtctagcttaggtgatagttttaaaccagtttccttagctttggaattaactttaaatagagaaattttttaaatgtttaaatagagaggccaggcgcggtggctcaagcctgtaatcccagcactttgggaggccgaggcgggtggatcacgaggtcaggagatcaagaccgtcctggctaacgcggtgaaaccccgtctctactaaaaatacaaaaaattagccgggtgtggtggcgggcgtctgtagtcccagctacttgggaggctgaggcaggagaatggcgtgaacctggaaggcggagcttgcagtgagccgagatcacgccactgcactccagcctgagcgacagagcaagactctgtctcagaaaaaaaaaaaaaaaaaaaaaaaaaaagaagtaagcataactaactctctccagaaacaaagttttcctgtcttccagaaaacttccaggcacaagttttctcccgtgttgctctttaaaacaacactttgaatgtgttggtatttcagttgcattggtggtgaatatttatgatggaagctagaggggagcaaatgtcacttgcctcctggagtaccgcactcttctcaaggtgctggaatgggttggagcctccacctacggtcaaggacaatggagaaggtaggttgtgactctgaacttcaaaactctcccagacataggtaaagggaagatgtcccttcctaggaaatctagtaaagttcaaactcctcaggaatggcaatcaagcctctacaatctgtctagggatcctactagtctcctgcaagcaggtgggctccactctaccccaaaccactcacaatctcccagcagccctggtacagtcctgtgcttctcatggtgccatgtcttgtgttcatttatataacttgtaattaactaagtccctatgtgccagggaccaccatctcgttgtaactagttccttcatagcagatgacacatttgcaaataattacacgtgtgattatctggttgatgtctgcctcctccatcgtgggtgcaaccattctaatattcctagctcaggcactgagtgtcccacttgctctgttgcagtatccaggacaccgtacagtacctggcatacagtaactgctcaatatactttgctgaataaatgaatgatggggtcagagttcccagtcacaggacgctggctccgcaggttacaccccagtttggccagcaccaacgtagccccagcgaatcccaagaggttggacgaagaaagtaacaagagaacattcggcatggtcccctcctttgacagatgggtaaattgaggcctgggggggggggtgtttgtcgcgcccaaggtcacccagaaaattgcagtccgagcttacaagagtgagacagccgcgcatgctcgggctctccgaggcctgccactgactagctgtggaccctggcacaagcccctgcccctcactgggcctcagcctccgggtcaggacagagaaccagaaggaaagctcggcgggtgggggtccggcctccctcagacccaggcctggccccctcacctgactcctcatccttcttgtcgaatttcttcaacatagtggagtcggtggggcgcaatgcagcaacgcaatgctcgacgggcgcggcacggagtagcggtgccacagtggttctacagggaccacttccgggccccgactggccacgtcgcccagcgctctgcgcaggcgcattccgcgctctgcgcctgcgctctttccggtagccacagcctcgtctaatgttaaccttagctccgccggagcgggagtggggaaagccagacggaggggcaagggctaggtgcaggggggtactgactagcatcccaactctgctccctacgcttctttccgtataccaagggaggaggaggagcccctgcctcgttgcgttgtggcgtgagtctttgtggctttcgggtgtgaggttggtggcacacactggcccgcagtaaacacccaattgatgtgaccggtctatgactgttattgccaccttccgaaggagccttgccagccactcactcctcgctttcagattctttcccctgcctgatttcctcctcagctcgaatcgccatctaacactttatttttactttctggcttttatttgtttatttatttctcgttctgctgcccaggctgtggtgcagttgtgcgatcctggctcactgcagcctacagttcctgggctcaagcgatcctcccacctcagcctcccgagtagagctgggcgcaccacccccgactaattttttaatttttgtagagacgaggtctcactatgatgttgcccagtctggtcttgaactcgtggcctcaagcgatcctcctttctcgaccttccaaagtgctgggattacagcggtgagccactgcacccggccactttcttgctcttttgtttttttttttgttatttgcttgtttgtttgtcttttattcactgcagtggataatgttggcacatagtagttgctcagtgagttctcgttgaatgaatgcgtgcaattgcatttttaatttatatctgccgggccctatctcgtctgctcctgatgcaaattgccttgtacattatcaaccttaagagatctaactaaacagcatagaacttctacgttattttgtaaatactttggatatttatggagtgccaactagatgcgctgcctacgcggggaggtggggggaagggcgtgggaaggaacggaaaggggaaaatgacacatcacccagggtttatcttcctggggacctatgcaggacaccctgaggctaaggtaagcacagtgcatgccagtgagccagattgcattggcaatggcaaagtcgtgatggccaagcgctgcgacacggccccagcttgcctggggaggggaagcccgcaggcctgtgggcaggagaaggagtgggctgtggagaggagaggcaggaggctgaggcagaggccccaggtgaaaagggtgaccgcaaagctggaggaagggagatgtcagaggggccagcccttagggtctggctttgcagaggctagggccaaggacaacagatcttgtgacatgcaaaattgtcaagagtcagaaagatgttcaaaatgtctgatcggtaaccccacccctaatcaggaggaaattgttcaaaagaagaaaatgaggccgggcgcagtgtctcaagcctgtaatcccagcactttggaaggctgaggcaggtggatcacctgaggtcaggagtttgagagcagcctgaccaacatggtgaaaccccatctctactaaatacaaaaaaaaaaaaaattagcctggcgtggtggtgcatacctgtaatcccagctactcgggaggctgaggcaggagaatcgtttgaacctgggaggcggaggctgcagtgagctgagatcacgccgttgcactccagcctggagtctgggcaacaaaagcgaaactgtctcaaaaaaaagaaaaaagaaaatgaagttgcctgctgcagcagtttgcagcaaaataattgtaaacaccctaaatgtctatcaataaagggatgattaaggaagttatggtacatctgaggactaaactgatttttatcttgtctcagctactccaggagtctgagatgggaggattgcttaagcctgggaggtcaaggctgc

SEQ ID NO: 315516 - DNA, 4001 bp, Homo sapiens
atatgcccatgcctatgaagacattccacagataagtgattttgggggggaaatctgataagaaataatcacgcatattaaatattgcctctagtcaatatccaaggagtaacactgctctataaagaaataaactgagtaaaatatttatgctaaatgaagggcacagagaacagctcaattttttgcttattatcacagagaaattaactttctgattttgccctacattcaaacacaaccaaataaatctacttctaattacatcaaaaacatctggtagccaggagaccgagataaacaccccctcatgatgatcaaagaatattttacttgtaaaattcacaaagtaaagactaggactacacagctttatttctaaggcctgaaaatgtgattttgcaaataatcaagttaagcccaattcaattacaaggaaaaactgactcctgactatggatatttggggagaacccacgtggtctgaggcaatcgaggcaaagggaatttaacaaagggaataggttctccttccatggaaactctacccatccttcaatagctcaagagctgcctgcaaatgggagattgcctgggatagtgagatcattgtgaagataatagctagcattcattgatcatttattgccatgtatactgtgttagccacttgacatggcttgtatcattaacctttacaataatactggagggagtttcttttattagagtcattttacagacacatgaggctcaaggtcaccaagttagtggattaagattcaaaccttgactgtggatcccagactcttaatcatgctgtcataccattcaaggttcaacagcacttactgttaccactggaacaatttgttcagactagtctttcaatcctacccgtattatttacaaagtactgaggattaataaaagcactgagctcctacactcttattatcccattataccactaatgatttctttcttatatctactatctgggaagacaaaaggggccagaggaagagatgcacattcacgttatctgaggacgtcctctaatgagatttgctccacaagagaggctatataaaatgagaacaaatcttttgtggattgacaatctagatgaactattcttaatactttgtcccctgcgtcgtagactgattgattttcaacttttggttgtcttaaaagggttgaagcgtaactcttcagaactgtaaggaatacactctgtgtcctactgtctctaaattttgggagaaagccttagaaattaccagaaaacctttcctgtttggtcttaacaaatctatcatagcccttaccacgtcgtatacaagtcactggtttatgtctccattaactttaagctcctttatatcaagatgcatctttatccatgtctacatcttcggacctaacgcagtgcttaacccataacagatactcaacacacatttgtaggaaggaatgagtggttgaagcttgccgttctcctctctctccatcgtttcccggtactaagctacgggataagtcaacagagacccgaccacgaaacctacaaggcccaataattatctccagagcgccgcaatggggcggggcggggcggggcggggggggggggcagacagggaggaggagtgggggaaggggggaaggaagagggcagagggcagaaggcagagggcagagggcagaaggcagagggcagaggccgtagggcagaggcaccggaaggcacaggccgcggcccggggctcgtcggccgcgccctctccggctgcgcactgaccacgcatcgcgcgccttcttggtctccgggcaagcgcagcagggcttcagcggcttcttctcctgagactcaggcggggcagggtttgagtcaaccagacccggcatctttcgcgccaaaagcagctatgagcggagacagccaaatctatgccagcctcggcaaacgccgattcgtccgcagtcacttccggcagtcgctctaaaaagtacaggaagtcctgcttctctctgacaggtggggaatttaaaaggagcgcgtgcgcagaagaggcaaaattcgggccttaacgagagggtgcccccttcagcgcatgcgcaaggaggcccgctgaacgctcacctggactgtggtatttacactctaggactctaggtcatagagtatttgttaaatcaacttggggagggctcacgaagaaagaaagcagcaagacaactgagagatctcgtaacacccgctcctccccacccaatatcgaaacggaagcccaagatggtgaaatgatttgttcaagccaaacaggagaaaccataagtgaaagccagttcccttgaataacagactagtttcccccttttcttttatccgccttcttcctgatccccacacactgcaggcctttcctctctttcattgacctatttaaaaatgaatagcaagacatagaaccaccgagtccacaactattgggggaatttaaaaggtcctataaccccctatacacctcctacgcacattaaatcctcagctaatttgcatttatagcccccctccaactgatctgaattcagtatgaattattcagtcatatattcgttaatatactgatgaataaaattgaaaaataccatttccatagcatttcctcaggtacatagataaactggtgcccgtcttattcgcaatgaaatggatataatcattggatttttttcctgcagagtattgttggaaacaggcaataaactcttttttattttattttattttattttttggagatagggtcttgctctgtcgcccaggctggagtgaagtggcacgatcttggctgactgcaacctccacctcctgggttcaagcaattctcctgcctcagcctcctgagtagctgggattacaggtgtgcaccaccacgcccgagtaatttttgcattttttagtagagacggggtttcgccatgctggccaggctggtctcgaactctgacctcaggtgatccgcccacatcagcctccaaaagtgctaggttataggcatgagccaccgcgcctggccaataaaatcattttttaaagcaggacttggaggcactgttcaatagctgcagggtgataggtatttttaggtacttaaactttcagcatcacctaatcaaagtttgtttctatattatagatatttaactcagggaatttacaggcgtgtctgtgaactggtgctgtataagagtaatttctatatgtgtatttttcaggttactaagaccatccccattttgtcatctgaaaactttcaataaggatgatttttatttccttctggattgatatttttaataatacaacatattaccctcatgttctaaattcaccctcatccattattatcaattctttcaactaggtgctaactcacattgtttagaatcttgctaatcaaacagtgcttcctggatgagcaatatcaacatcacttgtaaccttaatatacaataaaatgtggttcaacaaattattggggaaaagaaaataggctaaccatctggagaaaattaaacactacattaaaaggaagagctctagatgcattaaagacctagattggaaagattgaaatatgaaattaatagcaaattgtggaggagaatattttaatactgagggatgggggaataacttatgttacatttcaaaagtacaaattgcatgtcaaaaaaattgaagaaattcattacagcaaaataaaggcttggggttttacatacaatactatagacaaagttaacaaataaatgatagaattgggagaaaatatttgaaatctacatatttttaaaaattttaaaagttaaaaaactaatgtgttcacttagaatatgtattcagttgaaacaatgtcaccttcagtcgcaatatcttccatatatgtagggctgtcgaggttgtgaaccatcatttaatcttcatg

SEQ ID NO: 315517 - DNA, 4001 bp, Homo sapiens
atggggtaaacaggcttatactcattgggtagcttccctggcacagacaggccacaggagtaattaaaaacaaaggaatttcctccgcccccattcaccaaattctaaacaaactccttcactcttctactccctgatttttagaattaaagatttttttttgaagcatattcagggcaatgtcttgcacttagtttatgcctgataaagctgatttgatttttgatcacgaacaatggcagagtggtggtgagtgggggcatagagaaggatagtatttttatttttttaatgtgtctgactttttccttggaaataaaaaccacatataatttatattatatttaatcaagaaaatactgaatccatgcaaaataatgtttctggtgaagctgtaaaaatatgtcatattccttagaagataataccaccttaaaaccaggttaaaaaagaaataattacaagatgtattagttttatttacaaccacttatcttcaggtcagaaactttctttattgtatattattaaattcataatataataattggatattagtatctgttatgtatttatttttatggtgaaaaatttcaactttacataatgttaaagaaaatagtatatactcatcaataagattcaataattacaaacttcggcatccttatttagctgttttttaaagatataatcttggcagctgatggtcattgggcttgtttgtgttttattaccactgaaatacattttaatgtagtgaatattgattttgaattccaagttcccatttggtggttaatgtttaattaacatcattaaaagtgaagacctcagtatagataaacttctgtacaaaaaacttcaaggagaactaaactttttgttttactgtgtagtgaatattgctttcaataaggggattttccaactgaaaaatgaagacatttaagttacatggagctttttgaggaccatcctaataagtacctgacatttttttatgcacatatgtgccaagcattgtactaagagctttacatgcacccgctctttaaataaccctatgagctatgcttattatcctcattttacaaattaggaccctgaagctgtgaaagattaacctacttaactgtctggagtctctcaataaatatcaggcaggatcttatttgctaaaattgtattttatttctataagtgatgttttgaaagatataaaaaaattttatgcctatcatgaataaccattaaatggtgcaataaacataacattgtatacagtaattgtttaaatgaaagaacttctgcataaacacataaaaagacagattcctaatcggagatgcagttacgaccatgggaggtagtaagatgtgaacacagatccccaggaacaacaggaaagaagcagggtagtccaccaaataaaaaatatacaggaatataaaggagattgattcaagtgtcttgggtttcaagcccacattttgcagtttctgtatataagaaattttaaaaatatttcatcttattggctctatcctttaaaaataacttaaaattttggtctataaacaataaaaatagtgacttacgtgtcaacagaaataagtttcttttccccatggtcagaggcataatcccaagtcgtttcaataattccaatgtaataatgcttttctttcgcccaggctggggtactacataaaaacagaaaaataccaagtatcaaaatcttcatttttttccccttcttggagcctgagaagaaatgaagtaaaatcaggagcaggcaattttataaataagactttcttccttatttgcttgattgacacaatttagtgttgcacaagagtaaattgtttcattaaagcaaatattttccaattcagttaagttctcgtaaaccaccaaaaaaacagttcttggttgccaggcttctctgactgaaaataaaaagtcaacagttattgttggaggcattagggtgtgcataactctgtgcctttttccattcattgtgtaaattccaggagggcagagaacgtgtctaaatgctccctttgttcctctgacaatatgtcacagcacagtgtcctgcaaacagtgcacttttagtaaatcaggataagaattatgtaaaatgaatcaaaacatgtagctttttactacagtcattcttaatgacagggatacgttctgagaaatgcattgttaggctattttgtcattgtgtgactatcacagagtgtacttacacagacttatatgatatagcctactatacatctaggtaggctatatggtatacctattgctcctaggctacaaacctgtacagtctataactatgctgaatgctatagacaattgtaacacaatgatatttctgtatctatacatatgcaaacatagaaaatgtacagtaaaaatatgttattataatcttatgggaccaccatcacatatgcagtttgtcatttactcaaacattattatgtggtgcatgactatttctaaaagtctaacaaatgattaattgcagctttatgatatgaaacatgatatctagcatgccaaatttaagtaaacaaaaataagaatttaatttggaagaatttatctgttttatgagcttggaccaaatctgcataaaaactttaccagatcattctgtattgctatatgcaaataactagcagagcctaacaggggctaataactttgttttaatcatcaaataaacaaaccataactaaacctgtcttcagaggcaaagattagtcttagtaaatagaaagtaccccagtttatcattagactgaaatttttctctttgaagtggatatgaattttaaggtggaagactttttcttaaaaccctgtttttagtcaggaagtatatgtctaaaagtatgaaatggcttttttttttagctgaagaaaatcctgataacagttgacactttgtgttagtataattttttttctctcaaatacctcaaaacgttgtgtatttgctgaaggccacttgttgaaatagattggtatagaagaaagcatgcgatatttgaacaattccttcatttaggaaatattattgaatgagccaagttctgttctactcactgggaatacagcagtctgtgccaagttctgttctactcactgggaataccgcagagaacaaaacacctaccatcatgcaacttacattctacttggggaaactgaaaatataaaaatgaaaaatgaaatacacaatattagtggtgaatgctatggagaaaaataaagcagagaaggagaataaggagtgctagggaaaaatctgatgctaccaaatgacctcaagtaagatacttcagcccagcttcagtttcctcatctgaaaatctcaggttaattgaaatgacctatgttaaggcagacagtggaggagcttctctcaccagctggtaataatcttaactaaatggcttggtacagaaaactgaatcatgttgcccaggatgccccaaggcctccttctaggactgccttgaacaattgtgccgtcatgtccactgagaggactgacgaaggactaaaatcttgctcagatgccaccggccataccctgtgccttgcaagaagctgcttttcccctaatggtccacacagacggggggcatttttcagccgtttatcctccccagggcatggagaagggggacagttctttttctaattggcatgaagccacgatgtgaaccagcaactgtctcagccatttgcttttcatttttcactcagtgctcaaactcagccccaatcttgtgcatggaaagatgttgatcagagcaccgtaaccatgcccagagtcacttgtttcagcaaattgtaccaaccaaccatccaacaaacaaacctgttcaaatagttgctgagggttccagaatgtatgcatagcacacccctcatattggtggtgaaatgaaatggttaaacag

SEQ ID NO: 315518 - DNA, 4001 bp, Homo sapiens
taggacttacccaggtcaaaagggagagaaacacattttcatgagaaaagatgtacagggccaaggtgggtgagattttggtgtttatggggcttgaagggtgtggaagaaggtggaggagcaggatattgaagaggctggtagtttggcagatcataaaacgctttgaatgctataccaataccaaaagaaaatgcttctgactgggcatggtggctcatgcctgtaatcccagcattttgggaggctgaggcgggtggatcacttgaggtcaggagtttgagaccagctgggcaacatggcaaaaccccgtcttcactaaaaacacaaaaattagccggggatggtggtgggcacctgtaatcccagctaatagggaggctgaggcaggtgaatcgcttgaacctgggagtcggaggctgcagagattgtgccactgcactccagcctgggtgacagagtgagactctgtctcaaaacaaaaacaataacaaacaaaaaacgcttctatggtgcttaatatggcaggcctgcttctaagtgctatcaaacgcttacttagtctttgtagcaaccctaggaagtagctatgactattatccccattttatagcagaagaaattgagacccagagatgttgagtaagttgcctaaggctacagagctagcgtagagcttggatttgaatgtaagcgtttgactttgaagaaaatgctttttccgtactaggctgcttcttagtaatgaccctcaaacggaggaatgcaattgtcaagttttagagtgagcaatcaggttgcaatgcagagttggctttgtgggagtcaagactagagccctgattgctagttaagggactatggaaattctccttgcaagaggtagagtgaacatgaacttggcagtggcagtggaatggagggcaatgtgtggatttgagaaacatttgggagttagaataggcagggcctttgattgatttgatgtagaggtaactgtatgtttgactggaataaatcccagacccagttctgggtttaaatttgatgtgtaatcttggtcatttaatttattgtctttgcactttagctcttctgtttcaaatgagttacattataaccctgacattgagaatctgctggagaatttgaaatggcatatataaggtggctggtgcaacataaataggagcagctgaatacatgataaaattatattaggctgttggattttaaaggattgatctaactttaaaagtcttatttgaaaatgtacctgctcttggaaagggtcacatcttgatattagccagtgcctcaacgttttcagttagtactcaagagaaattatggcaccagaggagatgagggtcggagtggggagaatggagagggaatggcacccgtaggcaagagaaagatgccctgataaggaggccaagaacagctcctgatttcatagttttaccttgaaaaagctggtgtttgaaaagcttttgggaggaaaaacagaagtggtagtcttggaaaccaagaccaaaaccagaacaggtgaagtattggccattggctgaattatccagatagctcctgctttccccttatgttcaatagtcttttgtagtcccatgggcattgacagtaaaataagaagaagcatcttttagagaacagtaagaaaagataaaatatccctctaaatgcttacctcattggttttggccaagtcctttatgatgtctgcttgtttttcatcctggggcttcacgcggaacaccttctccctttgtggaggcaaatgaaaaaaaaaaagtgaactgtaaggaaacaacctttaattctcttctacacagagactggaacacaggaagtaagatttacctgtcaaagcggacaggagcaattgcaagagtggtagcaatcaaacccacaggcaggatgagcctcatggttcttctttgcctgccttgagaccctctggcagttttatgcctcagcccttatcttgatgagcagctgatttcctcttagggttctgttgcacaaactgttccccttcttcccccacaccaggttttttttttccagctggagagggaaaaacactaacccaccaagcacatgctacttatctaccttttgcaataggaaatacccattttacagatacaggatgggaagcaaatgcctttagcaaataacttggccaaggtaacagagaaagtatgttcacagagctgggatttactagttctatctgttctaaaatactactctaccattctgcttgaattgaatgatggaagaaattagttttaaaatttgcacttggagactgagatgaatttgggtatctggccataaaatcttggtgagtggttcgtaataatgtaaaatatatttttgaagctagaatgtaagttgtgaaattaaaaacatttaaattgactgggcacggtggctcacgcctgtaatcccagcagtttgggaggccgcggcgggtggatcatctgaggtcaggagttcaagaccagcctggccaacgtggtgaaaccctgtctctactaaaaaatacaaaaattagccgggcgtggcggcaggtgccttaatcccagctacttgggaggcaaaaaaaaccccaaaaatttaaattacaaaatataaatgtactaaaaatgctgtaagtactatggcgaacattgaaatgttcaccatttagattttacaatgataacatttttgttatatttttcctgtacttctctgggtaaagaaataaacactaaagacctaaagcactgccctaactctttgcccttctcttctctctgtcctcagaggtgacccctatttctaaggcaacttgagaactacctgacagcaagaaaatatcaatgctgtaatgtttattaattggacactgtcttcagagcctggatgctgtaattgccaaataatgccttttgagagttgaattaatgaaagccacctatagaccattcacaaccatctctggagggatgtttagtcttgaacacaacttggttaattatgggagaataacacctttacctagaatcataggtaacctaaaagagtaagtgaatttatctaatcagttaacttattagaatttcctttttgaaaaccacctcttcacattgacaaacgtatagctgactgtagataaaacttctcagagtcacgcttatgtactatcaaaatagtgtggttggagacacgcccctgttatatatacagcagcagtaattccattcttctctatctgatgggtgtgtggtagaactcgggacttttttttatttccccaaatggattttccggctccagccttgcaggtaaggaagaggagggttttacaaatgccttcatgttcttgacactgggcaagctcaccagcactgagaactcccaaagcaaatgcttgctccattgcttttgactaaagatacttttgaccagggaacagtgaaaaagaaagaccttgactttgggtttcgacagacatcacttcaatgtggctcccacacgctagctacatccccttgagcaggctgcctagttattctgggccttggtttcctcatttgtaaaatgggaatgctaatgtgactctaacaagtggctgtgaggcttagtgagacaggatatgttagggacttcgtggtaggtgctaaaaaacacgtccatgctctctagacagttgataaaatgttcatgtgctgtcaacagagacttccagtgggccactgccagcctgcagaaccggtatcaaaatagatcatgtggtagattaaagtggtggccgtgacctttagggataaaatatgtctctgtatttgttttcatgtggactacttcaataattttttttaatgttatagctttgctttttagagttttattttctgattctaaaaattataaatgcccattgaaaatgattctggaaaatacaggaaaggtgaaagaggaaaaat

SEQ ID NO: 315519 - DNA, 4001 bp, Homo sapiens
catgataaatatgtactgaatgagtgaaacgtaaagaaggcctctaattctgtgactcctgacctatttaatgttttcttttatcagtgacaaggataaaagtcaaaaagacatgattatcaaacttgttggagagacaaagttaggggaagagttattgccctggatgactgaattagttttctaaaagatctcaacatgctgaaaacaggctgtcaagataaatcttaaaagtgtaaatctaaaatcctacatttaggtgaaaaaagtcaattaggtaagcacaaaaggagggacatcctgtttgagggtgattcatgtgaggaaaaaaaattacctaatggttttgactgaacacaggttaatataagctcatagtgttctatgactgtttaagatgctaaaaagaatcttaggcaccattaataaatgtctgctttacaaatgaaggcaagcaatggccctgtagtatacattaatcagaacacacctggaggtccatagtcaattctggtaactacatttaaaaaaagaaatatagacagaaagactgagctgtatctagatctgagcagaatgatcaagagtctgtataccagtgctaagaaaaattacggaaagcttgaaaaagataaatcttagaggtaacatgatatttgactcagctaagcccaacaggtcaaagttagagaaggaagctttcagctcagaataaggaagaaaacagttggaatgatttgtaaggcaagtgggctattccaaaaagtagtatacaaactattcctggaagtactcaaacaggttttaccaggagtagtaactggggatgctgtttcccagaaggaaattccagatttgagtggattgctggaatagatgagtttatatttctttcaattctgaacttctgagcctgtgattatgacactctccaccttcttcttccttcctctatgccttaaaagctacaaaatgactatatatgtttatgtatgtatatgtgtgtgtgtgtgtataagctagcagattattttagtttatatatttatgaagaaacggcattggcccaagtggaactactgtatttgtggtcagcaatagcttcctgccacattgtatacgcagtttaaaatgtcagttctcacctcatatatagtggattaaaaaattagcacagagatgtcagttttttgaaagcaaaagaaaagtatgaaaatcactcatggctttttaccctctttttccccctcacgtcatatcattaaggggacctgaatcaaggtcatgaaaacccaagctgtttgatttggaatgaaagaaaatcaaagaggacagatgatacatgggatgtggaaatgaatttgaagttggacaaaagcccagtttttcagtaatatccaagttgatcatttttctcttttgccttagaaggaaagtgactgtacattagatgttctgtgaccttcgtgacagttgcaactcatccagttgtcacactgtcagctcttttaaaagttaccatggatttataatactacagggcttatggcaatctaatttaggcagaaaaagaagacattatggcactaaatgttttccaagtttttatttcttgctaccaaaatgctatagttaatatttcatgtttttttttccattgtcggaatcacagtgcgatctaagattttaaattagatgtgaagtaaatcaaaattgttacttacctgggtcgtgctggccaactcgcggattatgttaatgtgattttcatcttcaacgttaacacggaacaccttctcgctgaataatgagataatagaagcacagagaattggaaatgagtaatgtgtccaaatttgggggctagcaaggaagaaggacttgctccttaaagatggcttacttacccttcaaagtgctcaccaccatgatgagcagatgccagggccacagtcaccagaaccaagagtgccaacattgtgtctgaccaggtctagtgggtaggtctcatctgcttttataatcctgagtgttctttgctttcttctcctgattgcaaacaggaactatcatatcttgattaatagttttcctggcattgttgccttggtagctgtgtaaagtctgagagggtatctctctcaacacctgtggaaatagagtaaatactctcaaattcaacttatttaatttggatcagaacttgaatagtctgagagtaaattagatttaaataaaatctattttgtatttttttctgttttgaattgagaattacatacaataagttctacagattttagtgtaaagtttgatgagttttgacaaatgtgtaaacccatgtaataaacatcccaaacaagatatagcacattttcatcaccctaacaagttcccttgagcacttttccagtctacttctgtactcctctcaggcaaatgttactctgatttctggctttatacattaattttgcctgtattaaacttaatgtaaatgagattatacaatatatattcctttgtttctggcttctttcattcaagataatgtttttgagatttatcagtatttttgtttgtattaccattattactattgatattatttttgagacagagtctcgctctgtcactcaggtgggagtacagtggcgtgtgatctcagctcactgcaacctctacctcctgggttcaagtgattcttgtgcctcagactcctgagtagctgggattactgaaatgcaccatcatgcttggctaatttttgtatttttagtagaggtgcagtttcgctgtgttggccaggctggccttgaactcctggcatcaagcgatctgcctgccttggcctcccagagtgctgggattacaggcatgagccactgtgctcggctttgttggtattattggtttattcctttttattaataagtgatattccattgtatggatatgtcataatttgtttagctatttactgttgatatatatttatattgtttccaattttgtgttattgttaataaggctgcaataaatatttttgtacaagttcttttcttggcatatgttttcatttaagggggtggacatgtgagtggaattgttaagtaatagtgtaaatctaggtttaacacaataagattctgctaaacaatttttccatagtggtttgtaccattttaagcttccatcagtatctagtggctttatgttctctccaacaccttgttatttttagtatttaattttggtgtttctaatgagtataaagtggtatctaattctaattttaacttgtatttccctgatgattagtagtggtgaacatcttttcatgtgtttattgatcatttgtaaatcttcttttgtgaagcatctattgaagtcttttgcctttttaaagaaattggttgtcttttaattcttgtgttgtagccgttctttatatagcatggatacaagacctgtgttagaaatatatgttccaaatatttttcccagtatgtggcttgcatttttattttcttaatgttatgttttgatgaacagatgtttttaattttgataaagtttgtttaccaacatttttcttttataattagtgtctttacattttttcaaaggaatttttcctatctcaaggtctcaaacacattcacttattttttttcttataagagatttgtagtttggggtctttatgtaagatatgagtctttagtgtaagatatgaatcattcatttttaaaatatggatattcagtagatccactattatttgttgaaaaggcttttctcacatgttctagcactttctctatggatctcaatgtatggtaatggctctttaacctttaagataatttgtttctcatgagaaacaaggagacaaaccaaaatgagggacatccttcacaaaaactgacatttaccctctagaaatgtcaatattatgaaggataaaggctgaagaactagtccagattaaagaagac

SEQ ID NO: 315520 - DNA, 4001 bp, Homo sapiens
ccagcctgggcaacaagagagaaactccatctcaaaagaaaaaaatttgtagtcattacctctgaaaaattgaattgtggatgattttaattttttccttctgcttaaaaatatatgttccacatttttaagtaagaaacatatcacttttgcagtaaggttgaaacctattttattctaaatattgagataaacatgtaaaatgcacagcacagttccacacacacagtaggggcttacttgactctttccttcctggcagtgatgttgcaaaggcccgagggagcttgtctatcctctgtgttagcttctggaagagaagacagctgacaggttgaactaagaggccgttgtgaactgggcactatgcgaccctcccaatttatacccaccctcccagtccagtgcaagtcacacttcccccatgaagccttcctgactaccctcttcttttttttttttttttttttttttttttttttttttttttgagacagagtttcactcttgtttcccaggctggagtgcagtgacgccatctctgctcactgcaacctctgcctcccgggttcaagcgattctcctgcctcagcctcccgagtagttgggattacaggcgcctgccaccacatctggctaatttttgtatttttagtagagatggggtttcactgtgttggccaggctggtctcgaactcctgacctcaggtgatccgcctgcctcggcctcccaaagtgctgggattacaggcgtgagccaccgcgctcggccctttcttgggtcctcggatccctcttgtactgtgttgaatgtttgggctcttccgctctgttttctagtcagttgcacccacccgactgagcccgtggtactgcagtcttgctgtggtgtctctgcaagcagctctgcaccccagcacctggctcggggccaggcactgagaaggcagtcaggccctgtgtgctgaattgaaggaatgtgtttgtggctttcagtgacttcgcatctcaggccttactctcatcctgcttagtagcaggggaaagcactttagctccgccagtgcccccagctgggatcagattctgacgccatcacctactagcggtgtgggcttgtgcaaatcactccaactctctaagcctcaggttttccagacttaattatcacctctgccctcagagttcaaattagcactccattggatgataaataggctaaataagatagtaaatagaaagcccttaacacagcgcctggcacatactgaatgttcaataaaaggtggccccctgcaggtttatttcaccacaaactttattatatgagccagcacgcttctgggaaggaaaccaggagctagtcatccttgggcctgagctgggtgctgtggcatgcgcttgtaatcccagctactcagcaggctgagtgggaggatcgcttgaagccaggagttcaagaccagcctgagcaacataacaagacccccatctcaaaaaacaataattatattaataaataattaataatatttagtattaatataggattaataagtaattagtaatactatttattattattatgccaagatgacaagtataaactaggcagaaccaggccaacctggacatctggtcaccctgcttatcctctactcactaccagccttgtaggccaggactggcagatcttcatctcacaaacccccgccccaccttcctcctgcctcttcccagcagcgccctagctgagcacctcagggacttctcctcccggggcaggggccccccagaaccgcagcctgcctggagctgcggaatgctctgaaacgggggagatcgcaagttcccgttcctgcccccacgtccctgcagaccctggagcccttcagcgaccccgggagcctaccgtgagggccgagcgggtggcgccgggctgccctgtcttcctcaggagcagagaggagtctggtgtggcctgtggtcagctcaatccagccccagcgctgatcaaagttccaggcagtggttcctcccctcacgtggccccagcgtcccagaatgtcaccagggtcacaggacgggagagggccttggcaaggcctctgaagattacaaaatgaccctgaactcctcccatgtacagagccctgccggggccaaaatcccaccgaggttgcagggttggcaccttcaggaccccgaggacactcagaaagctctagagattcccgcaggcggctgggttggtgaggcctgggatggggtccacgctcacacccatacctgtgagcagaggcagagggactgggagcctgccttcagcctcaggcccctgctgggctctcagcgcccggaggcatttcaagagggctgtggatttgttgttttgtcttgttgtgtttgtttgcttgtttaatgaatgaactttctaaacccttcctgaattagaagggggaaaagctatagggagatgaattggggcccaatatggagaggagcgctcacacactcagggctggccgaggacgaaagatgctgctttggaagggagggattttcccatctccggaggtgtggaaccagggctgcaagacacacggagtgtgtgtgtgctgagtgcgtgcatctgggggtgtgcatgtaagtgggtgtaaatgtgagtggctgtagggggtgtgtggtgagtgcatgtgtgggggtgtgttgtgtgtgtaagtgggtgtatgtgtgagtgggtgtgtgcgcgcgtgggtagggtgtgtgtgtggtgagtgcgtgtgtgggtgcgtgtgtgggtgtatgtgtgagtgggtgtaggggtgtgtgtggtgagtgcgtgtgtgggggtgtggtatgtaaagagggtgtatatgtgagtgggcgtgtgtatgtgagtgtaggagtgtgtgtggtgagagcacatgtgtgatgtgtgtgtaagtgggtgtatgtgtgagtgggtgtaaaggtgtgtgtggtgagtgcgtgtgtaagtgggtgtaggggagtgtttggtgagtgcatgcgtgtgggtgtggggtgtgtgtgtgtaaatgggtatatgtgtgaatgggtgtagcggtgtgtgtggtgagtgcgtgtgtaagtgggtgtatgtgtgaatgggtatgtaagtgggtgtaggggagtgtttggtgagtgcgtgcgtgtgggtgtggggggtgtgagtgggtatatgtgtgaatgggtgtaggggtgtgtgtggtgagtgcgtgtgtgtaggtgtgcagtgtgtgtaagtgggtgtatgtgtgagtgggtgtgtgtaagtgggtgtaggggtgtgtgtggtataagtgggtgtgtatatgcatgagtatgtctcgtgtgtgtagaatgagagtgtgtgagaaaatgtgtggtaagtgggtgtgagtgtgcagtgagtgggtgtgtgggtgtatgtgtgtggtgagtgggtgtgtgtgtgcagtgtgtgggtgtgtggtgtgtgtggtgaatgggtgggtgtgcgtgtgtgcagtaggtgtgagtgtgttggggtatgtgtgtgtgtggtgtgtggtgagtgggtatgtgtgagtgtgcactgagtgagtgtgagtgtgaggatgtatgtgggtgtgtggtgagagcgtaggagtgggtgtgtggaggcgagcagggtgaaggggtgacctggacgagcagtctaagatcgtttcaatgccaggagtctaccatttaaagtagactgatggctttttcactcattgcatggtattgatttttatctacgctttttatgagtacaaattaatgtttcttttgcacgtgagctgattgcatcagccaaactgcaaaggtctaatggagtgtggcaaggaagtgtgtttcagtggcgatatgccacaaatgcactctggcagaggacagcgggagcctctgggatggagacaggcggtgaacagtgtgcccagctccccctcagcggcccccgggctggcaagggtgggacagtggctgggaaaaa

SEQ ID NO: 315521 - DNA, 4001 bp, Homo sapiens
tggaattaatgaagtaaagtgaatgacggtctctttctgacattgggatggtatagagtgtgttacatctaacgtggaggggagatggaaggtcttccttctcaccctattaaggggctatctaacaaagcctctccaacctgaaggttggaggagatattagccaaaatcttttcactaaccatgaagttctcaatttcaaagtccagaaaaggagaaccaatagggtaaggaggaagaccccctcttaattgttctatagaagtagacagaaatatctttgataaacaaagggacaaccttctgacagaacacaaataacatttttcttctttcagtcacctctaaagcctttctgaaataggataacactaaacatggaccctggaaaggacctcagggagcttctctgtacactgaaactaccacagaaatccttggatttgctttgattgcaaaaacttgggtcacatggctatgcataagtcaatcgttgtgacctttggatatggaattacactaatgggccaggacttccacaatgtctaggagcatgtgatgtcttctatagcactcctggagccaggatggagccccacctgatctacacacattgcgagtgagacacagggacaattctccaagggatattcagggtcctcctaccaggaaaggggagacggatgctaagcaggcaaaaccagtgtatgactactaaatatgaaaatgttaagtccaaaaacattacttccaggttttgttaagaggtagcctcagagataaactcaaaatttgaattggattgaacttgcaaagatgaaggaagaagaaggaaaagtcattgtgcatttccttgcatgttaattgtatcctctaaaatttaatttctatgaaggcaagggatatgtctgttttgtcgtcttgttcataattataaccccaatgcctagaaaggtgtctaccaccttctacatttataaaattaaaaataatataaataccttagggaccattcaacataaacttcttatattacaggtgagagaaaaggaattaagatgtgctgagcatgtactatttccaggcaatctgttaggcactctacttaccatcccatttaatttttacaacaacctgcccaagaaagttttactatatctacaaaaataaatccagggtgtgggcggttgaaatgaccagaccagggaacacaactagttaatgggaggataggggttgttcattgaagcagtctctaaaggggcagctagaataagtgaacacatggaccatagaaaagaagttatagagtcaatgctcatagggaaaaagaaaaacaacatagttatctttggccctacatgttaaaagcatagatacacaaactaaacacaatgccacaacttgtgacaaatatggtttcctttgccagcaggcttcagctccgtaattagaaacaaacagttgcctgcatgccagtgcgcagaaaacgtgcagctttatgccagaaacttggaatttttttctgaaggcatgacactgaaggtaaattcaaagaagctttttacagggcacataaagcagaatttacttccacctcttatatgaaatcaacagctcatctgtacaaatgaagatttgtaaccagctaataatccatgttttcaatcactgcccccacagcaagttgcccgccagccacagtcccctcaacaattgtaacatcaaaatccccttgtctctatcactcacctcctcccagctctccttttaatggattctgagctgctgggttctacagccatggtcaaatttatctaaagccaagccacaaagtcactgtggccctggtgttcccaagttgcaaaggaagcttcagctctgggtagattcactcgccgggtttctgtttgataagataagaggaggcatccgctcagtgtcttatgccaatatgaaaggcatctcacccatcagtgtgacaagtgaaatcctggaatgaagccagggaacaaaagggaagaaatgtggattcttaccaatgcagttgataccattttttaaggggagcagatgatgaaggggaaaaacaggcagagagtcagtgccctgcatcaaaaaccttggatccttccctgaatgagtcagggtgagcatttagttttgaaatggaatttctgtttccttttattttctttcttttttttttttttctgtaagaactactaaaggaaactgttgtaaataacaggatatatttttgaggctgtggatcatataagaactttgaatctcaccccagggctatttatagctcaaaaatttgttctttttttctatttcaagtgatttttgagaactgactgatatgtcttcctctggtgtttctgtatatgcctgaggtgtgatgtattactggaaagcagaaaggaacactctaagaaagcactttttctaagatgctaagagtcaagggaaaatgaacatacatgttgcaagctgatgcaggaattaaatattccactgtctgtcattcctttttatgagaaccctataccacctgtggtgcctctaacattgggtaacaacctgtgctacgaaagggcagtttatacttctgtctaccaataggtggcatcaaaatctctagcttttctttcctgtattttaaaaaccataggcagagggcattttctttctgagattttacattttatcatgagtgatgttataaaggccactaaatagctctgtataatttcagagcagattttcctattgctctattaatgaggtctctcagttgtccctctgagcctcagttttctcattgtaaaaagaaagtatttggattgaactccagctccaagattctgctttttaactacataatatcttcccagacacaccatttttcatgcctatgataaacccattagcactccattcctctgggcttaaggaatattagcaagcaaatatcccttggttgcagaggctgttatctgcccagcctatattcatttttgtttgtttttccttactaagaaaaacataattttgtggagggtagcaacgtgtttagctccaaaccttcattttccagcttttcttgcagatggggtagtgatgtgattaaggtctagccctgcactatttattgtggtagccactagacacatgtatctatttaaatttaaatttattaaaatcaagtaaaattaaaagttgattttgtcagttccacaagtgacattttaaatgctaaacagtcataagtggctagtagctaacatcttggatagttcagatatagaacatttctatcattgcagaaagttttgttatatagcactgatctagccattgagatgagatgtcagtagaagttatagggcagtttctgtgagagttttcaaagagaaggagatactgaatcagctgggatgtacctttatctctttacctcttcctttctttctacctgaaggttacagtaagtcagccatcatgtgactatgaagcagcaagcatttgccaaggcaggttaagcagaaagataaaaggaacctggggctttgatatcataaaggcaacaacattattgtcagctgtattaggagaaaaataaagtcttccattgattcaagctactgttttcagctttttattacaaatagctaaatattatttctaactgatataccatcagaaacttacctggacaactttctattaatgactgaaaaagcgtgtgtctttccagtttcctttactttggttagagttgaggactagactctggatataagaaacaaaacaatgtgtacaccatgaagtgataagtattaatcattcatttcaatatgtccaatggaccaaaaaaggggcagatgggtattaatgattcccaaaataaatatcccctgttttaaaatttggctaaagagtagctttgcattttcctggaaaagaggttggtgggaaaaaaaagataatat

SEQ ID NO: 315522 - DNA, 4001 bp, Homo sapiens
tcagatgtctctcttgcaaagcttcccagagcactctcgcttccctagccccctcccgcctcactctgctcacctttcccccctccacttcccaaccacccacatcaagcccttcatagatttgcgccccttggatcatctctgccgcctgtgactttccctggagcctagcaggttctggggctgaaaggcaatccgccaaggcgccctggggcgccgtcagatttggaacatagaatgggaaatagggccttaaagcccacctactccaagatgaaggaggagcatttttcatcagggtttagcctgctcctcaccggatggtaatcagcactcgcttgacttggcgtggaccacctcctaattatctccattggattcagccctaacagttctcgtgtgtctgtgataccacgcggggtcgtgatctccttactcagctgtggcttggtttcagtggtccctccagtcccgtcccctgtccccgtccccctttccttctggctactttattccatagaggaagaagcgctgaaggactacgttgaatcaaagcacttgcaagcctattcattagtttttaacactgagaagaggcaactaaaatattattagaacctcattgtaagaagtgtgggggaggaggttgagaggctgaatccaaccgcagccaggtcaagccattggaagggactacaatgtcccacagctttctcactgtcagagaggaagctgcaacttcagccagaactcccttcccctccccttccccgattttgaaaaccgtaccccttcttccgccttcgggacttccctgacctatccctcacccgtgccatgctgtcccctcccctccgcggtctttctccccaactccattcgccccaccccacctgggcgagttgggtggatgtcagaaggcgagaggtaggggatggaagtcccttcagattaaagacgttgcttgctgctgctttttaaaacaacaacagcaatgacaaacgtgcaaaggtgagcgagaaccagtgcatctcaaaagttggtcttgctacgcagcagctccaacagactttgcaatcacagcgccccaggaacacaggaatgaagagttggcatttacttacctgggtgtgccaatctcgaagagtggagagagaattcagcccgggacgaggtctgtcccgcccccaggatgcaaaatccggctttgaagtggaggtggttggtgtggtagttttgtactgatgtaaggggcgtcgcacctccttcccctctcgtcctccgaggtcagtttagcaacagcggctgggaaaggtgctgagagcagagttcggtctctccggaaaccctgactccattctcggtgatgggggtgggggaagagggtgaaaatgttggagatgtcaggtcggctctcagttaactcggagagtaaagaggagggtactgagaaaagagggagggagtggagtggagcgagggaggaaggaaaggagggtggcagaaagagaaggggacgagcgggtggcggggagatggcagcttctcacagagagatttccaccttctgacgaatcccatgcacccagcaacccggcaagagactggttccgaaacctccgcgcgagcgccccctgggggttgctgacggagacgagcattgccccgggaacccgagctcaggccccgcccaggccttggcggcggcgctctccgtggtcctgccgcgcccgcagtctgggctttctgctcagctttgtcgctcaactgagctcctggggacacttgatttagatctccaagtgcttggtctccatctccactctagggtggagcggtcgtatcgcggcgcgggtgtggggggaatgggagttacactttttggcactcaccaaagaaaacttcttagatgggtgcttaactgtcaccaaaaatggtaaaggtgttgctaatctctggatccttcgtgtctacaaaactgtctggcgtatggcaggagcctggaaattatttttagtaagtaatgcatgagtaaattaatggacaaagagtattttcttcatctcatgatgagtttctgaatacatctacctcacaaataagataaagaaatacttagggagtacttatgcttaaagatagatataaatatgctgtcttatgtaaggggtgaccacttccacatgttttaaagcactttagagagaaagtatggccttcctatttcaaacttattcaaattcagacaaatgaacttattcaaatacagggcattgtttctgattatgtctgctaccatagacaaactagacaactaaattctctctgcacattggtattgtcagactcacaaattggactttggaattaatgaagtaaagtgaatgacggtctctttctgacattgggatggtatagagtgtgttacatctaacgtggaggggagatggaaggtcttccttctcaccctattaaggggctatctaacaaagcctctccaacctgaaggttggaggagatattagccaaaatcttttcactaaccatgaagttctcaatttcaaagtccagaaaaggagaaccaatagggtaaggaggaagaccccctcttaattgttctatagaagtagacagaaatatctttgataaacaaagggacaaccttctgacagaacacaaataacatttttcttctttcagtcacctctaaagcctttctgaaataggataacactaaacatggaccctggaaaggacctcagggagcttctctgtacactgaaactaccacagaaatccttggatttgctttgattgcaaaaacttgggtcacatggctatgcataagtcaatcgttgtgacctttggatatggaattacactaatgggccaggacttccacaatgtctaggagcatgtgatgtcttctatagcactcctggagccaggatggagccccacctgatctacacacattgcgagtgagacacagggacaattctccaagggatattcagggtcctcctaccaggaaaggggagacggatgctaagcaggcaaaaccagtgtatgactactaaatatgaaaatgttaagtccaaaaacattacttccaggttttgttaagaggtagcctcagagataaactcaaaatttgaattggattgaacttgcaaagatgaaggaagaagaaggaaaagtcattgtgcatttccttgcatgttaattgtatcctctaaaatttaatttctatgaaggcaagggatatgtctgttttgtcgtcttgttcataattataaccccaatgcctagaaaggtgtctaccaccttctacatttataaaattaaaaataatataaataccttagggaccattcaacataaacttcttatattacaggtgagagaaaaggaattaagatgtgctgagcatgtactatttccaggcaatctgttaggcactctacttaccatcccatttaatttttacaacaacctgcccaagaaagttttactatatctacaaaaataaatccagggtgtgggcggttgaaatgaccagaccagggaacacaactagttaatgggaggataggggttgttcattgaagcagtctctaaaggggcagctagaataagtgaacacatggaccatagaaaagaagttatagagtcaatgctcatagggaaaaagaaaaacaacatagttatctttggccctacatgttaaaagcatagatacacaaactaaacacaatgccacaacttgtgacaaatatggtttcctttgccagcaggcttcagctccgtaattagaaacaaacagttgcctgcatgccagtgcgcagaaaacgtgcagctttatgccagaaacttggaatttttttctgaaggcatgacactgaaggtaaattcaaagaagctttttacagggcacataaagcagaatttacttccacctcttatatgaaatcaacagctcatctgtacaaatgaagatt

SEQ ID NO: 315523 - DNA, 4001 bp, Homo sapiens
catggtcaaatttatctaaagccaagccacaaagtcactgtggccctggtgttcccaagttgcaaaggaagcttcagctctgggtagattcactcgccgggtttctgtttgataagataagaggaggcatccgctcagtgtcttatgccaatatgaaaggcatctcacccatcagtgtgacaagtgaaatcctggaatgaagccagggaacaaaagggaagaaatgtggattcttaccaatgcagttgataccattttttaaggggagcagatgatgaaggggaaaaacaggcagagagtcagtgccctgcatcaaaaaccttggatccttccctgaatgagtcagggtgagcatttagttttgaaatggaatttctgtttccttttattttctttcttttttttttttttctgtaagaactactaaaggaaactgttgtaaataacaggatatatttttgaggctgtggatcatataagaactttgaatctcaccccagggctatttatagctcaaaaatttgttctttttttctatttcaagtgatttttgagaactgactgatatgtcttcctctggtgtttctgtatatgcctgaggtgtgatgtattactggaaagcagaaaggaacactctaagaaagcactttttctaagatgctaagagtcaagggaaaatgaacatacatgttgcaagctgatgcaggaattaaatattccactgtctgtcattcctttttatgagaaccctataccacctgtggtgcctctaacattgggtaacaacctgtgctacgaaagggcagtttatacttctgtctaccaataggtggcatcaaaatctctagcttttctttcctgtattttaaaaaccataggcagagggcattttctttctgagattttacattttatcatgagtgatgttataaaggccactaaatagctctgtataatttcagagcagattttcctattgctctattaatgaggtctctcagttgtccctctgagcctcagttttctcattgtaaaaagaaagtatttggattgaactccagctccaagattctgctttttaactacataatatcttcccagacacaccatttttcatgcctatgataaacccattagcactccattcctctgggcttaaggaatattagcaagcaaatatcccttggttgcagaggctgttatctgcccagcctatattcatttttgtttgtttttccttactaagaaaaacataattttgtggagggtagcaacgtgtttagctccaaaccttcattttccagcttttcttgcagatggggtagtgatgtgattaaggtctagccctgcactatttattgtggtagccactagacacatgtatctatttaaatttaaatttattaaaatcaagtaaaattaaaagttgattttgtcagttccacaagtgacattttaaatgctaaacagtcataagtggctagtagctaacatcttggatagttcagatatagaacatttctatcattgcagaaagttttgttatatagcactgatctagccattgagatgagatgtcagtagaagttatagggcagtttctgtgagagttttcaaagagaaggagatactgaatcagctgggatgtacctttatctctttacctcttcctttctttctacctgaaggttacagtaagtcagccatcatgtgactatgaagcagcaagcatttgccaaggcaggttaagcagaaagataaaaggaacctggggctttgatatcataaaggcaacaacattattgtcagctgtattaggagaaaaataaagtcttccattgattcaagctactgttttcagctttttattacaaatagctaaatattatttctaactgatataccatcagaaacttacctggacaactttctattaatgactgaaaaagcgtgtgtctttccagtttcctttactttggttagagttgaggactagactctggatataagaaacaaaacaatgtgtacaccatgaagtgataagtattaatcattcatttcaatatgtccaatggaccaaaaaaggggcagatgggtattaatgattcccaaaataaatatcccctgttttaaaatttggctaaagagtagctttgcattttcctggaaaagaggttggtgggaaaaaaaagataatatttgaacctgtactatatgctagaaacttggctgaatgatttgacattatcctatttaatgttcatgacaatccaataacgtaaccactcatatctcccttttgtgcagataacaaactgaggcccagagaaatcaaatatgttgtcaaaatctacatcgttgaagagatgggtttcaaatccaggtcggcttggcccttgccacgacttcataatgaaattccatgggtgagtgttaccagtttctggtccatccttgcttatttcaagggtctcatcatcccatccactgtatcactttttttgttacaggctttactcttttctaccatggaaaagactaatgatatttttttctccataagcttggaaatattatcaatcaccataaaattcagccttcctctggtaactttggagaccctcagagcttttcttatttccagagacaggcggtttggatgagaattattctcttttttcacacaaattggccagatgacatctttactggtatctgaaatagaagcagaaaacaacttggaggacacaaaatgtgaaggttggagaaatagctttgaattcaaactgaaattaaatagtttcctttgttgaaactcacagaggaaaacaagttacctaaaaaacttattaagacttttactagaattcatgagataattgtaagataataaaaaagtcatgtaaagaaaacctaaagaattcaaagagaaaatgagaggaaaacaacatcattgcagatcttaaaatcacattctgtaaaaatcagaaatgaccatgcagaaaacacagagcagtcacagagggcaaagtaagtgatgtttatggtgacctgaattgttaagaggaagttcaaatatattctgagttactgattaagaaatcaaaaaatgttttataaatactctttccaaaagatgattaaattatttagaaatcaacccatcactaagatcagcctagattcaaggggaggaaacatagacccaccccttggtgagaggaatatcaaatgattttcagatgttttaaagccaccattccctcagtcctaaaaatgctcagtcctttccagctacctgtttctaatgccctcagtatattaaaagtacatgagatgtatatgaaataaagatgttctaggcaaatgtataactcttaatagcagtttggagattaagcccaagtttctgtctggtctctttcactagtcaactgagtcccaagttctccttgtgccccttcagtgccagtgcagattcctacaacaccctttgtcctagatccccaccctacattggctatatcaagagtatcagtctatcagcaagaagaaaaaaagtctctctccagaaggtttagagcataagacaccctcaattccatttggtcttcttccccttgaacgtcaccaggggcaggatgcactctcatccccacctacggtggcagagggaaacctaaacaatctacaattctcatgctttttcctgttctctctcttagtttatttgtgttgctttaacaaaatgccataggctaggtactttataaacaatagaaatttatttctcacagttctggaggctgggaagtccaagatcaaggcatcagcagttttagtatttggtgagggcctggtctctttgcttccaagatagcaccttgttactgcattctccagaggggatgaacgcagtgtcctcacatggtagaaaagaagggagggcaaaaagggccaaactcagtgtaaaacccctttcataaaggctttaatcccag

SEQ ID NO: 315524 - DNA, 4001 bp, Homo sapiens
aggggtctgcgagcaatctctgccttgtagtgggtcatcagtccaagcctgttctccacaataccacccccacccccaacctctgcccagccccattcagcctcaccttctgcaggtcccagcagtggcagccaagaaggaagaggaacagtgagtagggggcacaggcaggacactcaggcaggaggagagggaccaggagggtgggttgggggcctgaagaagatggggtctgggtcgagggttgggaggagttctgagagtcgttgaacacatctaagtgcctcctgtgcgctccgccaaccctcgaggaaacgtttgctcaccggtttggagatgttggttttggagtccacgttgtacctgggaaaagagtggaaccggtgtggggtggggctgggtgggggagagggtggaaaggggtcgggcaccgagtcttggtgaaaattttgggtggagggatgggcggccgtggacccgaattcagctttggtctccttttggggaggagtcagggtgggctgagtagtcagacggtcaagcctgggccgaggccaagtcaggggctgctgggggcagggttgtgtggaaggggtcgggcctgaggtggagctgcgataggagcagagttgtgggcggggccagagcgggggacggaactggaccgcatctcataaaagggcagggctcaggctagagggggccattcagaatgggagggaggcctgcgagaagaaccaggccggaggcgaggcgggggtggggccagccagaattccgggcggatccaggtcgggggcgggccaagccagaattccaggcggggcctcacacatcgaagcgcagattttgcttttcctcaaagaaatagtcgaggacgaatttgcgcacgaagtctgggttcagcgtgttatcaatcacctcggtccgtccgaactgggtaggggggtggagggtcagcgtgggacgtgcagacgggcaggggaattcccgggcgacgccctgggccgggagggggctctgggactcacctcccgccactcctggctggcccggctctgcgtgtaaagcaccaccactgcaggtgggggcggggagggaaggacgtcaggtcggctcccacccctggccccgactccacccgcccctgagtcgcgcccagaccccaagttccccctcccggtcctggagccgcctactggggtcggacttggagaaggtatcaaggtctagcaggttcctagagaaaagcaacagacagacagagtggatcatcctggagtccgcccgcctcgagtcggctctgagccgggcactgaggagaggcatggggcccgcatcgaacctctgtcccccatggctacccccagccggggtccgctctgtcagcactctggacagcaccggaaatcgctgtccaggaaccatggctctgcggactggacgcgaacgcacccacactgtctccaagggcccaggaaagagggctcgccccagaactttgtcctcctggggccgagctcctaccggatatctgcgacccaccccctgaacccgcaggctgagcccttttttcggggtggggctgcccaagaccccccgcttctcgatcccaccagctactcgccctgtcatcagctgtgattttccagccaatttcgcctctccccgggggtctagcccctgcccaggctgagccccgcggctggctggggctggggcagtgccagtgcctaagccctccccagcgcggcccgctcaccggcaggacacggtaatttcaatcttggtggccgggacgctgcgctcggaggctccgccgagagacatggctggtcgggcgaccagagccgcaggaggctgcgagaccagggctgctggggctaggggcgacggcagcggcggggccggcccatgtgccgcggtgtcggcggcggcggcggctgcactcgctccagccctgcgtgcgctccagccgctcgcgccctgacagtggccgccggcggcagcggctccagatggcagcacagccccgcccggccctgcgggcggcccccgccccattggagcagcctggagccagcggggaacctcaccccgactcccaactccaacccacaccttggtagagtctgccctgcgcaagtctctggggtggaaacccaagccccctagagttgtccatgatgctgaaacatttggggcacctggtgggcactggaattgttgcctcttactgagccactcccttagtgtttctgtcttttcccactcccagcctgcctaggtctctgaataggaaaagtacatctcttagtagctgtgtgaccttggacaagttactcaacatctctgtggctcaaccgtgaaaggccgtcagaaaggcctttaacagcagctactttaggtgctgtaaaattttactgagataacccaaggaaaacacttagcacacagcaagtgctcagtaaacattcactggtatttatgatttgtcctctgggtattcacaatgatgacagtaaatggtggctgttgagcaccgtgcaaagctgtctgcccatgcctttaaccctcacgactttcatggcgttacagatgcggacacactctcatgacgcaatctactgtaggttacactgtagaagagggtggtggtcagccaggctctcacccaccacacatgcacaccaattgctatctccaaagcttcagaagccagtccttcctccataggcagggctcaaggtaggggatgcaggtcacccgtaccaggaccctgctgcctacagaacttgttaaagatgaagatcctggtcaggtacggtggctcatgcctgtaatcccagcactttaggaggccaaggcaggcagatcacttgagctcaggagtttgagactggcctggccaacatggtgaaaccccatctctactaaatacaaaaattagctggggatggtggcacgttcacgtagctactcaggagactgaggcaggaggatcgcttgaacccaggaggcaggggttgcagtgagccaagattgtgccattgcactccagcttgggtaacagtgagactccatctcaaaaaatctgaaaaaaatgaagatcctccagctcctaattcccaggcaacttccttagcaaccctaaggctaaagctcaggcagccctgggaatgtgcacagctcatcaggctctctaggtgactaggacctgcttaggcccgagaaccactactctcaacagtcttgagtgttgtccccactgcagggactaccatggctcatgagtggagaggtatacctgtcgccagttctcttcctgtttcacctgccctccacataaaaaccccttgtccagcacaaggaaggacaatgagaaccttcctagtagctccacaaagacaataaccaaatgatgacacaagagtggctattcaaaaagactttgattttattttgtgatctgtgtcaaactgcctcattctcagtgcaggtgatccctcctccccagaaacaagaactgacaggtagggtctttgtgaagtcatggcttccacaaggccccagggaaaccccacacagttctgagagttgatgggaatcccagcaaagatggggtgggtgggagacagtgacaagaaggggtggtggtcaccagtcaagaggctgggggttggaaaaccctgtctttggccttgctcagctttggggctgccatgttcatgatggagatgggggactgaaatttcccctgacctggaagtaccccttcggccaggcatggctttgattctctgctaagggctcagctgagagaggagcaggaaaatgtcatgggctggcttcttcacaaggcattgctgctgatgctccggagtccaacaccacgggcaaattgctccagcaggcccccgatggcaccggaaggactgggggctactgcccgaagccccactgtgctgctgtacgcagccaagaaggctgagcgcacctcc

SEQ ID NO: 315525 - DNA, 4001 bp, Homo sapiens
acagtaggtaatcaaattctgaagggattcagaaccttagagtgagtgagacgcacattagtattcacgtgtatcagccttactaattttttttcttaaggtattagggtcactgcaagggcaatgtttcatgaaagttcatgtttggcttgttttatttctaagaacatttagagctggatgggacataagatgatccagtacaaccctcatatattccaaatgagaaaactgaggaccagaggggcaaaacatcttatccaagatcaaactgctgacaagtggctgcaacaatttgtctaaatgctgtctatgcttcagacaatattctaagcacttcacatatattccatccatatatatatatatatatgtatatggatatatatatatatatatgtagtatgaggattaaaagagatgaaatacatatatatttcatagatgggaaaacagccataaaaaagtaacttctgaggatcacacagctggtctagtacttgaggttgtgtcctggttcagtggtctttgcttgaaaacataagatggaaaactagactgaacttcatttaatatagatgtgtcagtatcacagctcaaaatctgccggtgagaagctgctgttgtatttccagctaggaaaagtcaggaatctttcaagtttccactcaagatgtggggtttcactgtatgggcaacaacatggtcatgaatgtacgcctctacgagaactgggttttgatgctcaagtattttgatattggaagagaagattttcctagcaggaaatctgatgcgtgcatttggtagtgctactgagaaacgaatcaaatatatcttgtgtaacagtaaaaagaagtgggaagattctgacacaatgacatcctggctggaggagtttagccgacacttagcgcacaggagatgagttctttccatctcctaaagaggaaaaagggcaaattcacccagagaaggagagaaaatgtgttccataatctattgaaatttatgttcagtaacgaactttggacatctaagcttgttagctgcaaataccccttaagagttctacaaaaaaatgctgctacggaattgcaaagattttgaaatgcagtactacagtgacagctgatccgggtccatacctgcaagcagagggctagtgaccctttcgtgtccatctttttatcagcggcctctaaccaagcggcctctctgtgggtaccccctacctaccccatcccatattgtgaactattatattttctgtctgcaacctggaacctgaccctttttccctgtctccaactcccgccaggggccggcctccttaccttccttcctctcccaccggtccacagaaaagttggcgcccccgtctacctgtgccagagcctggcacacctgggcctgggtctccagaatcagcagctccatcttggtcttcatgtcgcccggcctccttcgcagctcgcccaggtcggtcacaggcggggccatgaagctgctgcagcggtgggccagctcatcctcctcctcctccggcctccccagcgaagtggcccgcgtccccgaggtcttaggcaacatctccgcccgctgcacatgcccgaaggcggcggtggccagccccaccaaccccgccagcgccgcggccagccctgtccccacccaggggccgcctctcgacgtcgagccgtgccccagcccgcggctctgctccgtgccagccgggccagggggccggcagacgcgtccggctgcgctgcgctgggaccaggctcggagccctccgccgccgcactgggaccaggcgcggggccctccgcagccgccccgcgccacgagccagcaggggcccgagctcagcctgcccagctgcaaggccatgttcccgcactatcacctggagcagtgcctgcgtcccagagccctgcgtttgagccccccacccagacccccggagtattgagccggcgagctgcacaggcggaaagaacctttcgagaagagccgctgcagcgtcgggctccggaggcgggggcgggaactggggcgcgctgggagctgtagtccggatcctatcgccgcctgcggcgtccctgcgcggggcgggagataagaatccgacgcgcccagaagggctggtccgaagggaagagagtggggcggggacggtgctgtggaagggacgggagagataaaagaggctttcttgtcacgtacaacctcgggtcggctgtttactcagccaaggagagaagatagagtagggctgggaggctgagggcggactggggcggaaatgtggcagagatcccagtcccgcttacattttcaaacaggatttgcgaatacagagcctggctcaggatctgtatagacccgcccttcgccctgggtcctggtcctctagagtttttagaggggatgggcaggctgggaaactctttgctgaaggatggttttctaaagagagtgggagaagctagtaatggactcggaagagagtcgaggagaagactttctgtgatcgagtccacatcacagttctgtccttaagatttccccaggctggggccgggcgcggtggctcaagcctgtaatgctagcattttggaaagccgaggcggttggatcacatgaggtcaggagttcgagaccagccaacatggtgaaaccctgtctctactaaaactacaaaaaaatagccgggcgtggcggcgtgcacctgtaggctcagctactcgggaggctgaggcaggagaatcgcttgaacccgggaggcagaggttgtagtgagccgagatcgcaccactgcactccagcctgggtgacagagtgagactctgtctcagaaaaaaaaaaaaaaaaaaaaggtttccccaggccttgcttctatagtgcctacttgattattttagaaaaaggaaaagcaacgtgactgttttggttaaccagtagaaaattcctgacttggtgtgttttggtgattaacaaataagaatttaaaaaatagttattctactactgtagggtgctcccaaatattgctcacgtttaatacttacaacaactgctacaaactaggcaaggcaaatatccacacttcctcctactctgtctcccttcccccaccctttaaagaaatgaggaaagaagctaatagatttgacaggcaggtctttgtctcccctgtaaccataccacagctccatggttcctggacgtaaaagtgtgagaactattgtcatgggctaatttgtcccataagtctccgggatgattttaatttctagtagtagataataatttaagccactggtagcttttcccacaagtgttttctttgtggcaggatgcactgatggaacttcaatggcttttgagtcagatcaattggcatcttgtccacacacaactgtacctggcagctctcactgggacatgatgttagcaaggtgggtgtgcttgccgaagcctcaccactgagaatctgtgaaaagtaaaggcttggattgagaagtgactaagcgacttttagggaagaaaaacaattagcttttggtcatagtgcaacctgccaggaggccaagttagaagtggaggaagggaaataagaattgtcattgtaggaagggttgatggcctctactggatgcctgtgatggggttgggctgggcctggtgatgataaatgaacctcatcaaatgaaaaggaacctccctggtacgtttatttgtaagaaaccccctcattattgctctaattctgctaaaaatacccataaagttagtaaagcccataaagttagttaaagctaagtaagaacagactgttttgaacatttgcccggtcacaaaggctgatcctgagcaaattgcatactagattccaggtttccatccctctcatccttagcctctctatacgaagggcctcactcctttcttcctctggttcctagcaccctccctactggcaaactgttattcaa

SEQ ID NO: 315526 - DNA, 4001 bp, Homo sapiens
ttctttagtaacctttttttcataaatatggctaaaaaccactttcccctactcagttatgtttattaatgtttcatttgcctaggataaactcttcacatctcaaatataaagctttttgttggaacttagaggatttactcttcagaacaactcgtactacatggaattatggaaagcccagtgtttccctacaaataaaatttacgtaatttggagaggcattattgctatatctacaccatctctgggccctctcccgacgcttttctgaaaaacaaaaaacaaaacaaaacaaacaaaaaaaaaacaaacaaaaaaccacgctgactgttcagagctatcagtgaagtctgatgactcatctcatgcagaggcacgatgtgaatgtcgacagaagatcagtatcctccctcttctattcaccattctccctgaaacaccggatttggcacagagagtagggctaatgtctctgaaaaaatagctcagctttccatcaaaggctggcacacttacccttgtgtcaactcagctagaatggcttcgagaacaaccagtgactatggtttatttttacagaaaagttctctcctatatggtgggcacgcactcagtctcttcctcttttaatccatgctgctaccagtggacaaattaatcttccaagcatagatttctttaggcaattacctgaaacctaaaactgtttcttggcaatccacaggaaaaacccaaacccactggcaagagatgccagtttcccagcaacttagacccaatatacctcctaggccttatgtcccacaaccatatcctaaatatgtgcttttagatgtctcctgatctacctgaaaggctttttcccaaatcctctgacccttaaacaacctctgcctctgaagagccacaacagcattcatttatctggccctaaatcaaccgcctctgcagttgatttacgtttagttatattctcagcagccccgcctagacagtaaacctcaattatcagattgtgtattacctctcgtttcatctccacaacacctaacatacttgtcatataacgaagggactcaagtaatactttcaagtttggatgatacaccttttggaaagcatctcttgaaaggcattccatgaaaagtttatgcaatattccatgcatttttttttttgttcagtatttcaacacaaggccaaagtctaaacatttcacacaacatacaggaaaaagaaaaactaagtatctctgattaagcataatcgtacatgcctgagaaagaccgatagtaagaaaaacaaaacagagaagtggtttagagatataatgacagacacacccgggttggaatcctgactctgctgtgtgaccttgggcaagtcattgaactaatctgcaaatccaatactcgcttatcaaatcggaaactgaaaactgatgtgggaaggattaaaaggcgacatgcatgcaaagcgttaactgcacggctcgtaacatggtaagtgcttagtacatgttagctgtcactcttattaaaaggaaggagaccagcaaaagtaaccgctgtgaatctgacccggtcctctagtttcagagcatttcctaggagctaaactcagaacacaaggaggatggagaggatgggtttcctgttcttaatagcaaatgctccccccgacaccctggctcacggctcggggcaacagagcagcgaagaaagcgccgcgactccatcgctggccgagggccgacgtgaagcagctttccggtgcggccctgctgggctggctcgccaggcttggcgcccccacgcccgcctcccaggcccagctgcaccgctagcggctccgagcctcgccccactcccgactacagggaactactccgggcggttaccaggcaggagcggcaggtggttgcccatgttgtgcgcagcgtcctgctgatctccttcgccggccatgtctgtttacccgcaaaggaggctgggacagggcggtgccgaagactccgagggagggcccgtgtcgcgcggctgccgcgcaccggggccacagcgccccctggcggccccaggggagcagacggcggcgcgtacccaagcctgaaagtgatggcctaggcgggagggacaattacaggcctgcgctccgtcccggggacagaacgccgtcccctgccatccacggctgagtgcccggcgtacacgctgcagagccctcactttgttccagcccttagcatgacttatttaatcctgatattttgcatatggagaaactgaggctgagagcctttagtctccaccttgtttttaaacgaagggggcagggagcaaatagaaacctgttcatgcagcattagtttcaattcttaaaataagaagcatatatgtgaaggctggggaaatccatcagttattccgagggtggttgaattattgctgattttcttcagtagtttcaatgtatgtacatacaacttcaataacttcagtagtttccatatatgtacattacattccaaaattaacaagtattaatcagaaacatacttgaaatgatgattgcacagaatggaaaacgccttataattggtaaataaaattgtctgaatataaactagcctactcattatgacttcagctatgtaaaaacaagtcactgtggcaaaaaagaaagactatgtaaaaaatgaagataattctgttataatggtggagttgtgactggtaagatatttgttttggagggaggacaaaagttttcgtagtgtatttcagtatcactttttcagcgaggaaggaaaactgaaaaatccttaaatgaaatacaacatctaaacatggtagtggtggtggtgggcggaggctgagaggaagcagcagcattgctcaacagaaaagtcatggatctgagatttgaaaaaatgatttcagaaaatttgcctccctgataagttacaagcagaaaactcccttgtgacagaggcttgtgaatcattcctgtgtcattttgcctcctgtctccgaatcagtctgtggtcttcgtcaaatcacttatggctgcgggcctcaattcgcccatttgcaaaataagaacgaaccaaatagtgtcgcctatttgttccagttaataatgtctgcaacatgaatcatagcatcaccttttacgatgaggttaataacaattacatatactacgtaatgatttaacggagttaaggtgatcactccagtcaattgaaggatgattctatgccagaatgccagcacagaacgatgagggaatggccggtgtattggtgtgcgtgtgtgtgtgcccacgtgaaagagagagagaacgcaagcaagcagggagcatgcactaagtaatatgtgtgtgtgtttgatgctgtaacattatgtctcactacagtttgtagaatttcaataacctgtgcttacgtgcagtagaattttctttacacaagcatctagcttctgaataagtaagctctgactttccagtctttctccccagaggtgataccagaattgtctgaaccctgggtcaatcaagacttctccggacgagaaagcacagctgcaaggctggtggagtctacaaatgtggctggagaagcactggctctttctctgttcttttgtgcattgctacagatcaccggagctcacatctgtgtatcttttactccccaattctcctcctctcctctccactcttcacattcaccacctgctccctccttcattttatccctccggagtctacctagtcatccacagctacacctttcagtagggataacagatgatcattgaacaaaaatatctaagcaagcaggtttcttggattaagcactggttattaaaaccaaaaggaaaacatggtcatttaccatttgtttaatttggtaactttatcctgaaagaagatatcatactgagttgttcctaacatttcctcttgcttgcgtgcagtatcaatggata

SEQ ID NO: 315527 - DNA, 4001 bp, Homo sapiens
tgtctaatggacatttcagcccaatacgttcaaagaacaccacatcccacccctcccctaaaccttctcggtttcgcatctcaccatcttagaaaacagctgcactactcacccagttgctcaggcccaaaatctagtaagcatcttttattctactgtttctctatacccataatgaatctatcaccaggtcctattgttctctctgcaaaatatacccagactgtgacctcttcatcatgtcctccactagataccacactagcttgtgttgcctttgtacctagatgatgcacttgcctcccaaactggtctccctgcttcctccgcccttgccccttacaatccgtttgctacatagcagtgtgagtaatctttaaaggtgtagagaagacagtatcactttttctgctcatagccttccaagagcttcccattacactccaaaaaaaatctaaactcttttctgtagccctcgaggcttaagcctttgccttcaccttctagcactctccccttggctcactccactccagccacttctcaaatacaccaagctcagtcccatcctctgcccaattccctccctgtcacatagctcgcttcttcacttcctgtctctctgttcaaatgccaaaccttgaacaccttgcctcccaccgtcctgcagtctaccgtgcttcactgtttgttcttcatctgacataatattattcacttactcattcactgcttgtcttctctactagaatgtgagctccaggaagggggcattttgcttgccttgtttactgctatactatagatgttcagtgctatttgttgaatgaataagtgctccccaagagttcctagccctacaccagcagagcagagatttggcggggaggggaatatacaccccttcccccagcagccccttacctgtctttgtatttggacaaattctcttcctcccaggcagtgtttccacctccaaagttgtcccggatggttctctccaggccctggaaacagaaaattagtaatagctaagtacagtgcctggcacatgctagcacttcactgttctactgactaggaaactgaggcacagaaaggcaacctgcctagggccatacaactagtaagagaccaagatgaaacttaaatccacgcagatttgcatcccagagttccccactctaaatcgctgtgttcccctctaacgaggctgccggtgcacccaccttgttaaagctgtcaaccagtccccggcaggtatgacacggatggggctgaggcgggggagaagactggggaggtggagagggctggagccagataggtcctgggaggttgaggaagaggctgaggccccagagcatagctgggactaggcccttcgggggccatggggccatctttacccaggctggggacctgcagatagagggcgtggagaggcttcactgaaggagtcaggccccacgcgagaaagaaaaaggtctgttctaaggtgccgtggcgctgggatctgcgttattacaagcaaaagaggccaaactgggtattgcaggggctgtggggatgggtggggaaaggcgcataagatgcaattccagaagagaaataagttatcctcgctagcatggggtggagaggaaagtggcctcgctccttgacaagggggcagaagtcagcctcttgtctgagggtctgataaagaatattaggggccggatccgcagaattagggagaagagatcagattccaagtactgaaggagaggaggccagaggggttgtcttgggggaggtgtccggaaccccgggcttggagggaggagcccggatccggatatgaagggaagggatcagattcagggcctcgcagaagggcaaaggcacggcccacgagccggcagagaaggatccagaccctcgtaggccacggagaaggaagaagcgaccgccccagcccgcgggcgccgtgggccgtctcctcaccgcgtcgctgccacagcctgcgtaaaacgcacaacccccacccgcgccgcagtccagggggcggagcttgccgcccagccaatggcgacgggccatgtgccattacgtcaccccacgccagccaaccagaggcggcaccgagctgcacctgtccgggctttaaagggccgcggggctagggaatgacgtttgccagccccgccactgaaacggagacgcgtgtgggccacatgggtagaaaaacagcgtctgcctttatttaagtcccgtcccccgccccaggtcccgcgcctggtcccaccccgcgtcccggcgcgggagtccccgggggatggaagtagctatccagggctggctgaagggcccgggacacttgctccgctctctcttggagccgcccggaacgcggggcgcgaggctgctgcagggcccccaggaagtctggcagttgggagggcagtgtgaagacgggcacggtgcggaaaagggcgggtacggcgtccgggtggagcagcctgtcgaagcaggcccccacgtagctgccgggcgcccggccctgcaagaagtcgggcagcacgcagctgagcgaggcgcggaaggcgtcgtgcgggccgtgcgccccgggcccggacaccccatcctgtagccactcgctgcacagcgccaccgcaccgggagagaagagcaagaccaccacgccgccctcctgcagggtctggcgccgctgcgcgtgaaaccaagccacgggcccctgcgcgctcagttcacgacggctccacaggtctacggccacgcgcagcggcagctggcacagggccgacgccagggcgcccaccaggcgctcgaaacccgagtcatcggctgagtagaggagcagagccgcgcggcccctggcggccgctgccggagaaaacagatggggagggaagaggtgagctggcacaggcctggctccccgggggcggccctccgcccagcgcttgctcccactcaccccccgagcggacgtcctgtttcaagagcctcagccaccctgttaggggagaggggcggaggcagccagtgagctcggccgccgctttccctcggagaactcccacagccactctggtcctcccccaggggaatggggagccgggaagcgctcacctttcgcgtgatcctttttgagaaggaggatgagggaaagcgcagcggcaaagagtaggcaggccagccacacgagggcccagcgcttgtggatgtctgggagacccagagaagaagagttagaaacttaccctccacagagaagaaaaactgagacttaacagaaatgaattgggccgggtgcggtggctcatgcctttatataatcccagcacttcgggaggccgaggcgggcagatcacgaggtcaggacatcaagaccatcctggctaacacggtgaaaccccgtctctactaaaaatacaaaaaattagccgggcgtggtggcacacgcctgtaatcccagctactcgggaggctgaggcaagagaatcgcttgaactcgggaggcagaggttgcagtgagccgagatcgcgccattgcactccagcctgggcgacagggtgagactcctctcaaaacaaaacaaaacaaaacaaaaaacgaagaaatgatttgcccagagtccacagcacagtgtcagagccagtggatgaatatagctccatctgtttaggggtctttgaataagtaatgtcaccctctgcctcagttttctcctctgtaaagttgtacctgtgtcatagggttggtgtgaggactaaatatattaatacatataaagcttaacacaatgtgttaatacatacttaacacaatgccgagcatcttaagtgctaaaatgtcagctgtttttctcccctaagctagggttgctgggcccttgatcttgctgtcctgggtgtctgcaactacctggtgtccctgccctgtctttttttttttttttttacctccaattgatttgccttgaattgattca

SEQ ID NO: 315528 - DNA, 4001 bp, Homo sapiens
gtctaatggacatttcagcccaatacgttcaaagaacaccacatcccacccctcccctaaaccttctcggtttcgcatctcaccatcttagaaaacagctgcactactcacccagttgctcaggcccaaaatctagtaagcatcttttattctactgtttctctatacccataatgaatctatcaccaggtcctattgttctctctgcaaaatatacccagactgtgacctcttcatcatgtcctccactagataccacactagcttgtgttgcctttgtacctagatgatgcacttgcctcccaaactggtctccctgcttcctccgcccttgccccttacaatccgtttgctacatagcagtgtgagtaatctttaaaggtgtagagaagacagtatcactttttctgctcatagccttccaagagcttcccattacactccaaaaaaaatctaaactcttttctgtagccctcgaggcttaagcctttgccttcaccttctagcactctccccttggctcactccactccagccacttctcaaatacaccaagctcagtcccatcctctgcccaattccctccctgtcacatagctcgcttcttcacttcctgtctctctgttcaaatgccaaaccttgaacaccttgcctcccaccgtcctgcagtctaccgtgcttcactgtttgttcttcatctgacataatattattcacttactcattcactgcttgtcttctctactagaatgtgagctccaggaagggggcattttgcttgccttgtttactgctatactatagatgttcagtgctatttgttgaatgaataagtgctccccaagagttcctagccctacaccagcagagcagagatttggcggggaggggaatatacaccccttcccccagcagccccttacctgtctttgtatttggacaaattctcttcctcccaggcagtgtttccacctccaaagttgtcccggatggttctctccaggccctggaaacagaaaattagtaatagctaagtacagtgcctggcacatgctagcacttcactgttctactgactaggaaactgaggcacagaaaggcaacctgcctagggccatacaactagtaagagaccaagatgaaacttaaatccacgcagatttgcatcccagagttccccactctaaatcgctgtgttcccctctaacgaggctgccggtgcacccaccttgttaaagctgtcaaccagtccccggcaggtatgacacggatggggctgaggcgggggagaagactggggaggtggagagggctggagccagataggtcctgggaggttgaggaagaggctgaggccccagagcatagctgggactaggcccttcgggggccatggggccatctttacccaggctggggacctgcagatagagggcgtggagaggcttcactgaaggagtcaggccccacgcgagaaagaaaaaggtctgttctaaggtgccgtggcgctgggatctgcgttattacaagcaaaagaggccaaactgggtattgcaggggctgtggggatgggtggggaaaggcgcataagatgcaattccagaagagaaataagttatcctcgctagcatggggtggagaggaaagtggcctcgctccttgacaagggggcagaagtcagcctcttgtctgagggtctgataaagaatattaggggccggatccgcagaattagggagaagagatcagattccaagtactgaaggagaggaggccagaggggttgtcttgggggaggtgtccggaaccccgggcttggagggaggagcccggatccggatatgaagggaagggatcagattcagggcctcgcagaagggcaaaggcacggcccacgagccggcagagaaggatccagaccctcgtaggccacggagaaggaagaagcgaccgccccagcccgcgggcgccgtgggccgtctcctcaccgcgtcgctgccacagcctgcgtaaaacgcacaacccccacccgcgccgcagtccagggggcggagcttgccgcccagccaatggcgacgggccatgtgccattacgtcaccccacgccagccaaccagaggcggcaccgagctgcacctgtccgggctttaaagggccgcggggctagggaatgacgtttgccagccccgccactgaaacggagacgcgtgtgggccacatgggtagaaaaacagcgtctgcctttatttaagtcccgtcccccgccccaggtcccgcgcctggtcccaccccgcgtcccggcgcgggagtccccgggggatggaagtagctatccagggctggctgaagggcccgggacacttgctccgctctctcttggagccgcccggaacgcggggcgcgaggctgctgcagggcccccaggaagtctggcagttgggagggcagtgtgaagacgggcacggtgcggaaaagggcgggtacggcgtccgggtggagcagcctgtcgaagcaggcccccacgtagctgccgggcgcccggccctgcaagaagtcgggcagcacgcagctgagcgaggcgcggaaggcgtcgtgcgggccgtgcgccccgggcccggacaccccatcctgtagccactcgctgcacagcgccaccgcaccgggagagaagagcaagaccaccacgccgccctcctgcagggtctggcgccgctgcgcgtgaaaccaagccacgggcccctgcgcgctcagttcacgacggctccacaggtctacggccacgcgcagcggcagctggcacagggccgacgccagggcgcccaccaggcgctcgaaacccgagtcatcggctgagtagaggagcagagccgcgcggcccctggcggccgctgccggagaaaacagatggggagggaagaggtgagctggcacaggcctggctccccgggggcggccctccgcccagcgcttgctcccactcaccccccgagcggacgtcctgtttcaagagcctcagccaccctgttaggggagaggggcggaggcagccagtgagctcggccgccgctttccctcggagaactcccacagccactctggtcctcccccaggggaatggggagccgggaagcgctcacctttcgcgtgatcctttttgagaaggaggatgagggaaagcgcagcggcaaagagtaggcaggccagccacacgagggcccagcgcttgtggatgtctgggagacccagagaagaagagttagaaacttaccctccacagagaagaaaaactgagacttaacagaaatgaattgggccgggtgcggtggctcatgcctttatataatcccagcacttcgggaggccgaggcgggcagatcacgaggtcaggacatcaagaccatcctggctaacacggtgaaaccccgtctctactaaaaatacaaaaaattagccgggcgtggtggcacacgcctgtaatcccagctactcgggaggctgaggcaagagaatcgcttgaactcgggaggcagaggttgcagtgagccgagatcgcgccattgcactccagcctgggcgacagggtgagactcctctcaaaacaaaacaaaacaaaacaaaaaacgaagaaatgatttgcccagagtccacagcacagtgtcagagccagtggatgaatatagctccatctgtttaggggtctttgaataagtaatgtcaccctctgcctcagttttctcctctgtaaagttgtacctgtgtcatagggttggtgtgaggactaaatatattaatacatataaagcttaacacaatgtgttaatacatacttaacacaatgccgagcatcttaagtgctaaaatgtcagctgtttttctcccctaagctagggttgctgggcccttgatcttgctgtcctgggtgtctgcaactacctggtgtccctgccctgtctttttttttttttttttacctccaattgatttgccttgaattgattcat

SEQ ID NO: 315529 - DNA, 4001 bp, Homo sapiens
cattccctgcttctgttttaaaactgtttttttttaattgccagaacaaacattcacaaaactgatactttaaataaaactgtaactaagcatagaagtatagaagtaacccagcttttcccctctttggggttttgtgttattttattgctcatataaatacaatatacacgtggctctgtctcggtggaaatctgaaaaaacagatcttgcagtccagaaactgaaaacaaagtttaaaaacaaaaaccttctacctcaagagtctaggatatgccatgaatctatttttgtagtaattttaaaaaacacaatatattccttttaaaatctttctcagagaaagtagaaactgggctttgagagggctcttttagccaaaccctgtgaggacccaccaagctagagcctctttatctagtgacagggaatctaaccattcttaaaacttgtgggtcctcggagtgagaacccataggatagagaactgcaatttgtggctatttttagccagcaatcacagagagaacttaagcagccattaaaaggaggcagtgaactgtgttaaattctagatgaaagagagaaacagcggagagggccaatcctgatgactcacggtgcacgagttcccctttaagcagggatgtgtccttgcaaggagtccctgcccttccctggcctcaatttcatcctctttaaaaggaactagtcagctgggtgcaatggctcacgactgtaatcccagaactctgggaggcgaggtgggaggatcacttgagtccgggagttcgagatcagcctgggcaacgtggcgaaactctgtctctacagaaaataccaaaaaattagctaggtgtggtggcgcgcgcctataatcccagctactcaggaggctgaggtggaggatcacctgagcctgaggaggtcaaggctgcagtgagccatgatagcgcctctgcactccagcctgggcgactgtgagaccctgtctcaacaaaaaataaaaataaaaggtacttgtcggctcctcaggtcttctgctttattatcgcaagtcaccgctcacttgagaaaaaaggcgactttaatggtatatacagaaaagaggcgtctgccctcaaataacagagaacatttatcaggcactttgttgggtgcctggcgctgtactgcgttctgtgtacgtattctctaccttagagttacccttcaagaaaggcattttcatctctagttgagatgaagaaggagacaggacttggaggagacctttggcagggctggatgggagggagccaggtctagaactggaggggcaacgcggccccgggcgcaggggcggggctagggcctggaggctgggtcaggggcggggccggggcctgggacggggcgaggcggacttgccttgaagtaagcgaactgcaggaacttgtagggctcgcggcgctggaagtccgccagcacctcgcggctgggctgggactggcggaaggctggcaggccctgcttgcagcgcttgaggcagtgcgcgcggcgcagcaggcccccgaagaggcgcagctcgggatagctggcgaggccggcggcgggctcgggctgcggcgcggcgctgcagttgcggtggcagaaggcctcgctgtcgcgcagcaagcggtgcagccgcaggctgatctccaggtagcccacgctctcggcccagtgctcgccgctgtacttgtccagcgcgtgccggtaggccgactcgagcggcatcagctcgtcccgtgggaagctgcggaagctgtagcgttcgtattgggcgcgcccggcgcgcagcgcgcaggccacgcacagcagcgctagcagcgccgcggccccccggcgccccggctccatcgcgcccggcgaaaggaaggaaggaagggacgaaggaagggaaaaggggagggagaaggaaaggaaagaggacggtgcgacgcggcgggcccagtgctttcggggcggggacgccagcctccggcccgccccgtccggccgcccctccccacccagccgggggatctgggcgccagctgccagcacctagagggtgcccgggaaaggcgcgctgcgcactggttcacgcaggctgatgcgcatgatgggactctgccgctcattcacttggagacccgcctgcaaggccgacgcggccctaatagattatatacatcggccctacggtctatataatctacgatctttatattcgtttggaggtttgtgaaaacgaagattcctgggctgtgcccccagagtttctgattcagaaagtctggggtggaggtctgacgatttgtgtgtttaaccagcaccctgatgaggctaatgctgcgggcccaagggccgcacttttaatagcactgcccaaccttaaattttagtgagagaaaaagacagtgcaaaaataaaattaataaggatgtcagcactttgtaaactgtatagctagtcaggttgaagatgtgcacaccttatgaatctgcaacaccattcggtggaatatgctggagaagcttgcgcgtgtgcatcaaaaaatatggatggaatgttaatggcagcacttttaaaaaatctttaaacttttaaatcttgaaataatttacaagaaagctgcaaaaacagtacaaaaagttcctatatacccttcatcaagattcacaagttgctaacgttataccacatttctatctttacatttttttctgactcatttgagataggttgcatgtatcaggcccactgtccgttagtcttttttttttctttttttttttcctttttttttttttgagacggagtctcgccctgtcacccaggctggagtgcagtggcgcgatctcggctcactgcaacctccgcctcccgggttcaagcaattctccctgccttagcctcccgagtagctgggatcataggcacacaccaccatacctggctaatttttctattttttactagagatgaggttttgccatgttggccaggctgttcttgaactcctgaccttaggtgatctacctgcctctgcctcccaaagtgctgggattacaggcgtgagccaccgtgcccaaccccttagtctttcagtatgtatgtcctaagaatgaaactaccagacaatcaaatttaggaaatttaatactgatagaagactttaatcatgttccatttccggttatgtcagctgttccaattatgtctttcatggcacttttttctcttaggatgcagtccatccgtgatcactgttacatctagtctatttcatatcctttaaactggttcctcggcttttcttgtcatgccgttgtcatttttgaaaaatataggccaaaacagcaatgagataccactacaaaatccaaaacactgacaacgtcacatgctgacaaggatgtggagcaacaggaactctcattcattgatagtggcaatgcaaaatggtacatacagtttagaagacagttgggccgtttcttacaaaactaggcatactctactcatacaatccagaaattgcacttcttggtatttacccaaatgggttaaaacttatgcacacacctgcgaatggatgtttgtagcaactttattcacaattaccataacttggaatcaaccaagatgtccttcagtgggtaagtggatacataaactgtggtatatacacacaatggaattttattccaagccaaaaagaaatgagctatcaagccatgaaaagacatggagaagtcttaaatgcatattactggttgaaagaagccaaactgaaaaggctacatactgtgtgattccagccaaatgacattctggaaaaggcaaaactatggagacagtaaaaggatcagtggttgctgagaattatggaaagggaggaatgaatgggtagaggacaggattattggagcagtgaaactattctatatgatagtataatggtggatatatgctatacatttgttaaaatccat

SEQ ID NO: 315530 - DNA, 4001 bp, Homo sapiens
aaaattagcgttgatataagcacaattaaaatcttcatcgttgaaaagccataatttgtgccaatctggagatgatgagaatagagaagtggtaggtgaacaaggaactagttgctggaggggtcagctccagtcagtaaagaaattagaattgagaagtgccttaaaaagccaaaatagggcagagaggcaagcaggatttcaggccattactgacatgagcctgaatttgacctgcttactcctttctaacactgactctcaagttcccaacttttgctgcgcctacttgggatttccttgcagactgcgttcatattatccaagactgttagtgctgttacggcggtggcaggcaccacaggctgtctgcccacaccaacagaactagctgacaccctggatgagatctgtcagacttaaaaactatttttaacttctgtgtaactttgaattttaaactctcaacagtcagagcaataatagctgaaacgtcccaggagaataaccactcaattatcgtaggagctttcttggaaacatgtggcatgttattaacagacggtcataatgaaaatgtttcacaagcggggaaaccgaggaacacacaaacgactaaaatcacatcacaaaatctgaatactaatggaattggctcactctcagttctgtttcctatccattttttttaagcccaccaggaaatcttgagtccgaagtaaacacggttttctggagtgtgtccttccaatgacaatggtcattctagtgcaatctcgggagaagacagtgtaagcctctcataagtttaagaaagcgagctgcgttttacttaacccctctttcttcggggggatgaaaagactcagaaacaggcatttaaatgaggcatgtctaaaattttttgatttttgaacatgggaaagtgaaggaaagataaaaatattacagagaaagggtacattttgattactgaaaccaagacagctggaaacctgatttccagaatctgtttgggaacttgaggcagatgtttctaggagagatgagaaataaagaagggtggcgtcatttacatgtccagtccattttggtgaaagtcttgggaacgcattatcacaattccttttaaaaatcattttgagaaaatttaaataagatggcaaaaataccagctgagggggtgacgccccaaagctttaccttttccacttttgccccgatctcctcccacacaagtggtgctgggatcgcgcccccaattcccctggccgacggctccgctcggctcacaagtgtttcccattactgcaggcgggacgccggggaaatcgcttttgccacagaacttggagagtagagcgtgtgtggaacgggaacccaatcacgtccgggcaggggaaagtgggaaaggaagagcgcggagccaggcggggatcgggggatatgcgtccggctgccgggcaagaacttcaccccgatttaacctgcagaggagaggcgagtagtgcggcacgggaacggggcaaggaggaggaaactttagcaatggaggaaggagaacagaaagtggcgagcgaactgcagcctggcccaagagcggcccgctgccggcggtcaggccgggagccttcatcccgcgaatatgtgcagggcccccccgcgaccccctcctcgactcccacctggcagcggaccggcctggagctggaggcgggctcgtccccggcctctcctcctcttcctcttccttgtcccgggaaggacttcggggagcgaagaaccgggagaagctgtgccagggggcgctgccccttctgcggccgctggacatttcccgagggggccgctggcccggggctgtctgaagggaacggcctaggtgttgcctggtgcccggagcccgaccgggcgccgcgggatgcggctagggcagaccgactcgacgcgagctgccagcgcggctcagtctctctcgggcaggagaagtgcggacgcgacgcgctcctcgcgcggcagctcctcacgccgctgcggctgctcctcctcccgccctcgcccggcgcggcccgccccaccccgaggaggagccagtggccgcggcaccgccctgagccgggcgcagccgccaccgctggggcgctacgtggtcccccgaaggcgccggcctgagagcctgaggggagtcgcccagcgtgcgacgctaggctcgggcttacggctcaaacaagttcaggctgcagcctgttgggctttgccttcaattactttctgtgaccgttgtgttttctattctacagtcagagcacagaaacggttttcttcgggcttttgaaagaggtttatgaactaaggtttgtgaaaacacttggcaaactgcagtaccggggcgccccggacttgctgggagctaagaaacagctaccgcaaatacagctccaaccctgagggcgaaagtcgcgttagcacagaaccgggcggcgggagggagaagggggtacctgtcaggcggtcaccacctcccggcgcgttctgctggctttctgtggtgtgacttttcctaaccgcgctgtgcttcagacttttcacacgccatacttccctgcgaactctttcaaaaacggcactgatcaaaaagtatgatttcaagcttgtcaatgctgcaacatattttgcagtcgttacacagatgccactgaaatctgggaaccaaagggtgcttaagacttgttttaagtctaagtacagtggtatggatttttcttggtttttcataccctatagcagctagtacaggagatactgagaggcccattcaccccaagtgttttgtttttgtttgaaggcaagctgcccctggagtagacgtcaaggaagtgatatggcttttgttcattaaaaaatgtatacaagtaaatgagataaaaatgaaatgtccacagcagaggggagccttggagtaatctcccctctggctttcgggtgctggaggagaaggttgctcataagtagattgcatacctataagccccaagtcctttcagcacctgctggaggctattgagcctccctgcctccccacgctgcctcccagaagccctccagctcctactaactgcaatagagccaagacactcattctcatttgttctggcaggatttaacccattaaagttcagtcagcccgatttccatcaatcgggttcatctcagtctatccctcaagattaatccttttttactctttggtaaatttttcctatttctctgtgagcctagtctgagaaaatagaaaaagactaagataatagactagaataagacaagttcccaattctagctttattattttataagagaatctccactgaagacccacttaccaaaaagcccaaagagagtaataaagcaaactgtttcttccagctaaaaggcccaaatgataatttgtcttcccaacgtattattgaatgactatcacatttgtccctgacttgttctgtgatcaaaccaggccccagtgcctacccagagggtacttcgttcaggaagtttttcttggaataaaaatgggggggagtcaataggatttaattaatgaattatggttttaactaataatatatctaacaatactctgatctccactcggtagcacagcaaagcacttaagtgaatggtaaatacaaataatgccatgtttacactaagacaaattgcgtctatgacaaaatagcttaaagtcataaaacaatgaccattgaattttccttcatttgctttctgagcacttattagttttctatatgtcctacattgttataacctgaactcatatgaacaaatttctaaatactaaattctaagattgcattaggaagcctgtaaaaatgtcaaattttagagctgtaaggatcttagagatactaatttagcacagtgtcattaattcactgatccagttattccccgacgtttagtgagtgcctgcagtagaagca

SEQ ID NO: 315531 - DNA, 4001 bp, Homo sapiens
gtcagcctagaggttttgacctttgggcaaaatattttgtagagaaggctaaagaaatgtgcagaaagttttcctagaaattattacaaaattcctatcattatcaggtttatttttggaaaaatggcctactaatccaatgcagcagagagaaaaatatcttgagtatcccagaagtaatgaaaacatacttagtaaaatctattccttttgccaagcccataactcctctgattaaactgctatcaagatagtgggaaaggaagaagcaatgagaaaaagtaagaaataatttactatctcctttaccctagcaagcaaaagttatttaactaaatgaacgactcatctataaataaaaaagagtacactattactactctgcaaatctttaaaagcagatgttttcatctaagatggttgtagaacagctttacctcaagatacatggatatccctcctctaaggaccaaaaattcttttttagtgggatttgcatggtatattttcaagaacctcagagcactgaagacactaatttttctccccaaacctcctgaatgacaagcatgattattagttctattttccaatgaaaaaaaaatcaagcactaataaattacagaacaagttaacaggtaccttctgacctgatgcaacaggaagtacacaacattgcctatgtagctttcttgccaaatatatttattctgaatctaaacatgaggaaacaattagacaaatctagattgcaagactttctaaaagacatctaacctaggctttgaaaaatgtctcaagaacaacaacaaaaagggtagagggacatttttagagaggctaaaaaaaactaaagagaataaagagacatgacaaccaattacaatacatgtttttcactggatcctgtattaggggaaaagtccaccatgaagcacttttctggggacaatcaggggagatttgaatatggtctcaatattagctattatatttatgataactcttggggacatgctagtgatacagtgtttatacagggaaatgcccttgtttttaggagatacatgcctaaatacttaaggcaaaagtataataaaatctgctactaattttcaaatggtttaataaagagagatggaaataggagagaccaaatatggcaaaatgtcaacaactggagaatataagtgaaagatatacaaatattcattcaacatttctttgccattctttgaggattcaatgggtttgaaaattttcaaatagctgggggtaaaaatcaggcagcagttttgtctcatcagtggaagcgcaaaaaagaaaatgaaagcatattccctcattcccaaagccctacctgaaagaataatttccaatccagtaattgtgagttaaatattttagaggcaattttctgactgtaagggagcactttatttgaggaacgagtaaaaataattgcttgaatggaagagagatgtaggactttattcacctgattggcccatccactttggccttttagaacacaaatggttgaggctaaatttcagaaaacaaaattttaattgattattaaaagttttctgctcaatataatccccattagcatgccttattcctatggagaatatcagttgcatagaatattagttgctagaaggcagaaataataatgatatttataaattacctgtatagtatttaacatagcaccatacataaagataaacccttaataaagtgttcggtaattctgttaagggtggaaaatataataagcatttcttaatcttctctctcaatcccagttctctaaccactatcatactcacctctaggcaaagaagcaaaagcttttctgtgtgttgaatgcatcattaggtgaaaagcgggtaggctaaaaatcaatatgactacttaccttggttccagttttagacatttttggtgcatagactggttttcccagtgctgaaagaaattcaggaatggctacagagagttagaggcacagtgacatttatatgggctggtttcagtcaaacatttgcttagtcatgagaataggatccaaaaattgagtcagtcatttagacgctattgatggtttctagaaaaaacaactgggattataaaataaaggaaagcttcagtaccgcctttaatgcttaccaagcagggctgcattacagactttgctgagtcaagaaaccaaaacccagacaaagttgtaaaaattaagaacaaaagagtctctctttttttttttaagcagcctctttgaaattcctaatgtcctttttcttcaacaaagcttgtgagaggtaagagtcagaagactacctctatttctggacagaagtgacatgttctaaacgcaacaaaacttacatgacaactaaatgcaatgcatgatcttgtgtttggggaaaaaagtcactataaagacactgctgggacaatcagaaaacattttaatatggactgtaaattagataatactattgtaccaaagtttaacttcttgaatttgatcattgtactatgactaggtaagagtatgtctgtttccaggacatgtatgctaccatttagaagaaaggttcaagatgtctgcaacctattctcaaattgttgagcaaaaataaaacaatactatcatgttgagtggtaaagagaatgtagcaaaatgttaacaactggtgaatggaatctagataaagggtatgttaaagttcactgacttattcttgcaactattatttaatttttttcaaaacacaattttttttaaaaaaagagctctaatccataagaagggtgccaccgtatgtagaaaagtgactgtgggactcctgaatttgccaagggttagctaactaaacacaacaagctactggctaggtggtcttctttgcccacaatacaacattggaacatgatcggagaacattttttggccctaatacacctctgactttaggaatgagattgcatcttatgtaaatacaaaaaaacccaataaattaacttttctccatttttaactttaactgatcaagtatattctcaaaatcaagtatattctcaaaagtcaaacttcctcatctttctgttaacaaaactaacaaatattttaataaatgggatgtattatggtcaattcagaaaatggcaaatgtgccttaatataaagattattgagaaaatattaagctatatgcttggttttctgaattttataaaattttataaaactttaaaactttaaaaaaagtatctgagtaccatttatttcattaacaaatagcaatatctaaaatatatttctattactccagtgtttatttggtaatggtctgctccttgaatttcatcttaaaataaaaaccatgtaaacttcaattagaattaaacattctgagggttaatttttactttagaaatacaaaagagttttttgatagaaatactaattaaatggccagagagcatatgaaccaatgtttatcagcaatctgattcatttcactcatttggtaatttggtaatttcactcatttatctgaaagaaggttttcccaagtaaatgtaaactttactagttattttgagaaatgacactggaaaccttttctaaaattaaaactaaagatttatcttttacaaaaaaaggaaattattctttagagtttgtttattgaaaatttgaagcaggaagtgaaaaataaagatttttttaaacaatttcattaagttccatactttaaggactaaaatatagtataaaactatttctatgtctatataccaacaaatcatacttcctttccaattattttttaaaaggagtagcaatttccttttaaatagttacaaagaactataaaactcttatttaactctagaaagaataaaactctttcatcacacaaatgaagatacacactatagttgcaaatctacactcagttgctttaatattaacatacata

SEQ ID NO: 315532 - DNA, 4001 bp, Homo sapiens
acccaccctgagccgcgtccactggctcccgccctcagctccaggtcccgccccgaagtctcaccctcaggccccgccccggccccgccccggccccgcccccggccccgcccccagtccgcaccgcggcccgcgcgcttgggtcccggctaccccaaccggggtcggcccccacgcgggtcggcctttcccggacccccaccacctcctgggaccattccgccgcccggccgcggccaggcggtgccccgcccccttgccacagctcacagctccacctgtccccgccgccagcgggacccctgccctgggtggggcacgagggccgcgggggtcccgggcgcagtcatacctacccggcacggccccagaggccaggaccagcgcggcccccagaaacagcagcagtggcggcggcccccggcccgggcccccgcccccggctcgccccatggcgcggcgccccgaccgctgtccgcggtccgcccggctggctgcgccctcggctcgcccggccgccgcgcctcccgccggttctgcggccgcctcagcccacgatgggcagcgcgaggagccgcatgccgccgccgccgccgtccgccgctgtccccggcgcgccgcgcctccccgcctcccgcgccgccgctgccgccgctgcgctcagcgccgccctcaccccgcccgccgcgccggccccgccgcacgtagcggtgacgccggccccttggtcagcctgccaggggaacagacagacccctcgctggggactaggagacacacggacggggagtgcggggcaggcggacggggagcgcgaggcaggcgcacggcgcggcgcgcggcgttaggcggcaggtgcacgggcgggagacctgtgggatggggccacggtcccgccccaggtgaacaggcggcacggggccccgacccggaggaacccacccgccacgcggcaagcacggaggcggggacgtcgcgggcccagttacccgcagggtcggggcggggtccagaagagccgcagggggcggaagcacgagcccccactgtggaaacaagccaggcccggggcgcatggagcctctcggattctgcaccaatcccgtgttccgggcgggaaggctctcagggaggtctccgggtctccacgagggaggggcgggcgttggcagagcctggcaagggggcgaagccgaccgcccaggctctaatcggatcagatctaatccgttcgcagccaaagccactagcctagatctcgcacagccaggcccgccataacgcatcccgggagcaaggggtaagaccctccctgggactgcggctacctcgccttccttctagtctccgggcagcctggggagcggcctttaatcctggtcccttctccgggatacgtcgtcccccaggtgtctcagaccaccaaaactcaggttcctgggtagaccaggggggtctagatccccagccgggcacacatggatgcttggctttagagtgatctgtggggcccattcacagcttcagggctcacagggcaacccaagaccacgcaccaggaggtctgcttagtcggcaggaggaaccgcaacctagttacttagtttattcccccaaaccgaccgtctaccccttaatgtgttactcacccaaatgacagttcagggtatcagcccaaggagataggacaactccagtatttaagagacggtcccattgctgtcttagaagaccaaataagtgaccaagatggagattctatctcctaatctttctgatacatatctccagatggagttgccttggttcaaaacctgtttctcagcagaactatggctgcagcctatttgcctagcctagcgtctccacctctcctgcctggtaaactcctcatgccagaaaaactcagttcttatcacctttccctctatgaaggcttctcagcagttacacttaatgcccatcatctcatcttatctacagttattcctcactggactgcaaggcacttgagtgcacagggctggtaacagagggaggctccatatcagacaggcataaatgaacgaatggcaaccacccacacccatcccagaactgtggtctggagagccttgaaaaaaggggtaaggctctttctttcatagtttcatgctgcctccggggaccaagtaaaatatgtttgaaacaatagccttctctaaacaggggaccatgtagggctttgcactcacctcagccacagaggcagcaacgcacccttaactgcctccaacccatctctgcttcccttgtgtgcagcttaactcctgtcaccttttactgtatgtagactctctgtgttcctttgcttgtttcctcaactcgggttgtggctgtcagagcggcctacctcctccttcccttcctgaggccagtctgtgtgggaagacctcatggatgggttccttgatgtctggggcatgacaaccactcacacattttcaacagggtttaatggaggaagttctcccactcattttaaatatattttgttaattatttaagtatcttcttcttccctttcctggagatgaagtctgctaacgcttccttcaatttggaattttttttttttgttgagacagagtctcactctgtcacccagactagagtgcaatggtgtgatattgactcactgcaacctctgcctcctgggttcaagtgattctctgcctcagcctcccgagtagctgggattacaggcatgccacgcccggctaatttggtattttttgtagagacggggtttctccatgttggctcaggctggtctcgaactccaggcctcaggtgatccgcccgccttggcctcccaaagtgctgggattgcaggcatgagccaccgtgcccggcccaacttgagactttaaatcaattgttgccactcagtttcattctgatcttccctagtggatctcactagcagtttgagaactgagcatagcacacttggttgggtaacacctccacaagatgaatgggaaaattcagtcagtggaacgtgatgggaagggcaggattcagctgcagcgtgactttgagttagcaacctgtctctcatatgtgaaaatgcttggtaaccagagagtcaaatgagtatttcttctgagcacaggactgtggtagggtaaagaagagatagaagatgtaggaaccacagagtgaaagaaagggaaactgacgtccttatatccatgtccccgtatttatgtctcttgcacctgggcatcagggatgttttatgtgtcaacagtttcttcatgcctctgaggttcttactgggttggcagcctgcctccagagctcaggtaggctcaaggtccattgccacgaatgcagccagcctccgactgcatgaaaaacccccggcttgaccagggggctgcagtccagaggagtgctccagttgccatggctgggggcatagctgtgtggactggaaattcctggctttaagtcctcagtattaaccactaacattgatatggtttggatgttttattccctccaaatctcatgctgaaatgtgacatccagtgtcggacgtgagcctagtgtgaggtgtttgggtcatgggggtggactccccatgaatggcttggtgctcgaggtaatgagttcttgcttcatgggttcatgtgagatctggttgtttacatgaacctagtactttctctctcactcctgctctcaccatgtgatgctggctcccctttgtcttccgccaagattgtaagcttcctgaggccctgactggaagcagatgctggctctatgttgtgtacagcctgcagaaccgttagccaaacacacttttccttataaattacccaatctcagatattctttattcttttatagcaacacaaacaggctaacacaaacatattgagtttttagttttccttgtgctaatttgccttattcttcacaatcacactacaaatatcgtcagtcct

SEQ ID NO: 315533 - DNA, 4001 bp, Homo sapiens
ggccgccattgtgacagtaacttgggaagaggtcgcacactgaccggcaggagccgttatgccgcacaaagccactgcggcactcagtgccattttcactggaggccaagtccctgcctggctctcctgggcggggcctgagggcgatgctgctgccggggaccgaccccagagtgtgctgtggagggacagcatgccaccgactggtgggctggcctgtcccgggccccagaccaggcttcccagtgggcactagaagctcattttcatcttctaggtctccacctcctactgcatctttgtcatcctcctcttcctcctcctcttcatccaagtcatcataaaaggatgtggtggggtagaaatcagattcatcgaagggggtgaaatcatcgtataagtcaagcaggctccaggaaggggtctctccctcagtatcagggtggttctctgaggttcctggtgaccctgggaagctccccagatctgcgccacgaccctcaccatccagtccttcgaagtagtcgatgtcaatgatatctgatgccggttggggctccagggtgccctgaaatgggtaagtcagctctggcccttgagggtcgggtgtgctgccccccaggttcagccaaacctccaaggggctctccttggggagttcagaagctgggctcagcttgtcgccgggggtgggggagggtggcccgctggcctctgtagcctcaggaatggcagggggcatgattgactgcccgaggacctcgtggggagcctggagcgtagctggaagggcctgggcatcgccgctgcccgcctctgcggtcactcctcccaggcctgggctgtcagcttccagccaggcggtgccggtcaccgcagccgactcctgcagcacctcttctggcccggccagctcgccaccgggcgccgtccacgacgcctcatcttccccagccgctggtgggccggcttcttcccgcgtgtcgttggcaggcggctcccacgccgggctgcccttcaccagctcttcggcctcaaccgcgctgcccgcctcacgcgctgcgggcgggagggcaaggggcgggacgtcagggcggcgcgctgaggagccctggagccccggcccgccccggtcaggcccgctcgcctagacctggtcaacccagacctcgccaccctcagaccccaccgccccagtgtgaccccagccacccggtacctctaagccccgtcccggagtctgcccccaagacgaggatcacaccccgcccaacgcctcgcggctcggccccgcccgacctgccccgccgtctgaagagccaggccagggcggcccccagctcggcccacccataagtctcaccctcgggaacccaccctgagccgcgtccactggctcccgccctcagctccaggtcccgccccgaagtctcaccctcaggccccgccccggccccgccccggccccgcccccggccccgcccccagtccgcaccgcggcccgcgcgcttgggtcccggctaccccaaccggggtcggcccccacgcgggtcggcctttcccggacccccaccacctcctgggaccattccgccgcccggccgcggccaggcggtgccccgcccccttgccacagctcacagctccacctgtccccgccgccagcgggacccctgccctgggtggggcacgagggccgcgggggtcccgggcgcagtcatacctacccggcacggccccagaggccaggaccagcgcggcccccagaaacagcagcagtggcggcggcccccggcccgggcccccgcccccggctcgccccatggcgcggcgccccgaccgctgtccgcggtccgcccggctggctgcgccctcggctcgcccggccgccgcgcctcccgccggttctgcggccgcctcagcccacgatgggcagcgcgaggagccgcatgccgccgccgccgccgtccgccgctgtccccggcgcgccgcgcctccccgcctcccgcgccgccgctgccgccgctgcgctcagcgccgccctcaccccgcccgccgcgccggccccgccgcacgtagcggtgacgccggccccttggtcagcctgccaggggaacagacagacccctcgctggggactaggagacacacggacggggagtgcggggcaggcggacggggagcgcgaggcaggcgcacggcgcggcgcgcggcgttaggcggcaggtgcacgggcgggagacctgtgggatggggccacggtcccgccccaggtgaacaggcggcacggggccccgacccggaggaacccacccgccacgcggcaagcacggaggcggggacgtcgcgggcccagttacccgcagggtcggggcggggtccagaagagccgcagggggcggaagcacgagcccccactgtggaaacaagccaggcccggggcgcatggagcctctcggattctgcaccaatcccgtgttccgggcgggaaggctctcagggaggtctccgggtctccacgagggaggggcgggcgttggcagagcctggcaagggggcgaagccgaccgcccaggctctaatcggatcagatctaatccgttcgcagccaaagccactagcctagatctcgcacagccaggcccgccataacgcatcccgggagcaaggggtaagaccctccctgggactgcggctacctcgccttccttctagtctccgggcagcctggggagcggcctttaatcctggtcccttctccgggatacgtcgtcccccaggtgtctcagaccaccaaaactcaggttcctgggtagaccaggggggtctagatccccagccgggcacacatggatgcttggctttagagtgatctgtggggcccattcacagcttcagggctcacagggcaacccaagaccacgcaccaggaggtctgcttagtcggcaggaggaaccgcaacctagttacttagtttattcccccaaaccgaccgtctaccccttaatgtgttactcacccaaatgacagttcagggtatcagcccaaggagataggacaactccagtatttaagagacggtcccattgctgtcttagaagaccaaataagtgaccaagatggagattctatctcctaatctttctgatacatatctccagatggagttgccttggttcaaaacctgtttctcagcagaactatggctgcagcctatttgcctagcctagcgtctccacctctcctgcctggtaaactcctcatgccagaaaaactcagttcttatcacctttccctctatgaaggcttctcagcagttacacttaatgcccatcatctcatcttatctacagttattcctcactggactgcaaggcacttgagtgcacagggctggtaacagagggaggctccatatcagacaggcataaatgaacgaatggcaaccacccacacccatcccagaactgtggtctggagagccttgaaaaaaggggtaaggctctttctttcatagtttcatgctgcctccggggaccaagtaaaatatgtttgaaacaatagccttctctaaacaggggaccatgtagggctttgcactcacctcagccacagaggcagcaacgcacccttaactgcctccaacccatctctgcttcccttgtgtgcagcttaactcctgtcaccttttactgtatgtagactctctgtgttcctttgcttgtttcctcaactcgggttgtggctgtcagagcggcctacctcctccttcccttcctgaggccagtctgtgtgggaagacctcatggatgggttccttgatgtctggggcatgacaaccactcacacattttcaacagggtttaatggaggaagttctcccactcattttaaatatattttgttaattatttaagtatcttcttcttccctttcctggagatgaagtctgctaacgcttccttcaatttggaattttttttttttgttgagacagagt

SEQ ID NO: 315534 - DNA, 4001 bp, Homo sapiens
gagccccaggccttggccagtccccccaaaacacttggggtcacatgacccctgtccctcaggaacttcctgggagaaggggagggcacctcccagcacctctagcccccactgaaaaaccagcctgggtggccctgagagggcagaccgaaagccttggcacctcctccccaaccatccctctgaaggagagctgggggaggggacggctcctcggctttggcctccaggacctggcactggataggtgccaaatgtttgctggctacatgaggcacttgttcctgcagaagggaaactgcacctgacaatgactgcttcctccacctaagtggggccttcttccctctctcattcattcattcaacaaatacacactaagctcacatatgtgccaaacactgtggcaggcactcgcgcatgcagggagcaagacttatacaactgctgccctcttgaagctctgaattgagcagggaggacaaatagagtggggtgctgggatggagggtctgaagggtgggacagggtacggctggggtgaaggtaggtctctccgaggaaggaatgtaggcagagttccagataggggctccgcatgggtaaggaacaggaggagggaccagcacagtgtgatcggaggaggggcagcccgcgaggctgagcctgggctccagggcaggctttacctcgagggcacggcaagccacagaaggcttaagtagggagtgacaatgccagatttgcattttaaaaacgtggctcagcaccgggagtggagggggtgtgaccggttggaggtgctgccagggccaggagagatgacaggtcaagggcataggagaaaggcagataccaagatgtggagaaggaagagggcagggctgtcaaggatttggatcgggggaggtgacgagctactctccaaaaggcttgagacttctgggtggaggtgctgggtgggcagcaggagacggggaggaaccctctggtgtcaggagtgtgggctacggctgtgtgtgtttgtgccgggagcgggagtgactaagtgtgtgactatggctgtggtgtgggcatctccacagtgcgtgcctgtgaatgggccccggggaggagaaactgaggaaggggaggaagtacgtgctgcggaaggaggagaagtgcgtgggagagagtctacgtgtgcctgcgggtggccggtgtagctgagcccgtgactcacagcagtggcctctgagagtgacggcgactgacaaacaggtgagcctacgacacaatccctccctcccggggtccgtgactcaccgcgcctccctctacgctcatccctccactccctccctgacccccgccggccgggggcgcccggcacacgccgcagctcccgcagcctccccgaggggggagcccgaggaggaaggcgacaaatgtcacctgctccggccacgcgaggaacttctgaaaagttctcaggcaactgggtcaaaaggaaactcacccgcggacgcacgcccccgtcgcctcgccgctcgcgcgcaagcccggctctgtccccactcgcgccgagctcggggagccgtgacttctctcggggttaccgcggcgggcgggggaggggagcagaaaacctgcgactcccgccggccgggcccccggcccccgactccggccgcggcacgccgtcagagccgggcagctccagcccccgcgcccgctcagggtgccggggagtgaacggcaggaggcaggagcggcagtgccactcgcgctgaatgccccctccccaaagtcccgtcctgccgggcccgaggcccctcggcgctcacctgcaatccggacgctcgcggaggacaacgacgcgacccgcgtcccggccggggacgccccctgcgccgcgactctgtgcgctcggcccggcagccgtcggtccagccgcccctcgctctgcgcgtccggcagcggcggcggcggcgggagactgcctgcgcccagccccgcccgccgctccgccctcctcgtcagtggaaaactccggggctcactgcgctgacgcacgccgggcctccagccaggccgcccggcagccccgccccggaggcgccgcctcctcccccgcctggagcctggcgcagcggcctgggggcctccctgcggactgtgacccggcgactgcgcctccgccgctctccgcccccagccctctcccgccagcgccctccccgccccgcttccagcacggtccctaaaggcgcggacgactcaagccggcagagccgagcgtagagatccccacctcgccccaccgccccagtttacagatgggtagaccgaggccgggagcacctcgtaactccgcaaggccacgggctagacagtggcagagccgacgtctcctgtacgctctccacccccacccctctagagggagtttattttattccaatctaaaagttcccccctccgcccccaacctaccacccacccccagatccgccggaaaagtaaactgtggctggagaggaatctggggtgtgtggggagcggggaggcagggagcgggaaggatggatgtaatcagtgggcctgaacttcattcctgcccacgggccaagagacccttccctgcagaagttccaaactaggggttcttagaactagcttccccactcccacctcaaccttcccttaaaaaaataaaaaggctggtttcttccgggccagatcttggccacttaaaatggtccactgccttctctgctcccgccaaggcctttcctgactcggggccaaccctcccggtacgacatgccccggcaaccaagtcctggcctgggagcccaccctcagccccacttcccaaccgcaggtacgagtctactcatcacctcgagcgtttccaccctcacgcttttactgcagccggtcttctcgactggaatgctctcctgccctctctctgcttaccagaatcccaatgcctttaagggctcagcttgcactgcctcctccagggagccttcgtgggagcctgaccctccccctcccagtcctgctcccgctgcattctgggttcttctgactgtcctagatgaatgctgtcagccactagcccagccctcaggattccattctaccttcctccaggttgggggtgggggtgacctcctggccttcttggatggcatctgcggtggagttgatggtgagagcccctcttcagccacagatgtgcatgtagaatggcaggggtctgctccactttacctttcctgcaagaacaacaggaggaaagcaggttgggggaagataaaggccctgtccttccgcatgcattgagtgtgtacctgggagcctgcaggcggaggtgtctgggcagctggagccaagcttccagtggcttcccagtaccctcctgatgaagtctcaactccttggggcctacaaagctgaaataatcggccctttctcacttttgcagtctcacctctctcttcataccctcatttaccactcccttccccccccttcaatgccattaatgtgtgtacgtgtcattttgttggtttatgtgcttttttttttttttttccgagatggagtctcactctgttgcccaggcaggagtgcagtggctcaatctcggttcactgcaacctccgcctcctgggttcaagcgattctcctgcctcagcctcccgagtagctgggattacaggcatgcgccaccacgtctggctagttttttttgtatttttagtaggtatggggtttctccacgttggccaggctggtctcgaactcttgacctcagatgatccacccgccttggcctcccaaagtgctggaattacaggtgtgagccaccgcgcccggccagttcatgtgcttttaacgttagtccttctgcatttggttttattttatacatgaggtatgattctgtcgcagcctcacctgtacacttccacctcatacccctgatgactgctctccagctctgt

SEQ ID NO: 315535 - DNA, 4001 bp, Homo sapiens
ctgggctcaagtaattctcctgcctcagcctcctgagtagttgggattacaggcacccaccaccatgctcggctaatttttgtatttttagtagagatggggtttcaccatgttggccaggctggtctcgaactgctgaccttgtgatccacctgcctcagcctcccaaagtgctgggattacaggcatgagccactgagcccagcctgcaccctgacttttaaagccccatctcccactggccttgtaggatgccatatatctctggtcctgccagcaagcaaggccatgggtggcagcagcagcagcacttgggagtctggtagaaatgcagaatctcagacctaccccaggtcccctgaatcagaatctaaggtttatcaagacgtgcaggtgattcatgtgcacattcaagtttgagaacattgatctgatctggggattcacatgaagacattactgacttaatatcatctcccaggaaaaaagctccaagatatttatttaaaaaaagaactcttgaaagagaaataattagtccccaagaatgagtgatgggattctaggcatctggccccttagagagctttctagttcccagaatatacaggatcccaactcttataatcacacaaaaagctgatcttgttttccaagctgtcatagaatgatgtttcagagagaaaaaataagaaggaataatataagaaaataaggcaacaaactaaaaacctaaagtagtaatttgtacatgttttcctttcataaaatatgcaaataaatgtttactacatagctagatgatagctaatcacacaaagaaaaatatatcagggatgggtgtggtggctcacgcctgtaatcccaatactttgggaagcctaggtgagtggatggcttgagcccaggaattcaagaccagtctagcaacagaatgaaatgccatctctaaaaacaaaacaaaacaaaaccccccaaatcagccaggcgtggtggcatatgtctgtaatcccagctactcaggaggctgagtggggaggatcgcttgaactcaaaaagttgaggctacagtgagccgtgatcagaccattgcactccagcctgggtgacagagtgagaccccatctcttaaaaatgaaacaaaacaaaacaaaaaagaagaagtgaaaaacacatcaatctgctaacaacattgagttctatttttccatatataatttggtgccctatgacatttcggagtcactatagactgtcacctctgttctattagttgaattaccttttaactatgaaaagactaaaacactatctatttgggcaaaagtgtatgaagtttgtaagtagattgcctttacaatattattcttcattcaatctatttaaaaaaattttccctgcagtgcattccaagactacttcatcaaattgttaataaccttagacttcaattacacgttggcttcacttggtgagattagaaaagtttcatcagaaactgaattagtaattctagaatcatatcttgtaagagctttagagaagatacaatacaaattcttttacccatggagaaaatgaagctcagagaagaaatgtgatttgctcaaggtcacactcacagtttggggattatttgaggcttcatctgaaaaactcttatttcatcttagttgtaaagaaacctgaacaaagccacaaacatcctaaacttctggttttcatgttcaaccacagcctttccacagggacaacttatgaatcaagattttggctcagactttttcctgaatggcatcaactcaccttatcaacaatctcctggatttctggagtggcgggtttggcctcagataagcctccaggtatcattttggctgattgcttctttgctggacaggatgctggaaccaaagtgaacagggaagtgtggagactcgtgttttaaaagaggcgttcactagctccgcctatagaatgctttattttccacaaacagcaaagaggcatggggaaaatgagtatgccgccaggcaagtcttcttgcttcctggagagaatatgctacatggaatttggaagaaagaggggttggaggatgaacaaatgggcaagtacaggagtcatgtcctaacaagcatcaaacgtccctgcattctctttgacaatggttccatcctgttgcatcatctgaattatgaaatctgaagccgcaactagaatttccaaatgttttaaaacttctaacacaaaattttattttttttaaagcaaaacttactaataatgtcaaggttagtttagaatttacttgactttagaaagaaagcaaaaggatctatctggaggaccttggctggatgtgtcttctttactcttatttaaatatctggaaatgtttaacatacggtaaaacacaaagaataaaataacaaacatctatatttctatcactcagaattaaaacttttaacccttttgtcatatttgcttgctgttttttatttttgtagttatttttaggaaataaaatattacagatatggaggaagccccacaccccacgcaaccttgccttccagaaggcaaagtacatggtgaattaatatccttccaggccatttttatatgtgtgtctttaaaattaaaatatgtcttacttggtgtgtctttaaaatttcacttaaattgtatgctaaatatattctatgttatgttcctttttctattcaacatgtttttgagcctttctatgttgatatacacatagatcaatccacagatagatcaatcctgttcatttcctttaactgtgatatgctattttatgctagacctatctatttagtctacctatctaattgctatattctagttcatattttacatactcatttctctattgatgacgattttcgttgtttctggtgtttcattcttacaaacaacgttgcattttttctcctttttacatgagtgagggcttctgcagacaacttatctagaagcaaaatggccacattgtgtgaatatttatgtatattattttattcaattttgggaatatataatacatacacaggataaaaatgtttggaaggaaccaggctttacaatataaggaattattcactcacttaattcctcagacacccttctactctccagagacaattattggcaccaacttcttctgtatccttcagagacattctttacacatacaaatataaaaataattggaggctgggcacggtgactcacgcctgtgatcccagcactttgggaagccgaggtgggtggatcacaaggtcaagagattgagaccatcctggccaacatggtgaaaccccatctctactaaaaatacaaaaattagctgggcgtggttgcgtgcgcctgtagtcccagctgctcaggaggctgaggcaggacaatcgcttgaacctgggaggcagaggttgcagtgagccaagatcgcgccactgcactccagcctggtgacagagcaatactgtgtctcaaaaaaaaaaaaaaaaaaaaaattggctacacacacacgcacacacacacatagatacatattcatctatataggttttcttttataaaaatggtatcctacataaattattatactttttgttttattcctaacaatatattttggagactgttctatatcacaatacagggaggtgcttgtttctttataatgatgtttggtgggtgcttggcaaactcttggagctaagtgagtgtcttacaggctaaactaaggggtgctacacaagtatctctccatagaatgcctttaccctgtggattaagaagaacagcgaatgtggatgacaaggtgctccctcaagaggccacaggtcatctgaagactttggctcagctttcataggccactggttctactcatcttcatgtgacctccccaagtcaagtcctttcatattaaggcccctgacgtttttccaagcctgaagcccatt

SEQ ID NO: 315536 - DNA, 4001 bp, Homo sapiens
cctcaaagagctgtggattctctctggcaaagcatcacacaaagcactcaatccacagctggtaaggagcacaggaagcaaacctccttgatgcctccaaccaaacgctccctgagggcacacacccagccagggctccaagaactaacagcccctatggcaggaagtccagatcaccaagcagctgcccacttgggtcccagagaaatacggggatttacctggagcactctcttgcagaattttttagaccatctgaaaggcacagaaaaatgcctgagagagtttgaattctttattttacataaaagaaatccagtctgcagacacatacaatgtttgtggtctacgaaactgcaaacaggttgacaaatgcccaacctgagggtacctgctggttccttccgtttttctgacgggcttgcccagtggcctctgcctgaggagaggcagaatattcccctcactcccacgcagatttctagcaggggctgcacacctcacccactggcacagcaaaggtgggagcccctagaaagaaatctgactcatccccaaagccggctgtggccagctccggcctggagaggggtcaggggtcctggtgggctgcacctgacctcagtccaggtgttcacgaggcgcaggacaggaagagaatgaggcaagctttagtcaccagaacaaaagaagccagattccttgacccttcaaaacagtctgtccaagtcccaacacactagaggcacagaaagttccaggcatgcaagagagggggacacgccaagtctctaagtgggaacacagacaccaagagaaaggacaaaaaggaaacagaatggggggctggggtcaaaatgtgccaaaatcaaatcaggcacagaagcacagtgctggctgagcccttggccagctctctgggaggggacactcctggcactataagggatccacaagtgccctttaaagctgggtcctaaaagggccctggaagggccaggccttgtaagtcctcccaacatgctggtggcccggagacagcaaagagtggagaagggagaaagcggggatggctccgaactgcctcttctcccccccagactccagcacttgcacaaccaactaaacacacccagacacatggcctcattgtctgatacacaggaaggcacacacatctgtacacacaggttcgtggttaggtgcactgatgcacacagcctcattgtatacaatttacacacacacacgccctcccagtagatgtatacaacacattcaatccgccagttgggtggtgtagtcacacaatcatacacactcacaaactctgtcaggagtgaacaggcatagaacctctccaggctcatgctcacgcacacacattccacaacccctcagtcaggcccatacaaacctctaatacacacaacacaaactcacagcctgtcaggaaaaaaagcactcacaacatctccgttaggtgcgcaaacccttacaatctcacaacctctctgtgaggtgcacacatatccttacaatcactctgtccgcgtgtgcacacacacatacaagtgcacacacttagaacctctgtgttaggtgcacacacaggctcacaacttctctgcgggcgtgcgcgcacacaaactcacaacctcccggttagatgcacacacactcgctcccagtctctccgccagcccctgcacactcacactggctcagtcggcacacgcactctggcagcctcgctctcctccgggcgcaccccacacccacgcaccctccgggccctgtgcacccctcccccaggcccatgccggcgcccggcagtgaactccagcggcgcggggtgtgcgctcgcccccagcccgcggccgcctgcgcccctcctcacctttctcgcccgcgcccggcaaccggccctcgtcctccttggggttggtcacctgggtgatgatggccgggccgtccatgggtgcgcggcgcggcggccgcccgcaggcccggccccccgcaagccaagcgcgcgggggcgcggcgcggggggcgcgggggcgcggcgcgggggggcgctcgcagccgctgcctgggcgcgcccgccgcccggccccgcgctctgggagaggcggcccgggcccgcgccccagctcccgccgccgccgccgctgggctcgagcggccgccgcctcgtcaccatgaaccccggagccgcgcccgggagagccgcgcacggggaggcggagcgggaggcccggcgccgctggaagcgggagcgggcgggcgagggggaaggagcgagcgagggcgggagggcgggagggcgggagagagggagggaaggagaaaggaagggagggaaagaagaagggcgggcgggtgggtgtgtcccggcccggggaccggcctccgccgcgggctctgcccgctcgcctgctcgcctggtgggggagaggggagcggggccgacacagggtgagtggagggcgggagggggcggccgcgcgcgcgggggcccggggcagttgagtggggtgaggggctcggggtgtagcggacggcagaggggctcggggggttagaagtgaggggtgtcaggggggcctggcagaatgagtgaggtgagaggcctggggtgtgagagatgtggggaggagtctgaggcagatgggtggggtgaggggagcggggggattcgcgggggcccgtggggggcactggaaggattcggaagggtgcagtgtgggagcccgggggccgagggggcatggcatggaggcaggagcgaggaagggggcccgaggagggatatttaccgcgaggaggcgcgggaagtgctggcggaggtgctgtgagggtgtctcgggaaggtgctgggcgaggggcgtccaggcgagggaaccgaggggcctgggacgtgagtgcggagggaagcggtgtgcagaagtgggggctgcccaggagcggtagtgacacccagacggcccgcagaggggcccgggcgcggcgctgctgtgatggagaccggggagcgtggggaaggttcggagaggcccagggctgcgctccccagcttgaggggtcccaggagtgagcgggatcgggagtgatctgtgcagagagggagtctgcggaccgggccagaggctcaggttgttcggatgctggcgggactcgcgtcagcattcggccccagagcccgcgtgaggggcggcgggtcctgaaggaccaacctcctgcacgtgagggtgtcgtgactgagaggggcctgggcagtgggcattttcgggtgctgtgcagcaaggggaccgggggagtccgtcgagggcagaagagcggaaggcgctggtggcagaccaagtctggcagggactgtgcttgtgcaaggcagctggccactgtcaggcctaggacgacggccagagcgtgggagagacgacaaagtgcctcctcagcctgggagcgtcggggcctttggacgcccgcgtcctgcgcttccaacttgcaggccacactctgcagccccgtaagccgggggggcggggtagtgccgcaggagggcgggctcgggggtggggcaggagcgctcgcgcgcgctctccacgaatcaggagggcctgggagggcctacagggcgcgacgtcggtgggcagggttcagtgggcggcctgaggcgaagagctgcttgcctccgcctgctaggttgcgcgcgcacttcaggccttgcgggcatgtccagctcttctgtggcttccagcaggcgaggccaaacaggatctttctcacttccccacatctcctggatcctggagctgatgcagtcaggtcccgtgctcaccgggggaaccggcgagcctctccaaagtattaaaggacacttccggaagagcctttggcctgtggtcagcccgcagacatcggtggtctctgtacctgtaggagccccatgagggtccaggtgtgggagacagtcctgggacagggcttctgcggccgag

SEQ ID NO: 315537 - DNA, 4001 bp, Homo sapiens
acaaaggttaggtcaaagtaatgaatattgggcgcaaattaaccaaattttgtctggtgtgaaaggacatcctcaaacctttaagggtactttttttttaatcagagatttttcaaagatttaaatataaaagtaaaataaattccgcacagccttagttcaaacgaaaagcctccaaagtagaaatttatgtcaataatttaagcagagaataaaccagcagtataacataaataacacttgagactatatttactatttcttaggatgaatacaagtcaacacgaagacatctgaaggtattgaatgttcgttcaccaagtgacaaatactgaaatggcttcctaaattccagacaaactacaacttagcgatctgaaaaacattagcctagactttatgaaaggaaatgctgccgtctcttcaagttgatgtctagcctaagccaccattattcatgatacaaagctctcatttcactaaaaccactcctcgatttccttttgccgacctctgcataccagcagcctagtctttcttcattcaccactcacaaactcgaggggtggggggaagaccacagatgtctggaagatacaaagtaggagacaacgctccctccaaaagggaagagaacgaaggcaacaactacatacacccaactgccaaagctttcaagcttggcagattcagaagcaggctataggaacttaacttcgaaaagtctcggttcaaagtcctctctccagacaaaacactgaaagaagttgcaatgcttgaattccatttggccagctttggagcgaaggaaaaattcactccgctgaaaagaaaacgtgctctataattcaattttagctgccatcaaactatttgaataaatttaaattatttctacgaacaaaattctcgaagcggtctgagtcagaggctgaatcctgcagttcacttggtaagaaacagtaagccatcaccttcgccttcctccacccccttatttcaccagggtctcatacccactaccataaatccataagactcccagtacattatccactgctttcactcacctgcatagtacgctaaaatacaggtgcaagacatggattttttatgtgctcaccctactgacgcatcgcacccgctgcacttagagtttagttgctctaaggtttaaagttgcttcgattcaaactcacatagccagggcattaaaaaaaataataacacttctattcttaagaatgaaagaggaaatcttaagagaaagtccactggtccgatccccaggactgatgggacttagggtggcgtctctgcctcagcgcccgaaccccaactcgccgcaagagctgagaaggcggagccccccgtccccaccccgccccccacccagggcccggcgcatcccgaggcaccgggtccctcccccaaactcggccaaggccagagccccggacggaaaccacagacccccacccccacccccaccccgcctgccatccgggctcctgtacgcgcccccgcggcgccccctccccgcaagcgatgcccccagggccccagagaggcagcgcgaccggaacccgggcccggccgccgccctccgcgccccgggcgcggcccaccctcaccgtcccccacctgagctccccgctcccaaccccaggcctcccggctgcgcccagcccgccgcccggaccgcgcgcctgctacgaagtttggctccgagaggaagcgggagcagccccggaaggataaggaaaggagcgcccaagcacctcaggggaacaggctcctcccgccgcgggagtccgaccgtcctcgacctgcggtggcggctcggcggggactgaagctgctcctcagaccttcctccgtctccgcctcccctcgctctccgctcccggggccgggccaacgctgctgccacagaccgagaggcttaaaatggcgccgcacaaggagctcttataagtcgcgcagaagccgctgtatcctgccgccaccggcgcagcgcggagcgttccgccgcgcgaggacaaggggcggggcgcgagggggcggtggaaagtagtccccgcgccgcccagcagtctgctgccgtctgagcgccccgggccggggtggggtgcctgggcaccccacggacgctccccggggtgacggctggcggctgcccgctgcgcggcctgagggcagcccgtgagggcgctgtggtctgcatcggggaggccgggcccccgcggcctgggttggggaaggtggccctggtatcctcccctgtcccaagcccgacgcccccgccccgcgcgtttcccgaaccgggagagcagctgcaggactcggcgcgcctttcccgcggcctgcggaaggtggcatctcggccccggccttcgagtaccgctcggggcggccgggacaggtcctgggagggcggaagttcggggccagggcggcggcaggggctcgggttcagcgcccgcccgtcttggggcgctcctggccccgcagctgccccgtcgctggtctgcgggttcccggccgggcgcgggttagggggcctcgccgaccttgtggtctgtgccgcacactccctgctggacctgggtcgcagcccagtctcacagcacccccaaagccccccactgtccggatggtggatcccacctctcagcaggctgttcagcttgaatttcgacctgaatcaccgggccgagccgccttctgtccccactcacgaaggctgtgaactctccgtagaacgggcgccaagcccgcaattcaacaagtccttaggagtacctactgtgaacaaataactaatggaaatggattagctccagagcgctgtcaattaggttaattcttatagattccatttttatctggttccacttgtcactaggtatcaatagatttatttgtggggatttttctttggagaagaagatttttacggtattacttatttgtgaaatccaagtatgtttatagagaaagctatcgattaagcagcctccaattttttaactaattttctatttaaaaacgtttgtaattcatttcaatagactgaaaaatgtttcccattctaatgcagcaaaattgacgtttgtcgaagctgcaacaagtatgatcgattcagtttctctaggctattgtttgtgcttatttttcctccaaaacattggagagagtacaaaaagcagcagtgaaagttacctctgtgcttttatcccaggactacaattaatacaagcaaacaataggtcttaacacatagatgcaggcggaaaacccacttattcattcactcatggaggtaggatatgtagtttaaggcacagctcatgtttcagggccagcgtattctttaaataacttttatttttgtcttaaagatattttactatataagtggtaatgccaactgccgtctgtcaccatagcacatgtgggccactgcagtggaaaaagtctacacactaagatgatgttcagtgagatccattgtctagaaagaccttctcatttgtatctttcctactaattctgtagaatctaagtgtagctattggttgtggtcacaattcaaaaagattgaaccgaaaaaggtatttcatcaaaaccgtgtttctaatataaactcaaaagtataaatggcgttttcaggtactgattcctaattttaattgtcatttgcagaattaaggaatatgcaattgattaaagtcatacattgaaaatcagacgacagattaaccacttttacagggctttttttaaaaaaacatgtttgctttttctatgtgcaggttttttgtttttgaataaggcactcttgaaattggttaagaaatatctgcaccattagaagatctaaaggataaaaacgtttctatatttgtatttctctgttccattaccaaaataatggaatcatttttctataatttaaatactttaaatttagaattatgatttttaatccctactga

SEQ ID NO: 315538 - DNA, 4001 bp, Homo sapiens
atgcagtttcctagaatcaaccacagtaatcttttagcttttctctatctaaatgttatacatattttatatttatattaagtgcatttatatttatattaaaatacagatacaaatttaaaaactctttattattaaattttcaaataaaaagcaacttttcaaataaaagcagcgagaacctccttatacccaacacctggcttcaactattagcaacccatggtcaatatttcctctatttcccacttaatgtctctactgaattatttaatttcacccataaacacttgtgtgcatctctaaaagttaaggactcttttttgaaaaagactttaatacaatttctcatctcaaaaaattagcaataattcctcaacagcatccagatgcaatttttcatgcttttttcagttagtttaaaatcatgagcttttctccatgtctctaaaatgtaattactaatgcttctaatactattccaccaggttgagtgtattataaatgatctgatcaccccttgcctcccactcttccatccccttggacatatttaggctacaacatccccaggaaaatggtttccattgtctgcacgtaagcaaacaggcattattaacctattagctgtccactgctccaccccacccacaggtacccaactagtcctgtgcacctacctggcgtggactgccaagggaacctctggatctgccagtcagccaccctgtcctgctcagactttaccagagacgagtatttccctttccttccctctaagagcattttatttgcagagttagccaatagtatcttgtttcctgtaagggagactatctttagatgctgccacaggcaagctcagatactccagggtggaggccagctgccaacaggagggcctgactttataaacctggaagatctaaacctcagggaagactgcggagctggagggagagaggtgccacttaccccaacctggaggtggggggcagggagcaggccctgcagtcagcaaagcacagcacagtcagctctcattaatggggagccttcaggaagctgggagagctcatggggccctcagcttccctgcccacgagagggagcccagagtactcactggaccacactggggcacacacagctcttctcctcaaagtgcagtcccaggcactgggagcttattaaagacagcacctcaagccctgccctatatctgctgaattagaatctgcattttaatgaaattcttagaagagtgatatgcatactaagtttgagaagctttggtactgaaggcatctagtgagtaccttgcaccttgtagatgctcggtaaatatttttttcctcacctctctgccccaaggcatttagtggctccctatacccatcagtcaaggctgaggacacagctttcacccaggacctggcctatgctcctttcacagtctctccccctgccactcttgccctgcagtggggagcctggtgggctccggcatccagccatgcttctgctccctggcctggccagcttggggcgactgcaacgtgaatctcaactgccactgcctcatcaccttccgatcacttcattacctgcctgacccctggcatatgctatataattctgatccatccctaactagggcctggcccatggtggccttcaatacaccttcattaaatggtctgtgaccccttcaaggcccctctggccccttgctgcccacatcccagccacatccggtgctcccttacctctagtcgctgtggtgttccgaggacagcgggtgctctgtgtgctccccaccttgcccctcctcacctcccccaaccccaggacagagctgggggctgcagtgcagtgctgcgggcttggtggcctgctcatggtggaagaagtccaccagcagttttctttctttgttcttggtctcagtgtttggccacctttccctgcctttggccagaaggccacaggacaaaagcagagtcaggccgctccccatccactttctgacactggcccctccccaccccacaccaccccttgatacctctcctggggtccactcagctgggctggctgcctcagccccttccttgcctctgactcccctcctcttctgagggctcctttcttggatctggccaagactctccctctcttcctgtcccacactcttgacgacagtctcatccaccccacatcagtaatcccctccgtgttcatgagcacacatctctacctccatccagggcctggataatttcccaagcccatctaaccttctccgttctctgtctttcctctcaccacttaccccactggccattctccacccagaagccagagagctcttcctgaaatccaagtctgccaacttaaacgcctccaggggttctctcatcctggtttaagtccacggcctggtaagcacggcccgccccttctcacttcctactgtgctctcaccacttccacttcccccaacatgcctgtgcccgtggcaggctctcttcccttcccaactcacctggctgtcctgtccaggacgtgattttaccctcttttaaagctaacggctatgttccacagctgctagcagcacagggcttcatgcttggcaagcatgagaaccagcgtccagtgtcagttgccttgcccccaagccccacagagtgatgccatggcttggatagatacctgtgaatgtgtgagggatggggaggttataggaagggaactctgaccttgggtaacgtgccattttatagcaagcagtaagcaagtcggttatttggccctgagcgagatgtcagctcatccttcaaggttgctcactgcaaactcaaccctgcaagatggaccaagtgaagagcattagtgctttgcattcttgacacactcatggagacagaaagagccttggcagccttccccctccctccacgcctccttgggcctctgtaaaggagtctctggctcagcgctgggaattctctcctccctgaactcttgttcaacccctcccccgtactctcactctggtacagccttattccttagatccccgtcttcatctctctttctgcccagcccctttggcttcactctctgttggagctgacccttgttcacaagttctttgtcattctgcatttctcttccagttgagacagtaaatgcagaggacagtttggtttctgctgggcagagaaatgagagtgtggtgggctggctcaaaggcaggaggccagacagagaggctgtgaggatggtggggacaccctggacagtgatgggtgtccccacccatcactgcaggcacccatcacacaatgcaggcaaggactggagacttggtgtgaataaagctttgtgggaatgtggggtagagatgcagaaaaggagagtgagaatgtgattcaccttaattgccaaaccaagatacttccatgttcttctgtgggccctggagaaatttgggaataattacataagcagttgtgcagcactaggtctgcctgaggcaatgtcctaagtcctcgatgtacatgaactcatgtagtgcccccagtgaccctatgatgcaggtgctaatgtttttgtttttgtttctttcagacagggtctggctctgttatccaggctggagtgcagccacatgatcatagctcactgcatccttgatctcctgggctcgaacgatcctctcacctcagcctcccaagtagctggaactacaggcacacatcaccacacccagctaatttttgtattttttgtagagacagagtttcgccatgtacccaggctgctcttgaactcctgagtttgagtgatccttctgccgcagcctcccaaagtgctgggattacacgtttaagccactgtgtgtggccgcaggtactattattatcctcatcttatatgtgaggagtttgagacaaggaggagaagttatgtaacttgtacaagaccacaca

SEQ ID NO: 315539 - DNA, 4001 bp, Homo sapiens
ctcaaggctctccagcacaggtccgtcacccaccctgcctcctctcaggaaacccagctccctccaaagcgccctctgggcctgggatgccctgagcaatgcaagctttcttgcctgctttcacgtggttcaattttcctttttttttggctcaatttttttctgcctcaagttttctacctcaagtatttcaaaaattaatttttttttcttttcttttttttttttttttttgtggagtgggtgttgaaagaatcctaaactttcttagccattctctggactgagctataaactcacaaagcaaggattgcaggctctgtgaggctgtgattgccagaggcaaggcaagagaaataacaagccgtggtcagtcctcagctggggcctctgatggatttcctcctgtcttgcactcataatttctttctgaagaccatgttttccacccacacaaacctgagcctgagtatcctcacaatggttataacaacatatatcaaaattgaacactaaatttgtgccaggaatttattaatggagaaaccccgcctctactaaaaatacaaaattagccgggcggtggtacatgcctataatcccagctacttgggaggctgaggcaggagaatcacttgaacccaggaggcagaggttgcagtgagccgagactgtgccattgcactccagcttaggcaacaagagcaaaactccgtctcaaaaaacaaaacacaaacaagaaagaaaacccaaaaaacaaaaaacaaacaaaaacccatagatggtacaaaaagtggaagaaaaaggaaaaaaaaacccatgaaactatctgcaatgcagtttcctagaatcaaccacagtaatcttttagcttttctctatctaaatgttatacatattttatatttatattaagtgcatttatatttatattaaaatacagatacaaatttaaaaactctttattattaaattttcaaataaaaagcaacttttcaaataaaagcagcgagaacctccttatacccaacacctggcttcaactattagcaacccatggtcaatatttcctctatttcccacttaatgtctctactgaattatttaatttcacccataaacacttgtgtgcatctctaaaagttaaggactcttttttgaaaaagactttaatacaatttctcatctcaaaaaattagcaataattcctcaacagcatccagatgcaatttttcatgcttttttcagttagtttaaaatcatgagcttttctccatgtctctaaaatgtaattactaatgcttctaatactattccaccaggttgagtgtattataaatgatctgatcaccccttgcctcccactcttccatccccttggacatatttaggctacaacatccccaggaaaatggtttccattgtctgcacgtaagcaaacaggcattattaacctattagctgtccactgctccaccccacccacaggtacccaactagtcctgtgcacctacctggcgtggactgccaagggaacctctggatctgccagtcagccaccctgtcctgctcagactttaccagagacgagtatttccctttccttccctctaagagcattttatttgcagagttagccaatagtatcttgtttcctgtaagggagactatctttagatgctgccacaggcaagctcagatactccagggtggaggccagctgccaacaggagggcctgactttataaacctggaagatctaaacctcagggaagactgcggagctggagggagagaggtgccacttaccccaacctggaggtggggggcagggagcaggccctgcagtcagcaaagcacagcacagtcagctctcattaatggggagccttcaggaagctgggagagctcatggggccctcagcttccctgcccacgagagggagcccagagtactcactggaccacactggggcacacacagctcttctcctcaaagtgcagtcccaggcactgggagcttattaaagacagcacctcaagccctgccctatatctgctgaattagaatctgcattttaatgaaattcttagaagagtgatatgcatactaagtttgagaagctttggtactgaaggcatctagtgagtaccttgcaccttgtagatgctcggtaaatatttttttcctcacctctctgccccaaggcatttagtggctccctatacccatcagtcaaggctgaggacacagctttcacccaggacctggcctatgctcctttcacagtctctccccctgccactcttgccctgcagtggggagcctggtgggctccggcatccagccatgcttctgctccctggcctggccagcttggggcgactgcaacgtgaatctcaactgccactgcctcatcaccttccgatcacttcattacctgcctgacccctggcatatgctatataattctgatccatccctaactagggcctggcccatggtggccttcaatacaccttcattaaatggtctgtgaccccttcaaggcccctctggccccttgctgcccacatcccagccacatccggtgctcccttacctctagtcgctgtggtgttccgaggacagcgggtgctctgtgtgctccccaccttgcccctcctcacctcccccaaccccaggacagagctgggggctgcagtgcagtgctgcgggcttggtggcctgctcatggtggaagaagtccaccagcagttttctttctttgttcttggtctcagtgtttggccacctttccctgcctttggccagaaggccacaggacaaaagcagagtcaggccgctccccatccactttctgacactggcccctccccaccccacaccaccccttgatacctctcctggggtccactcagctgggctggctgcctcagccccttccttgcctctgactcccctcctcttctgagggctcctttcttggatctggccaagactctccctctcttcctgtcccacactcttgacgacagtctcatccaccccacatcagtaatcccctccgtgttcatgagcacacatctctacctccatccagggcctggataatttcccaagcccatctaaccttctccgttctctgtctttcctctcaccacttaccccactggccattctccacccagaagccagagagctcttcctgaaatccaagtctgccaacttaaacgcctccaggggttctctcatcctggtttaagtccacggcctggtaagcacggcccgccccttctcacttcctactgtgctctcaccacttccacttcccccaacatgcctgtgcccgtggcaggctctcttcccttcccaactcacctggctgtcctgtccaggacgtgattttaccctcttttaaagctaacggctatgttccacagctgctagcagcacagggcttcatgcttggcaagcatgagaaccagcgtccagtgtcagttgccttgcccccaagccccacagagtgatgccatggcttggatagatacctgtgaatgtgtgagggatggggaggttataggaagggaactctgaccttgggtaacgtgccattttatagcaagcagtaagcaagtcggttatttggccctgagcgagatgtcagctcatccttcaaggttgctcactgcaaactcaaccctgcaagatggaccaagtgaagagcattagtgctttgcattcttgacacactcatggagacagaaagagccttggcagccttccccctccctccacgcctccttgggcctctgtaaaggagtctctggctcagcgctgggaattctctcctccctgaactcttgttcaacccctcccccgtactctcactctggtacagccttattccttagatccccgtcttcatctctctttctgcccagcccctttggcttcactctctgttggagctgacccttgttcacaagttctttgtcat

SEQ ID NO: 315540 - DNA, 4001 bp, Homo sapiens
taatgcttctaatactattccaccaggttgagtgtattataaatgatctgatcaccccttgcctcccactcttccatccccttggacatatttaggctacaacatccccaggaaaatggtttccattgtctgcacgtaagcaaacaggcattattaacctattagctgtccactgctccaccccacccacaggtacccaactagtcctgtgcacctacctggcgtggactgccaagggaacctctggatctgccagtcagccaccctgtcctgctcagactttaccagagacgagtatttccctttccttccctctaagagcattttatttgcagagttagccaatagtatcttgtttcctgtaagggagactatctttagatgctgccacaggcaagctcagatactccagggtggaggccagctgccaacaggagggcctgactttataaacctggaagatctaaacctcagggaagactgcggagctggagggagagaggtgccacttaccccaacctggaggtggggggcagggagcaggccctgcagtcagcaaagcacagcacagtcagctctcattaatggggagccttcaggaagctgggagagctcatggggccctcagcttccctgcccacgagagggagcccagagtactcactggaccacactggggcacacacagctcttctcctcaaagtgcagtcccaggcactgggagcttattaaagacagcacctcaagccctgccctatatctgctgaattagaatctgcattttaatgaaattcttagaagagtgatatgcatactaagtttgagaagctttggtactgaaggcatctagtgagtaccttgcaccttgtagatgctcggtaaatatttttttcctcacctctctgccccaaggcatttagtggctccctatacccatcagtcaaggctgaggacacagctttcacccaggacctggcctatgctcctttcacagtctctccccctgccactcttgccctgcagtggggagcctggtgggctccggcatccagccatgcttctgctccctggcctggccagcttggggcgactgcaacgtgaatctcaactgccactgcctcatcaccttccgatcacttcattacctgcctgacccctggcatatgctatataattctgatccatccctaactagggcctggcccatggtggccttcaatacaccttcattaaatggtctgtgaccccttcaaggcccctctggccccttgctgcccacatcccagccacatccggtgctcccttacctctagtcgctgtggtgttccgaggacagcgggtgctctgtgtgctccccaccttgcccctcctcacctcccccaaccccaggacagagctgggggctgcagtgcagtgctgcgggcttggtggcctgctcatggtggaagaagtccaccagcagttttctttctttgttcttggtctcagtgtttggccacctttccctgcctttggccagaaggccacaggacaaaagcagagtcaggccgctccccatccactttctgacactggcccctccccaccccacaccaccccttgatacctctcctggggtccactcagctgggctggctgcctcagccccttccttgcctctgactcccctcctcttctgagggctcctttcttggatctggccaagactctccctctcttcctgtcccacactcttgacgacagtctcatccaccccacatcagtaatcccctccgtgttcatgagcacacatctctacctccatccagggcctggataatttcccaagcccatctaaccttctccgttctctgtctttcctctcaccacttaccccactggccattctccacccagaagccagagagctcttcctgaaatccaagtctgccaacttaaacgcctccaggggttctctcatcctggtttaagtccacggcctggtaagcacggcccgccccttctcacttcctactgtgctctcaccacttccacttcccccaacatgcctgtgcccgtggcaggctctcttcccttcccaactcacctggctgtcctgtccaggacgtgattttaccctcttttaaagctaacggctatgttccacagctgctagcagcacagggcttcatgcttggcaagcatgagaaccagcgtccagtgtcagttgccttgcccccaagccccacagagtgatgccatggcttggatagatacctgtgaatgtgtgagggatggggaggttataggaagggaactctgaccttgggtaacgtgccattttatagcaagcagtaagcaagtcggttatttggccctgagcgagatgtcagctcatccttcaaggttgctcactgcaaactcaaccctgcaagatggaccaagtgaagagcattagtgctttgcattcttgacacactcatggagacagaaagagccttggcagccttccccctccctccacgcctccttgggcctctgtaaaggagtctctggctcagcgctgggaattctctcctccctgaactcttgttcaacccctcccccgtactctcactctggtacagccttattccttagatccccgtcttcatctctctttctgcccagcccctttggcttcactctctgttggagctgacccttgttcacaagttctttgtcattctgcatttctcttccagttgagacagtaaatgcagaggacagtttggtttctgctgggcagagaaatgagagtgtggtgggctggctcaaaggcaggaggccagacagagaggctgtgaggatggtggggacaccctggacagtgatgggtgtccccacccatcactgcaggcacccatcacacaatgcaggcaaggactggagacttggtgtgaataaagctttgtgggaatgtggggtagagatgcagaaaaggagagtgagaatgtgattcaccttaattgccaaaccaagatacttccatgttcttctgtgggccctggagaaatttgggaataattacataagcagttgtgcagcactaggtctgcctgaggcaatgtcctaagtcctcgatgtacatgaactcatgtagtgcccccagtgaccctatgatgcaggtgctaatgtttttgtttttgtttctttcagacagggtctggctctgttatccaggctggagtgcagccacatgatcatagctcactgcatccttgatctcctgggctcgaacgatcctctcacctcagcctcccaagtagctggaactacaggcacacatcaccacacccagctaatttttgtattttttgtagagacagagtttcgccatgtacccaggctgctcttgaactcctgagtttgagtgatccttctgccgcagcctcccaaagtgctgggattacacgtttaagccactgtgtgtggccgcaggtactattattatcctcatcttatatgtgaggagtttgagacaaggaggagaagttatgtaacttgtacaagaccacacagctcatgtgtggtagggccaatatttgaacttagcattgaggttttatggtctatgctgtgcattcttagtagaggtggtattacttccaaggtggcgaaaattggttctggaaggttcttgtgctttatgtataaaacacagatatacatatagtagctaaaccaatagcatatctgtggaataaaattccatggtagggggaggtgagtaagaatgtaatgtgggccaggcatggtggctcacgcctgtaattccagcactttgggaggccaacgtgggtggatcacgagatcaggggttcaagaccagcctggccaaaatggtgaaaccctgtctctactaaaaatataaaaattagccaggcgtggtggcgggtgcctgtaatcccaactacttgggaggctgaggcaggagaatcgcttgaaaccggaaggtggaggttgcagtgagccgagatagc

SEQ ID NO: 315541 - DNA, 4001 bp, Homo sapiens
cagacttagcaagcccagtgcacagtcaccaagtgcagagccaggacttcattcctgacttcattccttcattccaaagccaagctgcctatgtccccatctgtgaagtggggccagctgaggagcagggttcaggagcagactttgtggagactggcacgtggctgatggatagtaggtgctcccatcccagaggtgtggcaagtgccaggtaagcctgagcactaagaagaaccacactgaagttgggctgagactatttcctgccctgccttcctttgtgaaaataaagccaagcaaagaggaagatgaaagaatccaccctagccttcctgagcccatttctcattcccaggggttttgaaccccaatccactgcccccattcccaacccacagtggtcctcaaggctctccagcacaggtccgtcacccaccctgcctcctctcaggaaacccagctccctccaaagcgccctctgggcctgggatgccctgagcaatgcaagctttcttgcctgctttcacgtggttcaattttcctttttttttggctcaatttttttctgcctcaagttttctacctcaagtatttcaaaaattaatttttttttcttttcttttttttttttttttttgtggagtgggtgttgaaagaatcctaaactttcttagccattctctggactgagctataaactcacaaagcaaggattgcaggctctgtgaggctgtgattgccagaggcaaggcaagagaaataacaagccgtggtcagtcctcagctggggcctctgatggatttcctcctgtcttgcactcataatttctttctgaagaccatgttttccacccacacaaacctgagcctgagtatcctcacaatggttataacaacatatatcaaaattgaacactaaatttgtgccaggaatttattaatggagaaaccccgcctctactaaaaatacaaaattagccgggcggtggtacatgcctataatcccagctacttgggaggctgaggcaggagaatcacttgaacccaggaggcagaggttgcagtgagccgagactgtgccattgcactccagcttaggcaacaagagcaaaactccgtctcaaaaaacaaaacacaaacaagaaagaaaacccaaaaaacaaaaaacaaacaaaaacccatagatggtacaaaaagtggaagaaaaaggaaaaaaaaacccatgaaactatctgcaatgcagtttcctagaatcaaccacagtaatcttttagcttttctctatctaaatgttatacatattttatatttatattaagtgcatttatatttatattaaaatacagatacaaatttaaaaactctttattattaaattttcaaataaaaagcaacttttcaaataaaagcagcgagaacctccttatacccaacacctggcttcaactattagcaacccatggtcaatatttcctctatttcccacttaatgtctctactgaattatttaatttcacccataaacacttgtgtgcatctctaaaagttaaggactcttttttgaaaaagactttaatacaatttctcatctcaaaaaattagcaataattcctcaacagcatccagatgcaatttttcatgcttttttcagttagtttaaaatcatgagcttttctccatgtctctaaaatgtaattactaatgcttctaatactattccaccaggttgagtgtattataaatgatctgatcaccccttgcctcccactcttccatccccttggacatatttaggctacaacatccccaggaaaatggtttccattgtctgcacgtaagcaaacaggcattattaacctattagctgtccactgctccaccccacccacaggtacccaactagtcctgtgcacctacctggcgtggactgccaagggaacctctggatctgccagtcagccaccctgtcctgctcagactttaccagagacgagtatttccctttccttccctctaagagcattttatttgcagagttagccaatagtatcttgtttcctgtaagggagactatctttagatgctgccacaggcaagctcagatactccagggtggaggccagctgccaacaggagggcctgactttataaacctggaagatctaaacctcagggaagactgcggagctggagggagagaggtgccacttaccccaacctggaggtggggggcagggagcaggccctgcagtcagcaaagcacagcacagtcagctctcattaatggggagccttcaggaagctgggagagctcatggggccctcagcttccctgcccacgagagggagcccagagtactcactggaccacactggggcacacacagctcttctcctcaaagtgcagtcccaggcactgggagcttattaaagacagcacctcaagccctgccctatatctgctgaattagaatctgcattttaatgaaattcttagaagagtgatatgcatactaagtttgagaagctttggtactgaaggcatctagtgagtaccttgcaccttgtagatgctcggtaaatatttttttcctcacctctctgccccaaggcatttagtggctccctatacccatcagtcaaggctgaggacacagctttcacccaggacctggcctatgctcctttcacagtctctccccctgccactcttgccctgcagtggggagcctggtgggctccggcatccagccatgcttctgctccctggcctggccagcttggggcgactgcaacgtgaatctcaactgccactgcctcatcaccttccgatcacttcattacctgcctgacccctggcatatgctatataattctgatccatccctaactagggcctggcccatggtggccttcaatacaccttcattaaatggtctgtgaccccttcaaggcccctctggccccttgctgcccacatcccagccacatccggtgctcccttacctctagtcgctgtggtgttccgaggacagcgggtgctctgtgtgctccccaccttgcccctcctcacctcccccaaccccaggacagagctgggggctgcagtgcagtgctgcgggcttggtggcctgctcatggtggaagaagtccaccagcagttttctttctttgttcttggtctcagtgtttggccacctttccctgcctttggccagaaggccacaggacaaaagcagagtcaggccgctccccatccactttctgacactggcccctccccaccccacaccaccccttgatacctctcctggggtccactcagctgggctggctgcctcagccccttccttgcctctgactcccctcctcttctgagggctcctttcttggatctggccaagactctccctctcttcctgtcccacactcttgacgacagtctcatccaccccacatcagtaatcccctccgtgttcatgagcacacatctctacctccatccagggcctggataatttcccaagcccatctaaccttctccgttctctgtctttcctctcaccacttaccccactggccattctccacccagaagccagagagctcttcctgaaatccaagtctgccaacttaaacgcctccaggggttctctcatcctggtttaagtccacggcctggtaagcacggcccgccccttctcacttcctactgtgctctcaccacttccacttcccccaacatgcctgtgcccgtggcaggctctcttcccttcccaactcacctggctgtcctgtccaggacgtgattttaccctcttttaaagctaacggctatgttccacagctgctagcagcacagggcttcatgcttggcaagcatgagaaccagcgtccagtgtcagttgccttgcccccaagccccacagagtgatgccatggcttggatagatacctgtgaatgtgtgagggatggggaggttataggaagggaactctga

SEQ ID NO: 315542 - DNA, 4001 bp, Homo sapiens
tgacccttccctctgccctgtgaccctgccaaagaccatggacaggacaagggatcatgtaacctgtggtgtgggagcaggggcagctgcggcaacatcagcccatgagtgccaagtctgcccttgctacaggactgcagatactcaacatgcagcagctcatttccagtgacctggagccatgtctggccagcacctctagaagatgtatgaagaagagcaggtgtttggacagaatctctgccagcaaagtcaaaatattgcctgaccagacaagtgcatataaacgatgaggttacctttcctaatccactcagaaacacttctgtcgctgactttgagtcctgactgggagcagtgtctccgatgctgctgcttgcctctgtctttccagggaccaaagtgccctttctctctagcaaggaaggatgctgcctttgggctaagactgcttaataaaaatccttgcccttacgtcacaattgttagatctctaagggtgataggtcagccagtagacatcctgccccccacaagctctctggggcactgtattaagtaggtcagatgatgtgtatgtgttattgattcacatgggcaaaaacatattttttcatcatttaaaatatgaaacaggtggctttgctcttaagaataatgttcagctccccattattgcttgactcgctctcgcctttttttggtatcttcctgttccagcttttgctggtcccttatgctgccattacacatttcctcaaaggacctgtgcaaattcatgtgtaataattggtaaactttgatgtataataattggtaaacagattgggcctggacagtgctgtgcaaatagagtatgaaaaattactttcccttctaggcgaactaaaaacattcatttctttatcctctataattaaaatcctattttgttttctgaaaattaaaaaaaaaatctacaactttggaagtagtgtaaaagtctgataatgatgaagcaaattacaattcatacataaaatagaatatacttaaatgtttaggaagtatttttactgattttggaaaatgcaatacagttaaattgctaagaacagtgtaaacacaaagtaaatatgcaaaataagtattaactattactattacaacaaatagatgtcaaaaggatataaaattgtgattcttaaccttttttgaccataaactcctttgagaatctcctaaaaactgcagaccttttctcagaaataatgtatatatatatacacacacacacacacacacagacacacacgcacacacacaaacacccctacaattctgggagtccatgaaccccttgaatccttctgccatgtattctgtgggccctcacataagagttcatgataaactatgtgattttaactgaccgtacttttagaaacctggaaaaaatgatcacattttattaacagttggcctccagctggtggaattatgggtgacttatttcttcctttttttaaaatagttttcaaagtttctacagtagtatgttgatttatattgaaaaaagaacataaatgataatctgataaaacagcctgtcttatgcaaaagaaatgaaaacagagattattcattgagcaaatatagacaataactagattctccttatctccctgggtgggtctgactatgccattactagcagtaccatcagcctgcaagcactaactgtgtgcctggaaacatgttcagtagttttcatgtttctccagtttaacccacacagcagcaaatggcagtgatggaatttgaacgaagagcagctgagctccatagcctggcattttgcactgtaccctactacagacaggaatctgagaataccaacaatacctggggttagtcctccctgtcttcttttcaatataaagagtaaaacaaatgactcaccagcagagatgctttgccagtttgttccagagatgagcttgctcatgaagcaaggtctgcctctacttctgtgatgtggttcatgtttccgctgaacattttttaagagccctcagctggttactataagagacccaccccctactcccgtccttcagatcagaatccatatgaccaacccgcccctgtgtaacgcgtgggtcagagatggatgggtgactgataccccacactcccttcattctgctttggggctgattcttctgtcagggcctgacgagctttattcgtaaactaaaggggaacaataaggaggtttggctctggccatccaccgaagatggtggcatttgtaccttaaaattacttaattcactagtcagacatctttttggaacagttagggtctgggccaatgctgagtccatggtatgggctgggttctgcgtgcatatgcagctccagcatatgtgatagctgttaagccccatagcagccctgcagtggatattatcctgcctttatagatgagaacactgaggaccatagccaaaataacaagccctggtgcacacagctagaaactggaaaatcgaagatacacactcaggtatctgtcattaccagaccaatcaacagcatgatgatgggtctgccagagggcctggtgcagccccacctcctaagcccacaccactcaggcactcagcaggcagtgcccacccaccctgcgtaggctggctggaatcatctggtttccttgggctgccctctgtactcctggaattccccagatgttgactactttgatctcagtacagttctagttgtcagtctccatgatctaacattactgacccttctgggaaataacgctggaaggcaggaattggaggcatgtcagcctgggtcacatgccccagtgccttgtagtggagagggtactagggagaggcatggactcgatgtctgctttcccagaagcagctgccttcttgtggaggtgcctggcctgccttctctggctctgcactcccattcaggctgcttctctccaatgctgttgctctctcccacctgctaggcaaaccttctcatgtggctcttcctaagggcaaatgtcaagcattgggagcagggaccaggagcagcctcaggatccagagactaacactcatttctaccgcaagcctggccctatgctggatgcttctatgtacagccatctaatcctagtcacgtacagataggcaaacagaagattagagagattagcccacttgcccaagaacacacatccctggcagtcacccaggactgtcaggctgcaaagccagtgcttcctgccctgctctgagtatggagctgtgccagggggccctgataaaagatctgaagacctctagtaggtttgcaggcctttttgaatgaattcgttcagactgtcctttctaccaaactggtacaaatgagtgaggtgttccttatgggcatgaaccatgaggccgcatagactacataccgatggacagatggatgtagggaatggtggacaaatgaataaaggaacagactgagccaaatatgcacctgtcttcctgaaagagaactttcaaggcagggtggcaatttaatgtaaccctgcctgacatttaggaatctttaagctttgagagctgagttttacccagggacaaccaaccatgccattcaagacaggtccatagggcagtgttagaatggcctgagccttgtcaagcacccttggccatgcttttctcagcaagcctttctactccatggggaaaaacaagccagcacctggggccctccatgactgtgtgtacatgtcaatatggggatatgtgtatttgagaaagcatggcttgtttatcgtggccattctttaatagaaacttctctatagtacaaaagactttcacctaaatttgaggagctgagccacttgcaggtttggggctaaaattttattttaatcactttacaaaatgccgtttactatctgccaatttatagtgttaattgttttaagggcatta

SEQ ID NO: 315543 - DNA, 4001 bp, Homo sapiens
tttttttttttggagatagtctctctctgtcacccaggctggagtgcagtggcctgatctcggctcactgcaatctccgccttccgggttcaagcaattctcctgcctcaggctcctgagtaactgggattacaggcacctgccaccacacccagctaatttttggttttttggggggtttttttgtttttgggtttttttttttttttgggacagagcctcgctctgtcgcctaggttagaggttagagtgcagtggcgcaatcttggctcactgcaacctccgtctcctgggttcatgcgattctcctgcctcagcctcccgagtagctgggactacaggcgcgtgccaccatgcccggctaattttttgtatttttagtagagacggggtttcaccatgttggccaagatggtctcgatctcctgacctcaggtgatgtgcccgcctcggcctctaagtgctgggattacaggcatgagccaccgtgcccagcctcaagtctgaaatatataccatgggcaggagtagttggagcatgcaactcttccaaacagatattaaatgtggacaaagattcagaggctgccagggccaccaaccatgcccatgctcccacccctaagaactgcccaggcccactacttacagccaaagacataagcaccgggtgccaggagaacaggcctggaatgagaagaggaggcctcatggggctgaggcaagaagaaaccagccataccaatccttaagggttgaggaataccagcagcccatcacccaaggaggtgctgccaaactgtgagccccttcttgctctgcaacaagctgaccccacacctatcctctcttcctggcctcttcctggatcagaggccatgctttgccactcctctggcagtcctccctccttcccttacacctcctgagaggcagccaaatggagcacccagagaaggaaagacaaaccaggaattctgtgtgccctggccatacctacctgctccacctcactcatcgctccagcacagaattccctcaaccagccaggcctgttcccggaagtcccactgcccttcctccccaggaacagtggcccttcccttcccagaagtcagctatgaattctacttactggagccaggcctggcaagcacagccacaaagatggtaaagcccagggccacaaggtgggcggcagcgccagaagcagtacgcagagctcggtagatgtgtgactcggtctccgcagaaagggccatcgtcagccgtgctagtggttgtagcctgaaagcatagtagcgtgggccaggatctcaggtgcccactgttcactcctcactggagaaaaggctgcaaggcaggaatgccaccctcttccaataagttatggtaggaaagaacagtaccaagaccagcaccaggaatggtcacaacatgccagtcgacggccggcggcctgtcaacgtgtacccatgtctgaactggtaccaatcgctggcccgccttccaggtaggaggcgcaaagccatgtaagactacaaatcccagcgtgtaccacgccgtcgccggcagtagagccagctgggagggcgcggagcactatggaaattgtagttccctgctgcggtcccagttacagcgtgaatcccttagcgcaccgcctccccaagtgctgccagcatgctgcccctccacgctagggacttgcctgcctctgccgcagcgcagatctgatgcggtggtttcctccaaagaaagcgggatactccgggccctgccgcgcgcaccgccgctccgtcacggagccgctttacttccgggtgcgacgtctacccacccaggacttcctgggacgagccgtcccccgccccagccacgcctctgagtcgcgctgcgcaggcgccattgggcagagggattggcaagcttgcgtgccccagcgacacaggcctcgaggctgtctctgacaagtgttcacaggaggtggggacgcctctgcgcgaggaacgaggagctacgggcctgggcccggttattgccatgggcagcggctgccgcatcgaatgcatattcttcagcgagttccaccccacgctgggacccaagatcacctatcaggtgccacccgggctcgcgggactgggcgggaagagggacgttctcgagagctcaactggctgcctgaaggcagtagtttcccgtgctgcacgcaggcatgctgcttcattcgcagacaactgtgaggctagaggatagtcagacccaggcccccggctcccaatgtggcagggaagacatacgtcacattggcagtgtttgtaggatatcgggctgtagggatccggttggggggttccaggtcccacagaaggtgagttgggtgacccatgagtatccctgaactgagtgaagagtaaatgatgcataggaagtttaggtaaggcaggagaaagtgttccaggtagagggaacagcatatgcagaagccaggaaggaggtgagatcatagcgtatgtttggaaacagaaagaagtaataggcctgagtggatgggagagaggggaacgctggagaagaggacttgggcttggggggcatgaggaggtcaccatttgtactacacccagtacagatgtccactgaggggcccattgccactcccctccccaggtccctgaagacttcatctcccgagagctgtttgacacagtccaagtgtacatcatcaccaagccagagctgcagaacaagcttatcactgtgtgagaccctagctcggggtgagcggtgggtggcaggggttgtcccaggaggaggaagggacaggcttgggggcctgactgtgttccaattatccagcacagctatggaaaagaagctgatcggctgtcctgtgtgcatcgaacacaagaagtacagccgcaatgctctcctcttcaacctgggcttcgtgtgtgatgcccaggccaagacctgcgccctcgagcccattgttaaaaagctggctggctatctgaccacactagaggtctgcaatgagatgggcttgggtttaccgacaggcagagttggggaaggtgttcccatgtctccaaagtcccccaaacctgggaccctgcaaaccagctcaggactcagggcagccaaccagccaggggtcctgggatgtgcccaccatgctttccatgctctgtctagctagagagcagcttcgtgtccatggaggagagcaagcagaagttggtgcccatcatgaccatcttgctggaggagctaaatgcctcaggccggtgcactctgcccattggtatggccagcctctgcaaggacagcagaggggtagaggagagatgggaaagtgaacccagctagtcagggagaagggcaagactcatgaacacattggtgggcaggaaatagccatgggctgaggtgcccatgtccagggtccaatgcatgatggagctgggactgggggtagggggaaagcagagctctccagctctgccccttgggcaattccttcccctttgtgggcctccgtttctcactccataaaaagagaaagattagccctacccagaggcacctgcttgccccaagggatgctgggaggcctggatggtaattgaggacctcttggaagaagtggcactgaggatatggatggggccccctgcagatgagtccaacaccatccacttgaaggtgattgagcagcggccagaccctccggtggcccaggagtatgatgtacctgtctttaccaaagacaaggaggatttcttcaactcacagtgggacctcactacacaacaagtatgccatccctccctgggtatcatcacctggggctggccacagccctggcctcatcctgtttcttctgaccttgtcccactctgcccagatcctgccctacattgatgggttccgccacatccagaagatttcagcagaggcagatgtggagctcaacctggtgcgcattgctatcc

SEQ ID NO: 315544 - DNA, 4001 bp, Homo sapiens
tcagatgactaggcggggagagagcgaggacaggcagaacagaggtagggggtgccacaggaccagagggaggggtggccagtggggtcttggggctgcagaggggtgagaacaggtgagagatgcaatagaactcctctggccaggtttgcagctggcttggccaagctcactctgtaggatgcaggcggtagcggaagcgcacatcgtggctgggctgcatggtgccaaaaccccagcgctgcgggtcaacatggggtagtggtgtgtcagggtccaccaactctaagtcaaagtgtgtgaccataagcaggataaagagcttcacctcactgagtgcaaagaacctcccagggcagatggaaacgcccgaaccccagggcatggtgtagtggtggatcttcttgcctgtcttgaagaagtccactttccggctgccattagggttgaggaagcgatcgtacttgaagacggtgggctcagggtggatgtcagggtccatgtgcactgagaggtagggaaagagggccaggatgtctccatggcggaacagatactcctgcccactggacatcttcagggtatagtcttcatgaaccaacctgaggagggtgggtgcagccctcagccgcagcgtctcctccaccacgctgtctagaactggggtgtgttgcagggcaccgagtttgaaggcaaaggactgcttggtctccagcctggcctcacccaggacctgggtagcttcctccctcacagcccgaatagcttctgggtgcttcaggaggtacaagagggcccagaaagaggtaggccccgtgttcccctgggaggcccagagcatcatgaagttgaacttgtcctgcatagctgagggtaccccctgctccctcagaaactgaagcatgttgcccagccagttgctgatgccctccttctcctggctgtggctcacggagagcatcttgtgaaagagacgctggagtcggcccacttctagccactcccggggccacagcagggagtagacaaaccttgggaaaagaaggtcaaacttgcggaactccatgaataactctcctgcctgtagcaggtcctgctccttgtccttcgtgtagccgaacaagctcaggtagccagctgtgaacaagatgtaatagcagaagcgaaagaggctgtcctcatgccagcaactggcatccagactccagcctttggacgtcagcattacaaaggacaggctgtccagcatggtctcattaagatccttcaagccatcccccctcagatgcttggtgctggctgagtgtatcatctcatggtccccttgcactgaacggtatccaaataccttcagcaccagtttttttgcatattgcccaaagtctagttttctctgtgtgtccttgaggatggagccaaaggagagggggtccatgacgaaggtgaagtactggccccctagctgcactgtgaacacatccccatgcttggtcctcatgcgcttcagaaattcaaacatattcttccggaaagccatggcatggccaagccagggcacggtacccttgtccagagggggctcccatggcctgcgttgtcggagcatccctggcaggcacaggtatccagcaatgaccaccagcagagctcccagcactggaccccagagaaccatggctatgctcctgcggattaagctctcgacacgcacactgttccctgggtgccagagagctttgggaggccttggaaagtccaggatgtaaaggtctgagcacctggaccttgccctgtggccgcaagttatggcaaataacactagtgagacagtacttggaagcagcaaaatgttcccctggacttaacacttggctgactggtcacgtaggggaggaggaggtaaccaggagaaagctcagagagaagcttccagctatggtcacagctgctcaccagcttcatgctttgctctgaccttttcagacagctcttgcaccttctctctaagcctgccttgagcccactcccacccccatagctgacagactatttatacccccatttactcatgcttttatttatttgccagttcagttggtagaaatgaatcaagcacttacaaaatctcacttccactctttcctcatctttagaagactcaacaaatgcctccattcctacttggcccccttggtcaagtaagttaacctcactgtggctccactccctcatctgtgaagtagggataattacagtgccttgtaggtgctgttgtgaggcaaaaagagataacacctgaaaagcacttagaatagtgcctggctcatgctagtgctccatatatgttagttagtatcctaaagccttttctcttacctttgcctgctcccctggacctcacagcagcccgtgcttatctcctcattctttccctagtctgtcttcctctctggtctcaaagatgcttgccaagggggcatgaccttgttgaagtcatgtctgctcctacctccatgtgcacagagtacacagtcaaaggcaagtgaagaatgactgtatgcccttccacaacagctctgacccctaacccaaaaaaagaggcattgatgctggggctttagatgctgagaaggctgagatggtggagggggtgttgactccatcttggggtatgagtgtgaatgaactcatctgaggaggccacagagcctcccagatgatgactcttcaagcagaggctgagccctcagtctctgagcctctcacccggagccctctcacctgcccaactgcttgcctatacacttctctgacaagaaggcagaatcctggaattgtaaaatgtcagagacaatagagacctcactcaatcacttcatacttcatttcacaatgaggatctaggtgcagaacgcagtggggaccctctttgacagctgccctggcttggggccttgagataagctaatcattgactaagggccttctgagacatgtcagcccaggtccctgccagcagctcaagagggagaaaactgtaccattgacgccaaggcattagtcaagcagcctggcccattgttgctataggtgaggttcaaactcaattcaatcagttctgataacctccaaattactttttaacttcctaacgacctgagaacagggacttcggctcttcagacaaaagagggtatggaacttccatatcccctctggagtgagcttcctttgcctatgagcttccccttggcagggagttggaactgtccacactctgcttcccagaatccctctttaattgttcaggaccaccacagtacttggcatcatcaactctcctcaaccttagaattcggtctgaaactgggccaaatccaatgaactgaaccgtgtcccctagtttttaatggatgaaccattatttcacattcattcttacctcattcattaacccacactcatctattcattccctccttccttggagaagccccatctatccattcactagatatttattgggcacttactggcagaaatgttgctacgatctgggattataatcatgaatgagatagacacagtccctgctctcttgcagtttatggtctaatggagggagaaagatattaaatcactgcccaaagtaattatacacatatttctcatttaatgtgctttgctttattgcacttcacagatactatgttttttacaaattgaaggtttgtggcaaccctgcattgaggaaaactattggcaccatttttccaacagtgtgtgctaactttgtgtctctgtgtcacattttgtaattctcacaatatttcaaattttttcattattatcattacagctgttatggcgatctgtgatatgttagtactgtaattgttttggggcaccatgaactgggcccatatatgatgcaaacttaattggtaaatgttgtgtgtattctgactgttccactgaccagctgttctcccctctttcta

SEQ ID NO: 315545 - DNA, 4001 bp, Homo sapiens
tctactgattaaaaggctccccagactcctgcaccccgcatacaaagttggaactcctgagcacaaggcaggcccagagctcgcacctgccaagctggaggactcccaagcactattttaggtgctcatgtacatgtggttccctgtgtccaggccttgatgtcccccactaattcctgctggccctgaaaaccacagctcaggaattccctctctcctcaggctactatgtgagcacgcttagcgggcagacactattaatcatgggttccctggtccccactgccccctaaactgaattccttaagggcagaagcagactcttttacatgggtccctaggatctaccacagaatttggcaggtagtgaatcaaaatatttgttcaaatgaataaatgcattttgcaaaatcaatttttaagaacagtgaggatttgcactgtgcctcttttaacaaaagcacatgtcagcacaagcttttatatcccatagggtcttcacatgatggatccaactccctactgaaatctgatttctccaaaatacaggacacaggccatgagctcttcttccttagttcacagcaaaaaaaacccacaaaagttcaactaaacttctccatactcaaactatggatttttatgcctccaaaatgtagtacggttgaattcttttttagaacaggaacattccaaaataatgtctctgaacttaactaagcatagaacctgataaaactgcaataccccatctacaccagactttgcaaaacacctgaaagcacatccagctctttatctggaattatgtcctataaacaccaccttcccttcacggagtctggcttctatgccaggagtcacttctactcgcttatttagggaagcagcaggctagaatcttaagttagactctgcgctatgaaggtgctgtcccaggctcttgcctcaaccagtcaaaacttcatcgtcaccattaaaactaattctgaagcaactcgatttacaaaaataagaacttttcaagttatagagattaaaggatgcattttaagttaccagttgagtttgtaggaaactaacttagaatttatggcaaaaagattccaagccgagacgacattttctgtggagacactatccaaatacactcgcaggtgaaccaggtctgccaaatacaaagtgaaaaggtagtaagtaaacaagcttccaaaggagctcaagtaaggatgacggaacccaccaaggctctgagcagctctgacagagcagtggcggcagcggtgcccttccctgcctctagcggggctcgactccccacagtcggaatccggcccaactgggccacaacccctattggaagccagggaggcggcccgcaggcggctcacgaccgcggccaaggcgcaggctccacgttcccgggagcgcgggccgagctaaggcctggcccatcgccgcggcgcgcggcccgggccttgcagccgaacgctccgagcctttgcctgcgggacccagagcaaaggggcggctccgcccgggcggcaccgcctcctcacccacaaggacgtccgcggccgtgtccccgccccgggccgaacagcgagcagcagcaggtgttccgcggaaggctcagccggcagcagggatgggggcccaagcagccaggcacagcggatagggcgggcggtgcactcacccagcgccggcgggaggaccgcggcaggtgttcgctcctcctggccccaggacgccgccaccgccgctccccggggattcggcgcgaagctgccgccgccgccaccgccaagcctaagaggcgcgagcgccgcgccgcagccttcgcgcgagcacgtaccgggcggtgagagggcgctgagcgcaagggcggggcgcgcggccggagcctagcaaccgcctgacacgcgagtgttgcagccaatccagcggccagctccgcgcggcgccgactggctgtccgcgcgccgccggcttctgcctgcgtcggccgctccgcagcgcgccgcacccgcgcgcaagccccgccccggccagcacctctctgctcattggctagccactcccccgccctaaaagtcacgccccattatggaagcctcgcccccacggccagggaagtccgtcccgggacacaccccggcggtcggtcccggtcactcggagccttcagaaccagtagtgtgggggaggggctccccgcccaacttcaggcctttgggcctctaagactaatcaagggacagtcaggactgcgaactggcccagcaactggccacccgtcgactgcgttcagccctccttatttccttcgaatgcaaatcaaggggtatttctaagccatgagaacaatcaggaagcgttctctcaattgcaaaggatgaaagccttgctgcccggcccttacacggatgggagactgaggccagggacaggaggagcgggaagctagctcatctcctagagcctcgcccacagcaggctggggagtcggaaagcgcctcaggcctaaccctcgtcccctccccctgcctggaacactggaatccgacgcctgctctcctgcccaaaatagctctaactcgcaggcgctggtcactcactcctagtggcctgcattcttttggtgggggaagaaataagagaggggggttgctgcctggaacattcaaggggagggtcctaaggtagctctagctctccccaggacttaacctgcagccccccaccccaaaagccccagacttcacagttactgaaactgacagttaccggatgggtctgggaatgagacccgtggtgggctctgcttctcatccccacaccatgcgcaggatgggtccattccctccttggcctgtggccaggctggaattccaggcctgcactcttgacagcaagcacattctgaacacagaactggctgccaccagccatggtttcctccctggatcccggagagctctggggctccctggctttccctccctcctcaggagcgtctgggagatgcaagttgcagagataagaaaggaatgccccatctcccaaaaacatacctttttgcaattatctatacttcagtgtctcggctccaaacctcattcacagagacaagaaaaggaaggggctaggtgctgtgctcccgcctgtagtcccagcactatgggaggccgaggcaggtggatggatagcttgagctcaggagttcaagaccagcctgggcaacgtgtcgaaaccccgcctctgcaaaaaaagtaccaaaaaaaaaaaattttgaccagccgcggtggctcacacctgtaatcccagcactttgggaggccaaggcgggtggatcacctgaggtcaggagtttgagaccagcctgaccaacaacgtgaaaccccgtctctactaaaaatacaaaaaatagccgggcatggtggcagacgcctgtagtcccagctactcgggaggcggagacaggagaatcacgtgaacccaggaggcagacgttgcagtgagccgagatcatgccactgaactccacctgggcaacagaacaagactctgtctcaaaaaataaaaattaaaaataaaattggccaagcggggtggcacatgacctgtgctcccagctacctgggaggctgaggtgggaggattgcttgagaccaggaggttgagactgcagtgagcgggtgttcacaccactgcactccagcctatgcaatagagggagaccctgtctccaaaaaaaaaaaagggggggctaaccatgcagaaaattatttatttgggtttctaagcaaaatatattctattctctcattcactcctttggctctgagagtgcaccacctaccccaccaccgtgcactgctttgcagccatacgttctgctgcatattttagtgtctgactatatagttttacatctcaggtctgtaattccagcactttgggaggccaaggagggtggatctcttgagcccatgatt

SEQ ID NO: 315546 - DNA, 4001 bp, Homo sapiens
gcgggccgagctaaggcctggcccatcgccgcggcgcgcggcccgggccttgcagccgaacgctccgagcctttgcctgcgggacccagagcaaaggggcggctccgcccgggcggcaccgcctcctcacccacaaggacgtccgcggccgtgtccccgccccgggccgaacagcgagcagcagcaggtgttccgcggaaggctcagccggcagcagggatgggggcccaagcagccaggcacagcggatagggcgggcggtgcactcacccagcgccggcgggaggaccgcggcaggtgttcgctcctcctggccccaggacgccgccaccgccgctccccggggattcggcgcgaagctgccgccgccgccaccgccaagcctaagaggcgcgagcgccgcgccgcagccttcgcgcgagcacgtaccgggcggtgagagggcgctgagcgcaagggcggggcgcgcggccggagcctagcaaccgcctgacacgcgagtgttgcagccaatccagcggccagctccgcgcggcgccgactggctgtccgcgcgccgccggcttctgcctgcgtcggccgctccgcagcgcgccgcacccgcgcgcaagccccgccccggccagcacctctctgctcattggctagccactcccccgccctaaaagtcacgccccattatggaagcctcgcccccacggccagggaagtccgtcccgggacacaccccggcggtcggtcccggtcactcggagccttcagaaccagtagtgtgggggaggggctccccgcccaacttcaggcctttgggcctctaagactaatcaagggacagtcaggactgcgaactggcccagcaactggccacccgtcgactgcgttcagccctccttatttccttcgaatgcaaatcaaggggtatttctaagccatgagaacaatcaggaagcgttctctcaattgcaaaggatgaaagccttgctgcccggcccttacacggatgggagactgaggccagggacaggaggagcgggaagctagctcatctcctagagcctcgcccacagcaggctggggagtcggaaagcgcctcaggcctaaccctcgtcccctccccctgcctggaacactggaatccgacgcctgctctcctgcccaaaatagctctaactcgcaggcgctggtcactcactcctagtggcctgcattcttttggtgggggaagaaataagagaggggggttgctgcctggaacattcaaggggagggtcctaaggtagctctagctctccccaggacttaacctgcagccccccaccccaaaagccccagacttcacagttactgaaactgacagttaccggatgggtctgggaatgagacccgtggtgggctctgcttctcatccccacaccatgcgcaggatgggtccattccctccttggcctgtggccaggctggaattccaggcctgcactcttgacagcaagcacattctgaacacagaactggctgccaccagccatggtttcctccctggatcccggagagctctggggctccctggctttccctccctcctcaggagcgtctgggagatgcaagttgcagagataagaaaggaatgccccatctcccaaaaacatacctttttgcaattatctatacttcagtgtctcggctccaaacctcattcacagagacaagaaaaggaaggggctaggtgctgtgctcccgcctgtagtcccagcactatgggaggccgaggcaggtggatggatagcttgagctcaggagttcaagaccagcctgggcaacgtgtcgaaaccccgcctctgcaaaaaaagtaccaaaaaaaaaaaattttgaccagccgcggtggctcacacctgtaatcccagcactttgggaggccaaggcgggtggatcacctgaggtcaggagtttgagaccagcctgaccaacaacgtgaaaccccgtctctactaaaaatacaaaaaatagccgggcatggtggcagacgcctgtagtcccagctactcgggaggcggagacaggagaatcacgtgaacccaggaggcagacgttgcagtgagccgagatcatgccactgaactccacctgggcaacagaacaagactctgtctcaaaaaataaaaattaaaaataaaattggccaagcggggtggcacatgacctgtgctcccagctacctgggaggctgaggtgggaggattgcttgagaccaggaggttgagactgcagtgagcgggtgttcacaccactgcactccagcctatgcaatagagggagaccctgtctccaaaaaaaaaaaagggggggctaaccatgcagaaaattatttatttgggtttctaagcaaaatatattctattctctcattcactcctttggctctgagagtgcaccacctaccccaccaccgtgcactgctttgcagccatacgttctgctgcatattttagtgtctgactatatagttttacatctcaggtctgtaattccagcactttgggaggccaaggagggtggatctcttgagcccatgattcaagaccagtctggactatatagtgagacagcatctctacaaaaaaattttttaaattagccaggtgcttgagctttggagattaaaactgcagtgagccatgatcacaccactgcactccagcctgggcaacagaatgagaccctgtctcaaaaaaaaagaaagaggccaggcgtggtggctcacgcctgtaatcccagcacttcgggaggccaaggcgggtggatcacgaggtcagaagatcgagacaatcctggctaacacggtgaaaccccgtctctactaaaaatacaaaaaaaattagccgggcgttgtggcatatgcctgtaatcctagctactcgggaggctgagacaggagaattgcttgaaccagggaggcggaggttgcagtgagccgagttcacaccactgcactccagcctgggcaacaagagggaaactctgtcccccctcaaaaaaaaaaacggcaggaggcttggctgaccagacctgaacaagccacttaggaggcctaaccacctcccaccagaacccaaccagcccccactggagtccataccaaagatgacacagaaatagctgtcttcatggtcccctagactggctaggggctgtaaagttaaggccttgttactctctttagttctaagagtcaaagcctttaccctcagtgggaactgcacagcctactctagagttcagcacaaggtccccagtaactcaccttccaaaccccagcagagcctaggccactccaggccaggtttggtgctcacaaccagttggagggcagaaccaaaaatgaggtctgggccaggctcagtggctcatacctgtaatcccagcactttgggaaactaaggcagctggatcgtttgagctcagaagttcaagagctgtccatggccataccaccctgaatgcacccaagctcgtctgatctcagaagctaagcagggttgggcctggttagtacttggatgggagaagtttgagaccagactgcgcaacatgttagcaagacccccatctctacaaaaaattaaaaaattagcaaggcatatggcacccacctgtggtcccagatactcaggaggctgaggtggatcacttgagcctgggaggtggaggttgcagtgagctgcagtcatgccactgcactccagccaggtgacagagtaagatcctgactcaagaaaaaataaaaaggctgggcgcggtggctcatgcctgtaatcccaacactttgggaggctgaggtgggtggatcacgaggtcaggagttccagaccagcctgaccaatatggtgaaatcccttctctactaaaaatatgaaaattagccaggcgtggtggtacacacctgtaatcccagctactcaggaggctgaagcaggagaatcacttgaacccaggaggcagaggtt

SEQ ID NO: 315547 - DNA, 4001 bp, Homo sapiens
caccttgtgccagatccccaccatgcttcagtgctgaggccttgcacacctgggtatgccggaacctgtgtttggaagagaggaaggccagtgggcagggtcctgggtaaagagtcccccctcattaccctggcttaggttggtgttcctcccagcctcactcactcgtagtactcaggggcagtcatcagagtgccaggtgcaccagctactttcacagggccacagatgaggtgcttctgtcagaaagatgtcaggggctcagcctagttggcgctactctccaggaagtcccttgaggagcccaaatctggtgcctctactcagcccagactccctcaaattggaactgccaggttgagtgcctccgtctacccagccactcaggctacgcatggttcatccttctcaacctggtcttcagtgttcttgggatgtgtctacagaccccccttccccagagcctctgcacctgctgtacatgccctctcaagtccagcaactcccccaaggtcaagtgttggtttctgtcagctaacaagcccctcggtgggttttcaagggccctctgaggttgggggttaggtggtggggagctccaccatcattattaacctacctgtctgagtggagccttgtcaaccaacttctgccaaagcaggtccaacttctgttgctggaactcctcctcacagctaacaacatgtacaaccaggcagccgcctgtaccagtatctgaggccccagcctaagggaggacaatcataactgtggaagtacagtatacttggtttgggagaacctacagggctgggagtcactaaccaggcctgggtggctgtcctcgggccaatgccatagagcctcttgcagctcagccagcacagagaggagatcctcagtcactgaaaagagaacagacaggtgctgagactgacaagaagcagagatgtgcccctaaccccctcctgccttttctggccctgctaggcttcaggtcctacccagacagttgtccaggttggggtcatagccagctgtgcggccctgttcttccaccagctccttcagacacagtctgcctaggatgccaggggacagtgtcctcccgtcattagcagaggtaagttcttcaagggcgtggctcctcagggtgtgggaggaagctctctccgaggcagcgggccagtccacccgcagttgctgcaggaaggtcagcatgtgcggatcccgcacagctggcactaggcgcacgcacaccctgcgaagggagggcggccgcctcagtctgagcacctggtccagctcgccacgacttcccacctccagccgcagtccccacgggcggcgccgctcgctttctaggtacccggcagtcccactttctccattccggccccgcggccccgctcacccgtgagcgcgcagggctcgcgccaggtgatcggccacgagcaccgtacgcagctggctcaagcggagtgcgcagggggagctgcgcagtgctgggcagtgtagtaagacgcgctggcccagcgaggcaggcgaggcgggcgtggcataggcggccacggcgctgaggacgcgctcgaagacggcggaccgctgcagttggagagacagacccgcgggggtcggcgcgcagcgcagcaccggggccacaccggggccctgcaggcaggcgagggcatggagcaaatgctccggaacctgcgggagaacgggcgtgtaaaagagccacggcacggggcccatctcccggccgcacggccccgcccggctcacgcccacctggccgtcatcgaagcgcgcctgcagcgcgcggtgcggtgccagaaagtctcgggaacgcaggtggcgggtgcgcgtctccttgatccacaccggaccgcctggccccagggccgcgttgagggcccccagcgtctccccgaccccaaggcgcctggtcgccatggtgaccggaaggagtaagcggaaccggaaaaaaatttagggaggtggaacttccggaaaggaccgactagctggggcggggatgcggcggtggtccccgtaagtggacaggtgcgccagtggtagccctgtcggctgctttcgacctaccgcccccagcgccccttccgcgtggtccacctgcacagccgggccccggatctgaaatctcggggccctccctgggcctagggttctttcgctgtgacccaggccttaaccaggaaaaggatcctcgcgacccggtgggcgcttagaccgggtaccgtctcttctcatcgaagtctcacatgtttgttttaataacatttcatttctcccattttacacatgatgaatattcgtcactggaataaggcagtataacattaaggccactttcacgacctacttaaaatatctcgttttaaaaagaatagtgttccgcggtttcaggttatttgcaagcattttctcgtttgagatatgggtgtttttttgtttgtttgagacggagtcttgctcttgtctcccaggctggagtgcagtggcacgatctcggctcactgcagcctccacctcccggattcacaggattctcctcctcagcctcccgagtagctgggattacgggcgcccgccaccacgcccggctaatttttgtatttttagtagagacggggtttcgccatgttggccaggctggtctcgaactcctgacctcgtgacctgcccgcctcggcctccgaaagtgctgggattacaggcatcagccactgcacccagcccgggtggtctttatgcccaataaataagcactctgatacagttggcggttttcttctcttgatacctgagaaatcacaaccatcatgatggcttccagaattaccagactttttttttttttttttgagacggagtttcgctcctgttgcccaggctggagtacagtggtgtgatcttggctcaccgcaacctccccctcccgggttcaagtgattatcctgcctcagtctcccaagtagctgggattacaggcacgcgccaccacgcccggctacttttgtatttttaatagagacggggtttctccatgtttgtcaagcctcgaactcccgacctcaggtgatccgcctgcctcggcctcccaaagtgctgggattacaggcgtgagccaccgcgcccggctcagaatgaccagcttttaatgtgactcctttaacctggtgtgctttaacaacgatccttaaagcttcctgttttaggcaacagccatttacgggccaaccaaataatgcgaccataatagaaaataggcctcagttggagtatcttgctcctctaccaataggaaaggtctttttctttctcccacaaaggttcccaaatgtcttcatttcactgtaacttactcaccccccaccccacccccattccttttaatagagaagctaactcagtagagagagttgggaaatccggagagcagggaaacccaggggcaggaaaagcttggcaaggcccctttctgggccagggctgaggccctgctgggaggcgccgaaagagcactgggcggacacgacattcccgatggcttctcgggtgcccactcaacgggagtgatcgtgtcattccaaagcgctttccattctgaaggtgcatgacctggagacaactgcttagcagggttgggaaccctcagtcaaactgaggacttcagatactctcatccacgaagacggttggggtggtttttccccaggaagtaagagggctatctttagcgagatgcgggctgaggcagccctgggggagtcactaccattgcagccctacccagaggtcctgggtccaccctccctcgccaatcctccccagggttccagagatggccaccagcctcggctctcccacgtctacacccatcacctccagcctgagggcgcaactgagaggaactgagacccaagcagctcagtaaagtatgtctgggggtcaggggcaccccatctgggccaggg

SEQ ID NO: 315548 - DNA, 4001 bp, Homo sapiens
ggtgtttttttgtttgtttgagacggagtcttgctcttgtctcccaggctggagtgcagtggcacgatctcggctcactgcagcctccacctcccggattcacaggattctcctcctcagcctcccgagtagctgggattacgggcgcccgccaccacgcccggctaatttttgtatttttagtagagacggggtttcgccatgttggccaggctggtctcgaactcctgacctcgtgacctgcccgcctcggcctccgaaagtgctgggattacaggcatcagccactgcacccagcccgggtggtctttatgcccaataaataagcactctgatacagttggcggttttcttctcttgatacctgagaaatcacaaccatcatgatggcttccagaattaccagactttttttttttttttttgagacggagtttcgctcctgttgcccaggctggagtacagtggtgtgatcttggctcaccgcaacctccccctcccgggttcaagtgattatcctgcctcagtctcccaagtagctgggattacaggcacgcgccaccacgcccggctacttttgtatttttaatagagacggggtttctccatgtttgtcaagcctcgaactcccgacctcaggtgatccgcctgcctcggcctcccaaagtgctgggattacaggcgtgagccaccgcgcccggctcagaatgaccagcttttaatgtgactcctttaacctggtgtgctttaacaacgatccttaaagcttcctgttttaggcaacagccatttacgggccaaccaaataatgcgaccataatagaaaataggcctcagttggagtatcttgctcctctaccaataggaaaggtctttttctttctcccacaaaggttcccaaatgtcttcatttcactgtaacttactcaccccccaccccacccccattccttttaatagagaagctaactcagtagagagagttgggaaatccggagagcagggaaacccaggggcaggaaaagcttggcaaggcccctttctgggccagggctgaggccctgctgggaggcgccgaaagagcactgggcggacacgacattcccgatggcttctcgggtgcccactcaacgggagtgatcgtgtcattccaaagcgctttccattctgaaggtgcatgacctggagacaactgcttagcagggttgggaaccctcagtcaaactgaggacttcagatactctcatccacgaagacggttggggtggtttttccccaggaagtaagagggctatctttagcgagatgcgggctgaggcagccctgggggagtcactaccattgcagccctacccagaggtcctgggtccaccctccctcgccaatcctccccagggttccagagatggccaccagcctcggctctcccacgtctacacccatcacctccagcctgagggcgcaactgagaggaactgagacccaagcagctcagtaaagtatgtctgggggtcaggggcaccccatctgggccagggcgctgctcaggcaggagagcaggggacgaaatccaagcgcagctggaatgctctggagacaacagctgcttttgggattccgttgcccgctgtccagccgttggcggggggcgggggagctcctgcccccaggtcactcgccctggggccacatcagaacccgcccatccccagtcccaggaggaagacccgggagtaggttgtgaaacggagtctagagggaacaagacgctcacctgggccacagaacaatagaaggggaggtgggggcctcccctgggaccgggtcccgatccggattagatccgtggggcaggattagccctgttggtcccacgaagcctgggccactggtgcggtgacggtggtggggcgggcttcggaatccgtcaggagggaagcgcgcccgtggggccggagaggaagtaaacccgcgcgtccacctcggggacacccccgcgctcggtggcctttgtccggtgacgctgccagcgcccggagcaccaggggccgaaggggtccacagagcagccgcgggacccccggaaacccattgcgaccggccccaggagacccaccaccaggctcccactgtgccgagcttcccgctcgcccggccccgcgggtagcgaaagcgacaatgttcccctgaggccacgacagagccggcgtgccgagatgcccaaaccccgcgcgggggccagcgactctcgcgccagtaggcccttgacttggatcaagacgggggacgggggactcccaggacgcgagcagagtgaacgaggacaaggtgatgctccacgcgcttctacttcaagtctggtccggttcggcctggtctgggccagccgaacagccacccaaacactatcacagcttgcccttccgcttgctctggctgcctgcagacttggagccattttaaggagaaaccacctggccacgccccctagagaacccgagaagccaatccacgctcggccacgcccctctccgcgcgctgcggagaggccaacggtcgcgcgggtgacggttagggcggggcgtgcttccgcgtctagccggagaaacttgagccggctgccccgcccacggtgcccgaagccccaaaggctggaattaggggctagaagtctggcacccaccgcctggccaggtgttcgggacgcgaccaggtgggcggtcgccccgccccgggagcgcggcttaatagctgagagcccgggggccaggccgcggctgcggcccaggcaacgccctgagggtggccacgctgccaggtgttccactcccccgggactatgggcaagggcccggggcggggagggcggcaggtgctgacactggagctgcgccggaggtcggggaactcggcctcctaagactgaggacactcgcctgctgggccggtcgagctgtgcggtgccctccgggacgcagggggcgctgcagccacgctgggtcaggctccgcagggccctcccaacccggggactaacggcgccggtgacgacttcgccgcgcgttggtcagccatggccaccgctctcgcgctacgtagcttgtaccgagcgcgaccctcgctgcgctgtccgcccgttgagcttccctggtgagcttggaccccgcgccctcgaccatccagccccctagggccggcgactgccagcccagcaccttccggcctctcgggctgcccggcccggccccgcgcccctgaccctttccctccgcagggccccgcggcgagggcatcggctctcgccggcggatgacgagctgtatcagcggacgcgcatctctctgctgcaacgcgaggccgctcaggcaatgtacatcgacagctacaacagccgcggcttcatgataaacggaaaccgcgtgctcggcccctgcgctctgctcccgcactcggtggtgcagtggaacgtgagtcctggcccgcagtgtggaaactgaggcccagagtcacaggccctcaccctgcttggtccctgcaaacttggctttcctctgtctcctcctgcagtggatggagatggggagaggctgcgtggatttgtcgtattaaatgtgcctcctccctgcacaggtgggatcccaccaggacatcaccgaagacagcttttccctcttctggttgctggagccccggataggtactggggaaggggagggagaacagaggtgttctgggccccagaaggcgacccccactgcagcctctcaacagaactgtagactagccacacccacccttccctagagatcgtggtggtggggactggagaccggaccgagaggctgcagtcccaggtgcttcaagccatgaggcagcggggcattgctgtggaagtgcaggacacggtgagtcccgggactggggcatgctgcggggagcacaggcctggcgctagacaggctgatgctggccttttctttgcagcccaatgcctgtgccac

SEQ ID NO: 315549 - DNA, 4001 bp, Homo sapiens
caatctaattctaccctatcattaagcttaaagtgaaatactagagtcatctccattgaaattaggaataaggtaagggcacctccttattactactatgtatttttttccactatgtatgacaaaggtgaacattaatacagtctttatgaatcaatacaaataaaaataaaaaggaagtttaaaaagctaatgatcgatcaacttcattgatgatttttaaaagtgcacatcaacatagtaaaatattttccagctattaggttgacaattcaaaaaatcctaatacctttcattggaaagggtgtggaaaagagatcactctacacaccatcagtgggaaaatactgatacattctttacaccaagagtagcttggaaaagatgtatcataatttgataggcgaggatactcatcactatactaatgaggggtgtaacttaaaattgttaccaaaggggtaaagcgctttcacccagcaattccacttacagcaattcatctcaaggaattaataatacaagcatgccaagatatttacacaaggatattcatagcatttttttttttttgagactgagcctcccctctttgttgcctaggctggagtgcagtggcatgatctcagctcactgcaacctgcctcacaggttcaagtgattctcctgcctcagcctcccgagtagctgggattacaagtgcgcaccaccacgcctggcaaatttttctgtttttagtagcgatggggtttcgccgtattagccaggctggtctcgaactcctgacctcaagtgatccacccgcctcagcctcctaaagagattgattacaggcgtgagccaccgcgcccagcccatgatagtattgttttaatattgaaaaagtattcatcataagcgaattcggtaaaataatggtataatttttaacatatactgaaaattaaaattatcttcagaacaatgcccacatcaattgaaagatgcaagttgtaaaatagtattatgcagcacggtgtaactcttgtaaaagttggcccatctatatgcaatacatgcataaaaataatctagaaggtcatacatgtaccaaaatttaacggttataagtgttgggattaagatggattgctattttcttacagcgattgttttcaaatgagtaaatatgatacttttataatcagaaaaataatccaatgaaacaattcggatttaactctaaaaatgaaaagtgttataataaataattacttacaactcaaggtgattactttttattagcatggataactatatgttgcacaattacacataataggtgtttatttttattttaatgtttatacatggtaatataaactgtgtataaatttcctccctgaagagactgagaattatcaatgcagacacacacacagcatgtaatacgcgcgttcgtgactcagtggttggtctgcgtgttcagagctgcatcttgtggtggcgctgaagcaacgctaggcatttaccaaactcacaaaaacgcacacccaacgctatctaccaaatggacattttgtcaaaggatcctggtttatcgagagggaaaaaaccgtacccagaatttaaaaattctaaaattcttaatggtaactgctgaaaccaacctcgtgcggcaaagatggcgtcaggcgagcttttctgtcgccgccacacgagggagccgccatcagcaagtcccccgcagctgacaggcgcgaggggaccagaggcacttccggcccagccccctcagctacagggccatgccttcaggacgccccacaccccacgctgaggcccccacgaaccccgcccaccccaccaagtacagggaccaggagggaaccacttcctaaggaagctccggccctcgaagtttaagaaggcaagtccctcagcaggcccgccgccatcttgcggagccacggggagagcgcgccagaaatgaggctggcggggcggaggcgcgtgggagtgggggaggggcggaggcgcgtgagtgggggagcgcgtgggagtgggggcggggtggggcagtcgggggtggggaacccgcaccccaaacctctgccagtagagaacccgaaccgggaaatgggtgcctcaagaaggccgtggcccttgcacgtggccggcgaggcagcgcgtcctcggggcccacccccaccttgccgcccttggcgtcccgcgcctgcctctctgtgtaggccgcgccactgccaggccgcctctcccaactctgtgggccatggctgtggtgcgtccaggcaggtgccccccaaacaggaaagccgaggatgacttcactttccgaccctgcagagccgagtttcacccacgagtgaagactccgccagccttgcccctcgggcctctccctcaactcaccatgatggcggcaggcagcagttcccgaccggctccaggaggagcagaggctgtgcttggcgcaccacttctggggctgctgtgaggtccgctggaacccgctgcgcggcttcgagtggtcaaaggagccaaagatgaagagaaaaggaaaaccaagagcgggtgacaaggctgaggagccccgaaaggcggaccgtcaggctgaggagcgcaggcggactgaggcgtggtccgcggggctcagggaggtggctcctgcgccgggtatcggggcgcgtggtatcggcctcagccaatgggtggcagcgccccgccccctgcgtgggggggctgcgggggacgacggcgcccacgcggcgggggcgtagggtacgcagcgcgtgtgcgcaggtccggtgcctcagtcccaggaaggcgccgcgctcacatagacccacagacacacacatcacccccaaaacacccctaaaataagtatgcatactgaaatgtatggtatagtttacaaaaatgataatctaatgtgtctaggctgcagtttccaaatggcttctctaaggcacagggttagcgccatcacttttagcttcacactcaccccaaaatcttttttaaatgcctacagaaataaatcgaagcaagtctgtggaaaacagaaggagacatcaacaggccagaaacttgcactcctttctgtcaagtttgagatagaaggggttggatgggaggaaatgccagtttgacattcaggatgtttgttctttcaagaaatagttactgagtgcctgtgattaccaggtacagcagatgcaggagtgaacagaataacagaacatgtgtttgctcagggatcttacattttaatgggagaattcaccttccaggccttacaggaaggcgctaggcctgcctagagaattctagaacattcttaaggtcagaatacgggcgtagagcaggagcaagctgtgggccagttggtggagcccatcacgtaacttcgggaaccactgcagcaccttagctatacacacagggctaagtagctatgacctttatccacaaacttcacttctgtactgacggaaagcattaaaatgttactttttgagctggcaaaacggtggacttctataacgtgagcagtatctcattactaacacctagtaatgcgggattaaaataaaacgttttattttcaatatgcagctaaacccataagaaaagaagggaaattccaagtaccaaaaataaactgaaaaccagagcaatgacttattcaactgattcttctcctgcccgggatatgggggctgggctgtagggcagccagtcatactagtttgcccaggacttacatgattttagcactgagaaattcctacgtccctaaggaaaccagaaggattggtcatcctaggtgtgggcaaagtgttgttactctctgtaacttgagatctggatgtttagtggtaggaggtaagggctcagggtgggagctggaactgagtactctgcaaaacgccattgtccctaaaatccttaggaaaaggatggagtagggaaaatgtgaaacacccatggcgagc

SEQ ID NO: 315550 - DNA, 4001 bp, Homo sapiens
ccacgcctggcaaatttttctgtttttagtagcgatggggtttcgccgtattagccaggctggtctcgaactcctgacctcaagtgatccacccgcctcagcctcctaaagagattgattacaggcgtgagccaccgcgcccagcccatgatagtattgttttaatattgaaaaagtattcatcataagcgaattcggtaaaataatggtataatttttaacatatactgaaaattaaaattatcttcagaacaatgcccacatcaattgaaagatgcaagttgtaaaatagtattatgcagcacggtgtaactcttgtaaaagttggcccatctatatgcaatacatgcataaaaataatctagaaggtcatacatgtaccaaaatttaacggttataagtgttgggattaagatggattgctattttcttacagcgattgttttcaaatgagtaaatatgatacttttataatcagaaaaataatccaatgaaacaattcggatttaactctaaaaatgaaaagtgttataataaataattacttacaactcaaggtgattactttttattagcatggataactatatgttgcacaattacacataataggtgtttatttttattttaatgtttatacatggtaatataaactgtgtataaatttcctccctgaagagactgagaattatcaatgcagacacacacacagcatgtaatacgcgcgttcgtgactcagtggttggtctgcgtgttcagagctgcatcttgtggtggcgctgaagcaacgctaggcatttaccaaactcacaaaaacgcacacccaacgctatctaccaaatggacattttgtcaaaggatcctggtttatcgagagggaaaaaaccgtacccagaatttaaaaattctaaaattcttaatggtaactgctgaaaccaacctcgtgcggcaaagatggcgtcaggcgagcttttctgtcgccgccacacgagggagccgccatcagcaagtcccccgcagctgacaggcgcgaggggaccagaggcacttccggcccagccccctcagctacagggccatgccttcaggacgccccacaccccacgctgaggcccccacgaaccccgcccaccccaccaagtacagggaccaggagggaaccacttcctaaggaagctccggccctcgaagtttaagaaggcaagtccctcagcaggcccgccgccatcttgcggagccacggggagagcgcgccagaaatgaggctggcggggcggaggcgcgtgggagtgggggaggggcggaggcgcgtgagtgggggagcgcgtgggagtgggggcggggtggggcagtcgggggtggggaacccgcaccccaaacctctgccagtagagaacccgaaccgggaaatgggtgcctcaagaaggccgtggcccttgcacgtggccggcgaggcagcgcgtcctcggggcccacccccaccttgccgcccttggcgtcccgcgcctgcctctctgtgtaggccgcgccactgccaggccgcctctcccaactctgtgggccatggctgtggtgcgtccaggcaggtgccccccaaacaggaaagccgaggatgacttcactttccgaccctgcagagccgagtttcacccacgagtgaagactccgccagccttgcccctcgggcctctccctcaactcaccatgatggcggcaggcagcagttcccgaccggctccaggaggagcagaggctgtgcttggcgcaccacttctggggctgctgtgaggtccgctggaacccgctgcgcggcttcgagtggtcaaaggagccaaagatgaagagaaaaggaaaaccaagagcgggtgacaaggctgaggagccccgaaaggcggaccgtcaggctgaggagcgcaggcggactgaggcgtggtccgcggggctcagggaggtggctcctgcgccgggtatcggggcgcgtggtatcggcctcagccaatgggtggcagcgccccgccccctgcgtgggggggctgcgggggacgacggcgcccacgcggcgggggcgtagggtacgcagcgcgtgtgcgcaggtccggtgcctcagtcccaggaaggcgccgcgctcacatagacccacagacacacacatcacccccaaaacacccctaaaataagtatgcatactgaaatgtatggtatagtttacaaaaatgataatctaatgtgtctaggctgcagtttccaaatggcttctctaaggcacagggttagcgccatcacttttagcttcacactcaccccaaaatcttttttaaatgcctacagaaataaatcgaagcaagtctgtggaaaacagaaggagacatcaacaggccagaaacttgcactcctttctgtcaagtttgagatagaaggggttggatgggaggaaatgccagtttgacattcaggatgtttgttctttcaagaaatagttactgagtgcctgtgattaccaggtacagcagatgcaggagtgaacagaataacagaacatgtgtttgctcagggatcttacattttaatgggagaattcaccttccaggccttacaggaaggcgctaggcctgcctagagaattctagaacattcttaaggtcagaatacgggcgtagagcaggagcaagctgtgggccagttggtggagcccatcacgtaacttcgggaaccactgcagcaccttagctatacacacagggctaagtagctatgacctttatccacaaacttcacttctgtactgacggaaagcattaaaatgttactttttgagctggcaaaacggtggacttctataacgtgagcagtatctcattactaacacctagtaatgcgggattaaaataaaacgttttattttcaatatgcagctaaacccataagaaaagaagggaaattccaagtaccaaaaataaactgaaaaccagagcaatgacttattcaactgattcttctcctgcccgggatatgggggctgggctgtagggcagccagtcatactagtttgcccaggacttacatgattttagcactgagaaattcctacgtccctaaggaaaccagaaggattggtcatcctaggtgtgggcaaagtgttgttactctctgtaacttgagatctggatgtttagtggtaggaggtaagggctcagggtgggagctggaactgagtactctgcaaaacgccattgtccctaaaatccttaggaaaaggatggagtagggaaaatgtgaaacacccatggcgagcagatgaggaggcttgtcccatctctggatgaagaaaatatgtatttaactctgattaaatttcaaaaccctagacctgcatttcatcaacgtttggagtttaaatctataatatattattggaatccccaagccaagaaatggatcctcctacaccatcaccctctctcctgccttaagagatcctagacatggggcatctagaatgcctggcagaagcaaacataaaaccgacttgaatgaatgcttctgcaacctaggctgaaagtgattctcataagaaaatgaccctttaatgaaaagctcacaataaaaaattatacaatactacttaccttgaataagaatggcatacgaaaaagaaagttaaaatgtcaaaaactaacagaagcagcttcttttgcattgtgtatacgtggtttttttttctttttctcagtttttttcctcaacttatttggagtaatgctcacgctctggctctctctctctctctctctatgtgtgtgtatatgtattatattaattattaattattaattatattatattaattattaattatattatattaattatattatattaattatatatatatatatattttgagacagagtctcgctctgttgcccaggctggagtgcagtggcgcaatctcggctcactgcaagccccgcctcctgggttcatgccattctcctgcctca

SEQ ID NO: 315551 - DNA, 4001 bp, Homo sapiens
cttcagttaagtataataacagtactgtagtagtatttttaaagatccttatcacttaaaaacatgtactgaaatatgtataagtgaaataatctaacggttggacttgctttaaatactctagtcatctcttcccacaaaaaaaaaaaaaaaaatccaggagattgcaatataatagtcgttgaagctggttaacaggtactgagattcatcatactattctctacttttgtgtatgcttaagaatttctattaataaaagtttaaggtctttaattcaataaaaattgtaagaaaaaatgaagggactacaaatagtgtgtgaggtctttgcaattatattagctagtgcttaaaacactagatgaagggcatattttcatgatcaaccatttaataattaactatcttaattaaattttcacgattaagtatttaaattaatgacattctccaaacaccatacatgtcaagacacagtccaactaacgcaaatcctgataagctcttccatcccaggaaaaaaaagtatccacaaacacaatcacatacctaaataataaatgtttggtgccacccagccaccatagggtaactcttgcaaatgatttgaggcttcatggtttcccccaatgaagagcgtgagaactggagcctttttctctccagagtaatacctagaacataagagcaaagtcagttaccacaattaggcatagcagaaaagcaaataagttccgaaaaaaaaaaagaaactgagttcatcataaaaagttaaaaagctctttcaaaaggaattgcctggggctgggcgcggtggctccctcctgtaatcccagcacttttgatggccgacacaggcggatcccctgaggtcaggagttcgagaccaacctggccaatgtggtgaaaccccgtctctactaaaaatgcaaaaattagctgggtgtaatcccagctactcgggaggctgaggtgggagaatcgcttgaacccaggagacggaggttgcagtgggtcaatatcgcggtactgcactccagcctgggcaacaaagcgaaactctgtctcaagaaaaaaaaaaaaaaaaaaaaaaggaattgcccagtatccatccttgcccttaggaatgaagagcttccaccttgagcctcaagtcagtgcccgttcaattaagtcaagaactgtttcgagttcattgccataacctcatcttctagaaccacaacaagcacatagcaggggcccagtaaaaacttcaggatcattgaatgaactaattccagagtcctatcaagtacaaggtagctatctaaacctgtcagcttcttcctccaggttatcccctcccaggcttcgacaccctttgaaatggataagatgtgtatggaaagaaggaaagtgacatttcctaagcacctaatgagatagggtgctagtgaaactgacataatttggtacctaactgaatacagtaccgaactgaatacatttcccgcctcccactacctcacccctgtattcagttaggcaccaattagagatacagagagaacaaagacaggatctaagggaaacaggcagccagtggcagagggaacccagtcccacccccccaccgccaagtccgggcccggccgcgtcctcacctgtagaaggtttgcatgtgacgatacttgggcggcacggccatgcagcgtagatccgcctcgttgcgcaccgcctggaagtcgccgcagcacagcaagaggtcgacaggccccgggccgcgccgctctgccagcgccagcgtctcatagatcttatccagctcgccgtggcagcagccagccacagccacccgcattctgccggcctgaggaggtgagcgctgcctgcaacgccctacaccacagccagcccaggaccgactgatcgctcagctcccgccaactttaataagtatagccaccgcctgggtgtagactcctgcaaaataattcacttccggtttccagatctcgcgagagagggaccgggaaggtcaaacctaattctgggatcccagggaacttattttctttttttccttttttctttttttttaattattgttttatgcagtcaatatttttttgtatatacatccacaaatgtactctttccatccttactcttttcttcctggatttccatttttctctttggaatcatttttcttctgtctgaagagctcagtttaagttttcctgtttgtttagtgtaggccgacgacagattaatttttttctagatatttgtttgtttaaaaatttctttccactctggggaaaatggtgaaaccctgtctctactaaaaatacaaaaattagctgggcgcagtagcgcacgtctgtaatcacagctacttcagaggctgaggcaggagaatccctcaaacccaggagacggaggttgcagtgacctgagatcgcgcccctgcactccagcttgggcgacagagcgagactccgtctaaaaaaaaaaaaaagagacaaaagagaaagagagagagaagaaaagaaaagaagccagtgtgctggctcacacctgtaatcccagcactttgggaggcagaggcgggcggctcacgaggtcaggagtttgagaccagcatggccaacatggtgaaaccctgtctctactaaagatacaaaaaattagctgggcgtggtggcgcacacctgtaatcccagctacttgggaggctggggcaggagaatcgcttgaacccaggaggcagaggttgcagtgatctgagatcgtgccattgcactccagcctgggtgacagggtgagactccgtctaaaaaaaaaaaaaagaaaaagaaagaaagagatgtctttgtttcaccttaattcataaagggtgtgtttactgagtaccgaataccagttaagcagtgtgtgtgtgtgtgtgtgtgtgtgtgtgtgtgtgtggttttttttttacaaagcatttcaaaaatagcattctattatcttctggcttgcattatcttctactgagaagtcacctataaacttaaggttttttttcactgaaagtaatgtgggttttttgtttgtttgtttgttttttgtttttttgagacggtctctcactctgttgcccaggctggaggcagtggcacgatctcggctcactgcaacctccgcctccccagttcaagcgattctcctgcctcagcctcccaagtagctgggattacaggtgcacaccaccatgcccagctaattttttgcatttttagtagagacagggtttcaccatggtggccaagctggtttcgaactcctgacctcaagtgatacgcccacctcggcttcccgaagtgctaggattacaggcgttagccaccgcgcccagccagtaatgtgtctttttctttgctatttactgttttctctttctctactttctctccctactccttaaagctattttaataaaatatatctaggtggttttttttttgaactttactcatttatgctttctgaatctatagcttggtatcttttttcagttttggaatattcttggtcagtatctacttaaatgttgcttttttttctgtcttttcctactcctttggaatttttccatggtattttacctatcttttatttctattccatagttctcatttttatcagtgttttattttggatagtttctaataacctctcttctagtttactaatcctattttgttctatgtccaatgtacaaactcatttattaatgttttaacattatagtccttttcaattttaggatttatattggattcttttccagtgaagccaatagtttaaagagattctttatcttttaatttatttccttcatcttttcctctctttctctcatatattaatcattgttattttaggttgcctgtcttctaagcccaatatcttacttatctgcagagctgattctattgtctgtttctgtttcattggattcttagttt

SEQ ID NO: 315552 - DNA, 4001 bp, Homo sapiens
ctatggagtaatatgccctcctgcatcaaggtaccttatattctttgtgtctcaatgtccttacgtttgaactgggataacaataactatctcagctgattgtagtgaagattcaaggagttaataaacccaaaccacttagtccagttgttccagccacaaagtaagccctaagtgttagccatatataagcctgttttcccccctaccaggagggaaatacatctctacagtggaaagaaggatttcacactttaatatattaaatgatgatgatgttcagtaattttagaagacgatctaactaaaacctaaatgctaagcatctaaattttgagttactctatatagaaacgtgtctagatgtaaggggtcagtttgccaaatacattttttccttatagttacagagattatatttccacatgcctgtcaaggttcggcatcttcttaatgacaggccatgattccatacttcactgaaaaccatgagagcaacataaagctgggcttaaaggcagagaacaattttctttttaaaaaactctcttcctagcaataagtaacaatccaatccttatccttcccactgcaataaaatggaaaatgcaatggaaatatcttttcaaaaactgatgccaaactgattcaaaaagtgtggtacactacgggaaaacagtactaaaggggaaaagaaatcaccctgcattctccttccattatgataagtatttaataaacagttttgcctgtttctggaacaggtttttcaaggattgtaggtggaaaaaaaaaaaagttttgtcactttctggaaaggcttacctttttaatgtggagagcttcacttgggcaaattagcatagcgttgggtcagacccagtgtttgaccaaggcagtctagaccaccagcctcaatgatggattgtaaagaacatgttctgaatccaagactcagagataagcagaaactattccattcgcttcagaacccgggctctttcacaaaggatcataattaccaccacttacctttaataggcttaagatgctatttaattaacctgccttcctacagtgtccatccatccgtgcagcttaactttaggggtcattacctccaaaggttctttttcctccccaaaattttccccagaaggacctaatatcaacgaggctttcatagcagggtctcacgtccccctttcagaaaaataaatggccttgccaaaaagtaaagccgcgccaacttgggggacagacgggcaagaccttgcctttgcaactcaaccccgtgagtacccagccaggtccggccacgcacgaaagcgcaccgcgcctccctgcagcgtctgcagatttgttcaggggccaagagacccgcagccccgacggaggttcccccgccgctcactcccctgggaccactcaccttgctgggctccagcgtcctcgagcagcaggagcaggacaagtaagagcaggaggaacagaggcatggagaaggaggaggagttggagcagggagggagggagcgggagagggggagcgcggcccaggcgggggcggcggccgcggcccggacttggggacactgcgggcagcgcctggctctcaccaccgcccggctcgccatcgcggcggccggcagtctgcctgcatagtgcgggtgcctcggcagccccgcgcgcctctggccgcggcacccgaccaggagacggcggcagcggcgggagaacaagaggcagccctcgcctcaccccgcgccgggacccttccgcccctcaccccgctttcacctactcctccttcgtcccttccctccgctccccgcgccgagaccccaggccggagcgcaggggaggggagggaaggaagcggagtcctcgagccgcggaggacggccgcggcggagctaaggaacgtgcctcccgcgccgcgctcctcaccagggtcgccgctcgccgcgctcacccgcggctccggctagctggcaggcaggcccgcagccagctccctcgcgctccctctcgcgcgcgccggccacgccccctaggcaccgcggccaatcctcggccagctctggtccgtctccttccgcgaaacccaatcagcatgctcgctcctcgctcgacccgctagttctccggcccattcctcgagctccaccgccccttacctccctcttccaatccccttcggcctttggaggcgtcccacccgcctcctccaatccaggtcccgccctccagcttcggatccccgcggcccccgcccggcccgggcgcctgttattgttgggccctcagcccaaactgatcccgcagaggcggcagccagctcgtcagtgacttccgggacgtcccccatcccgcgctccctgctcctcaggcccagcttgctccttgctcctttctcctcgctcctccgacgcacatcagaccactggaagggggtgggaaacctggatcctgggttgttttagctgggagctgagtctaagggactttttttttttttttaatggcagagcgtggcttgttttgttaaaactgccgccagttgttgcaacagctccgagttagaataatagatgcagtgttcagtttttaatatatgtgttccctgttttctctgctctttttatggcggggggtgggggacaaaaaagtgtaaaacaagatccgtgccgcaaaggcaatttaaacctaacatcccaaccttcatgcagccattctacaaggagttgttgagcacctgctgtctatctacagaaatcttgaaatgtggaacagagatggaaatatagcatgcaagtcagaatgaagtaagtgctaattagagtcacaagcagtttgatggagactgtaagcctatggaacgacaaaaagaattttaggaaagaggaatgcagaggtctacgcagtgatttattttagaagagagtggccatgtaggatgtttttaacagcagtccctgaaaggacaatggtgtcattagcaaatacaaaaaactgctaaggtggaacaagttgtgtgggaaagtaagttaattttggacgtattgaatttgagatgccaacttagataataagtgaagctatgtaacaggcagatggatattttagtcgaaagctcagattgagagctttgaaattatggctctgggagtcatacatagccatacatgtatacatatacatatgtatacatagtcatacatagatgtgatattcaaaaacatggaagggactgatatccttcaatgaaagtctaagttggaaaggactttggaggtcgtatgtttcaactcccctgcatatttcttatacaataatctctttaaccaaatttattcaattaacatttattaaatgcctaagaaaccctattatgctctaagccattgtgggcattgggcataaaaagtttactgagaagaacttacattctggaggaggaggtgacatgtaaacaaacctattgttattagtgccctgttagaggtgtggactggtgccacaataccacagtgaacggagttcaaaaaaacccgtcagtttgaaatgccagtgtcttgaataagaaactaaagtgaaaaaggtgatctcaggccagaggcaaaataggctgggtcacaggctcaatagggaatggtgttgatggagctggattgactactgctgacgtaatgggaggaactggagactagtctggaaaagttaggaggggcaagatgtaaggcaagctaagagtcaagattttattttgtatcactggaaaataactaaagggttctaagaaagaatgacattgtcagttttttttttgtttttgtttttgtttttgttttttttgagatggagttttgctcttgttgcccaggctggagtgcaatggcatgatctcggctcactgcaacctctgcctcccgggttcaagcgattctcctgcctcagtctccctagtagctgggattacaggcatgtgccaccgcacc

SEQ ID NO: 315553 - DNA, 4001 bp, Homo sapiens
gggcctggtgtccttcttcacctccctcagcccctcctctgtgacaggaagaacttccacaaggtccttcttggccttggctgctccctgagcatggctttcttgatcctctgggcctctgtcctctttcttgtccatgctcttgctgggtctcctcagctcttgagtgggattcctggggctgctcctgtggctgtcacccttccacccttcctccccacttgcaggatttgcctcgggagacctcctgcagcttctggtcctcaccagcttctccacatcatacattgggcccttccccatatccagctcactggtccccagagaaagcctctcacgctccaggctctgctggagctccctctctctcttgcacttctcgcatctgataatttcacccgaggtcttttcaatctccaccccaagatgcttctctccccttgcgtgcctctcttccagagtggcttccctggggggcttgctactgggttctggctcccatttccccctcccccacttcttctgggtcctcgctctgtcatctagtgaaagctcctcggggatcttcccctggtgcctcatggctgccttgcatcctgcaacttcgctgcagctcttgggggtctcggtctccccacagcggtggtctcctttcagagccttgctaaacagcctgctcctcagccttggagaaggggcacggctgtgctgggccagtgtcagggcccgggctttgttggggtacagttcttctacagccacctgaatgctcttcagtgtcagtggttctttgcccatagctatgaaagcatccccttccctgaagaaatcagagacgctcctgatttccctgcccttgaggttaaacagtttcctcacacggtcattcttccatctgggagagcccaaggcttctgagatgtcagctaagagctgctcgaacgtctgcactgatcgcctgttgaggagcagagtgatctttcgggggcgctgcccacccagcttcactacggtcacgaccctgggcttcagagggctgttctcaggatgtgctgagtgaaggccattccgagggcagaacaagggcacgacggggccacgcggccccaggaatggtttctccagattccctcggctggcaggcagccaggagccttgcagcttccgctctgtgattctcgagcttaaatattttagagaatggtcacataggccttgctgtcctgcaacaagaaaaggacaacagagtattagttaagatgggttcagagagccctcagccttcaccaaaactttactaaagatgactgactctagcattacagtttataagtgtggttcctgagagtctgttagaaatgacagagcctttatacttaggtctaattcccagtctcctctacaccaggagtgcagaacagagtaagcattgggcttgcagtgattcctgtaggcctcacaggggcccccaggatgggccacacctcaggagctgatacagtttggctctgtgtccccacccaaatctcatcttgaattgtactcccataattcccatgtattgtgggagaaacctagtgggagataattgaatcatgggggcagtttcccccatactgttccatggtagtgaataaatctcataagatctgatggttacatcaggggtttccgcttttgcatcttcctcattctctctttgcctgctgccatccatgtaagatgggacttgcccttccttgccttccgccatgattgtgaggcttccccagccacgtggaactaactgtaagtccaagaaaacctttctctgcaaattgcccagtctcaggtatgtctctataagcagcatgaaaagggactaatacaggagccctctcacggtgaggcctgactctgtaaacacaactccagctaccccaaagtgaactgaccttcaaggatctacagctgagataaaaagggccagttttgctgcccatgaaacaccaacaagagtcaggaacattctagaactttgaagggccaggtttgctgcccatgaaacaccaacaagaggcaggaacattccagaattttgaaaaacccaatcttacccatctctttgccaagaacattttttttcagcttgactttgaactcactcaaggtggagcagtatgcgaagaggttatggtcacaggatttgagacagatctggatttaaatcctggcatggccatggactgcttgtgtgaacctggacaaattatttgcatttctttttttttttttttttttttcatttataaagtaagaatgctacacctccctcccagggtttttgtgaagaataaatgatcaaattacaacttacctaagagagtgcctgacacatagtaaggacataatagttgctagttattaacactgtccttgtgatcttaatatctattttatattataatttcactgtattagtagtataatctatcaataaggtagaagtctactgtgcacagcttcttctggcatcacaagaactcatggacccacatgatgtggtaggtatttcttaaagctctgactgagattcacttgcattagagttagtataggaaaattgaagaaggtttcaatctaggtgtaaaaacttccttgtccagatggttttccctcttcttatttaaaaaatgtaaagaaaccaaggttcagagcttaaataatgagaatgtacatgaataaaacaagacttttgtatttcctaattgactatacccagccagagtaaaacaggtgaggcaggagtggtttaatttcctcaatttctatccaggtcaggaagagaaattggaaaagaacagaaagtataactcagttaagccacaatggtaggatgacaattattaaagttaccctgcaggacccatatgtcatatcctacatggaagaatctgctgtttatgcttcctttaaaaagaaatttaaaataatcatttatacgtgtatttgaatcaactgtagcagaaactccagttgtgccaggatgagattttggcccagcaaatctacacagaatgttttttgttttttaattataatgtacaatctgttctgagatgatttccatctagacgcaggtgtcagatgagatgacaaggtagtggctgatactgatcttcccacacaccacaaatttatgagcttaacaatcacatttacagttaaactacatatggacatctgttatccctttcttctcacagcctctttaattaatctgcctccatttttgtctgagatagctgatgttgagagaaagaaagagagctacagaaggaatactagtttgtatttcctgcattggggaactgaggaagggtgtcaggaaggtgactgtcaaacgcatgtgcacaaaagggctggtgttcttgttggtttttcttatgtgcttcacacacagtaggatccttgatacatactgtcagactaagtaaatgaagtcctgattattttctcagaagaccctgtatagggacagagaaagagattttagcctatatcctggactgaggcttttccaagcagatgtgggaaaaggataggcaggcccaaaggatcaactgctggctgtggtcacaagagggcagacctaccaggaaaacctagaggcataaagaggatgtaatgaaatccaatggaagtaccaggagaatgagcaaccaagagtgctaggaagacaagatttgagttgggttttcaacacctaatgaggtagaggccacccagtacatagcaaaggaaccatgacatagggctggaccagttgtccacacggccgctgaggtcagcacagatgaaggtaagactcaatgtggagaggaagacactggtaacatggagaaatgaatggtcagccactatatgacagtggcaaagcaagggtgtatattgtatcatgggatgatataagcctcagctaaggaaaggtgttataggagggaagaaaaataatagctctg

SEQ ID NO: 315554 - DNA, 4001 bp, Homo sapiens
gcctacaatggacctaaatattttactgtaatcaacgcattattaacattttaaatgttagtcatatattgaatgtgttgggattaaaaaatttagaaaattgatcatctcgatttcttccagaagtactaccctagcttaaatatcattattttccttcctaaggattcagaggctttttcttacctttaaaatgttaggttattactataagaaactggtaatcaactgtcttacagtaaaagaaaatttgcccaccaaaaaacatcatgcaaagttacaactcactgtaaaataataaagagggaaaagatttttgtcatgctctatgtgccaggatccaaataaacagtagcagcttatttttcaattcaggttattatagcttgtatttcatatttaaaacagaactccacaatgtaaaattttaaaatattgaaagcctttgtgaaaaactaggaaaactctagccccaagtcttcaccatttgtcggcaatccatatttcaaaatttatatataggccaagaaaagaaaaaagattcataaaatttcaaactaaggcaatgtctaaaatagctacatttaaaaaacaatctacaattttattccttgtggcttcccatatctccttctcttccaggaggcaaagataaacaacgtgattataaaaactcttcatctgaattaactgttcataaatgccaaatgattttcgataaattactgataaatataatctatgcaactgtattatagggtaaacgacatactacggtcatcttccagagttctgtcagtttaaggatttcgtatcttattgaaatgtgaactccagtcattggtgaattcaatccaacaagcatttacgtattactttctaagtgtaaagcctgtagctgaatgagttaattaggaagggtcaattacaagaaagtgggaaattatgctttttaaacaactaacaaagcttcaagcaggggctaacaagaatcagtgaacacactgaatgtgacttttcggaccctccccagtgcacgaaagccagaaagtactgagtccgaggggagcattcagagatgacatcaccagcatcatagatggaacaaaacacatttacagggtctctcttgtttgtacaaaggtcttcggggatccagtgaacacggaagcccttttcctaagtgccttggaatcttttccgaaactctgtgtagttcgattaaagccggacccacccaccccctccttccaagaatcgaaactaattggattttaaactttaaacccaaatgacctctgcgacaggggctctcatttacgtttgccagggggagaggaggagtgtttattttatagataatgtacatataatttatctaataatccgcaaagcctcaaacacaagctttcaggcacccttttgaccccaccggtcttataactcccaatgtatctgcaaagaaggcaggtcgcccacgtccccagacccgacgccaagggactgatcctgctccaatcctcccctccactggcttttccttgggatgtctcgagccacttctctcactcctatcccccaatcccaagcggacccgacacccctcaggctctggctaggctcttggccagaccctggcctcgtctccaccgccctggcctcttagtgtgcccccccaccccacagtaacccgcgcggcccctttaagagacggcagcggccgggtggccgtcctcagggccaggcggcactcacccactggttggccttggggcagaaggtgtacagagcgacctggcccgtgaggtctgcgatgctggtgatataggggtcgtgttgcttcagggccgctaggctcatctcctgcccagctcgactcagcgcctccatcttgaatcccagagcctagcccctctggtgggggcggagtcgcggacaggaaagtgccatcgaggcaaaattcccccatctgcgtcagtcccctcaacttccgcctctacgcgggcctcgcggcagggcggtacgtcagccattctggtccgccgcgcgcacgctccgggcgccgggttccggcgttgtcagggtccgcggccctacgatgtgggcggtgtccaaggctgcgtagtggagcttgcaggctggagctccggcgcttcctttccctgagctaaaacgactgggtcctgggatctggcctctagctcgcctgccgagctctttccaggcaaaggttggagaccgccgaagtgccggcctcgcggtgcgctgtctggcagggcccggggccacagaaggaaaacatgtctgtggaatgtggaaatgcgggactctaccgggcccgtttagagagcacagaaaaacatgggggaaagggagaggcgagaagcccagaaaattaccctaggtctcagatatggatgtgtcgacctaaaaggaagaagactctggggcaaaataaatgcaagcagagagtttatttgggccaagcttgaggattgcaccccaggagcatagattcaagttgccttgaatatatacactgattagcagaaggtacaagtggattttttttctttttttttgagacggagtttcactcttgtcgcccaggctgaagtgcagtggcgcgatctcgactcactgcaacctccgcctccaaggttcaagcgattctcctgtctcagcgtccccagtagctgggattacatgggcgcgccaccatgccctgataatttttgtgtttatagtagagacggggtttcgccatgttggccaggctagtctcgaactcctgacctcaggcgatccacccgcctctgcctcccaaagtgctgagattacaggcttgagccaccgcgcccggcccttttctttttttctttttgaaacggagtctcgctcttttgcccaggcaggagtgccgtggcacaatctcaagctcactgcaacctctgcctccagggttcaagcgattctcctgcctcagcctcccaattaggtgggattacaggcgcccgccaccacacctggctaattttttctttttctttttcttttttttgaaatggagtttcgctctgtcgcccagactggagtgccgtggcgcgatctcagctcactgcaacttctgcctcctgggttcaagcgattctcctgcgtcagcctccagagtagccgggattacgggcgcccgccaccacgcccagctaatttttgtattttttttagtagtgacgaggtttcaccacattggccaggctggttttgaactcctgacctcaggtgatctgccctccttggcctcccaaagtgctgggattacaggcgtgagccactgcgtctgacccacataaatatttttgtccagccctgggaagagtccatgaagggtttaatttgtcttgcttcatttaaagcattaagcagatcactcatttcattggtaagtgtctgttgagcattttaaagcgtttgaaagagttaggcactagctaacaagtaaaacaaatcatggagactatagggagttctatccccgccagacttcttaaaaagcaacatttctttcgttaaaaaggtcatggaggctgggcgtggtggctcatgcctgtaatcccagcactttgggaggctaaggtgggaagaccgcctgaggtcaggagtttgagaccagcctggacaatatggtgaaaccccgtctctactaaaaatacaaaaattagccgggcgtggtggcgcacgcctatagtcccagctgcttgggaggctgagacaggagaatcacttgaacccgggaggcggaggttgcagtgagccaaggtggtgccattgcactccagcctgggcgacagagcaagactcaaaaaaaaaaaaaaaaaaagggtatggtagctagatgtgtgggctcacgcctgtaatcctaacactctggaaggccgaggaaggtggaccacttgaggtcaggagttggagaccagcctggccaacatggtgaaacccca

SEQ ID NO: 315555 - DNA, 4001 bp, Homo sapiens
ctattttttttccttgggatggagtctcactactatgttgcgcaggctggtctcaaactcctaggctctcaagcaatcctcctgcttcggtgacccagggtgctgggattacaggcatgagccaccgtgcccagcccctacggtgagttagctaaaccagagaatatcacgacaattctcatgacataaactgagttcagccacaggatatgttttaaattaatatcttgtcaccactggtagaattacatgggttatggctaagtttcaaaactagctaattttaatattaaccaaaagaatagaagcttacaagctgaactctccctacgaaccacttgatgcctgaattcctgaacaggtgatgagtatttccgggaccccactgtctaggggatgatgcggatctggagaccatcctgaagagcacacatttcagctgtggctgagtgtttcccagggaattaacgtcattacttcgagcttactatacttatctaaatgctaagagtctggaaacttcaggagtaatgtctatgaccatctaaatacttaagaaactagaaactgtttagactgcctggtggatctctgaacactgtaatactaatctatacattaacctgcactttaaagttttcttaccaattcaaactgtaaattcctacacaacttgccacagaacataagtgttaaatatgtgtcagactaaaccatatatccatacatgacaacaaaatactgccaagctggaggatgggactagaagtgtcattcagcaaaaataagaccaactaaaaacaaagacactggagcattcccttaacacaggcgcgcacacacaccctcctcaaagaggcctttatgttccccacgagcaaaggacaacaatatcatttttactattcatacagtaacctgcacggaattcaactcacgctcagactgtacaatgccaaacagcgcttctgaaacgcgaagagcgtccagcagagtcaggtacttaattaccaaagtaaacaactcgaccacaagggtctgcaagcctggagaggactttttcccccccccaaacaaaaaaggagagtaacttgacaaactgttttaaaaaaaatcacaaatggcccttaactactataataaagcaattactcctcccacccccaagcaaataaaataggtgctcgaaagggcgctcgctagtctgtgttccctaattttatgaaatgagaacaggttgcacttccgtaccccctcccccaagctcagcagtctcccatgttttcagtagagaggtaaatataacctccaccaactggccggggaaactctccttctccaaaagcatgggacgcctcgagaggtgatggagaaaggaaaagggctgataccccgccccaagcaaaactgcctgggagacttgcggggtattggagccgggagcggaggagggagaggcgcgccgggaaagtctttccttctccccggccgggcggagagggaagccccggcttcggggcggggggaggctactcacccggaaccccagaccccagtccccgaccagacacaatggagccggcagaggggcaggggcaaggccgttgccccctcccctccccccgccccaacgcctcccccacccgcgccgggccccggcaaggggcaccggggccgctccccgcgccccaaactccccggggctcccgactaggcccggctccgctccgcctcctcggctctcgcgtagcggctgcgcccgggcgggaaggggcgaaggaggaagggagaggcaggcaggagagcccccgcctgggagcgggacggaggccgcgggccgaggctcggggctgcagggtcgccgcgggacggagggcggccggggcgggggtgcgcggcagcgccggcccccagccggcagggcgggcgggcggccgcagtgcctcaccatgttggtgtcctccaggcctctcccctcctcctccggctccgcagcgaatggacggcggcggcggcggcggctcctctcacgggcttgcccggctcccgctcatgcgcagtgcggggcggcccggcgcggcccgaggaggcagccccggacctcggggaggcggagggacggaggcaggcggagggcgccccgcgcggggcttcccccgggcgcgggggtcccccggggagtgggcgggggcggggggcgcggcgggggaggggcgggcgacgcaagccctccgcgcgccgacatcctcctgccgcgccgggcggtctctggtgggggcgccgggggacaccccacctccgtttcctacgcggttccttccggacgaccacggccgggtctacgcaggctggaagcgggcacgagcggcggcggataagttgagcagctgggggcggctgaaacggatggttgaggagcttcatccatcccagacctcccctccccatcagtatcaaaaaaagggagaagatagtggaaacacctccccctgccccgtgttttcttctttttccccccaatctcagtatcagacctacatcagttccctcgcgtgggcatcccaggggagaccttagtcccccccctgcggtggctgtcactccattagtgaggaccaggctctccccagacctgtctactgggagacagttggggtaaccctatagtgagatggggtggggtgcactgagacccaaggccgggctgcgggagtccaggttgcctgcctactgctagctctcagtatcccctcagttcggcccgcccaggataagtttcgggaagcaactacacattttttcactgagggtctagtcacgcagggcggacagtccaggtgtgacctgccctgggcgttaaatcaactgaggctgaggagcactaggattctgagctgaggatcaagtggacaaattcgtgctgcaaggaggacagaagactcctgtggagtaagtggtccttgcccttcagaaatgtagtatccagttggagagataagacaccttcacacaggaaggaaataaaacagctaagaaagcaaactcactcagaaagtcacatctgaaactgtaccaagagcttacctacgtttcagaacaggacccacctgagtagacccgttatcaccatcatcaccagcacaggcattaaacgaccagatcaaccctataactaatgaatttgttcttaccaaaacaacagaacttctttggtaactcccaaaggcctcctaacttcctggagctagccatgtactgggagcgcccagcgctgtaccaaggcaggtttctggcggccacaaaccgttcatccattctttcccccaatatttaaagaatgcatgtgaatgtgccaagctccttgctgggctctgggtaaatagtcctgcaaggagaagccagatctgcctcatgcagcaagcctgaaactggactacatccacggaggttctccaggaattcacctagcttttgacctaaagtattaacacctagggcgttaatgaggaggattcactgtatctcttactccaatctgttctactccattgaaataatcgtttgtgggttttcctaagctctaccaaggtacaggccttagttattctaattgacctctcgcctgcgtttggacacttcctccttgaatttcctgttcattttccatgactccaccttctcctgcatctcctctttactctgaccactctcctttgctggctgtactcaatttaggctttcctgaccattcctgaacgtccttctgtatacagcctgtgtcacgctgtcactcacattcccacgtcaactactgcccatatcaagaggaatctcaaatcttgacttccagtccccaagtgacaggcctaaacactcattctggtcatttcacaggtccatcaagctcaccaaatctaaaactttatccccaaacccacttttcctcctgccttttatcaaatcatccaaactagaaatctaagaatcatccaccactcttc

SEQ ID NO: 315556 - DNA, 4001 bp, Homo sapiens
attcacgttataaagaatgtcccaaataatgagaatccaaaagaatctcctttagctatttaaaaacacaatcaactacaacaacccattcttatgctttctggttaaattgtatcttgctgtacatataacttcaggttaacatggcaaggtgaataataaatggcttataaatctcttactcaaaatctttgggaactgtttttcttactttaataagataaagaattgctcacatattcacctattctatcaaaagtatttatagaatgccactaggtgccaggcactgcatttggccttatcagctactatgattaattcttggttctcctctaaattattgcctcaatctacaaatacagattagagcacatcctatttgtatgctccacaactaacataatgcctggttcttagtggaaacttaatgtcgctgaactgtgttataataaaacatccagaaggcaggccgaatacgaaagcagtagcttcgcattaagaaaactacccctagccaattttcttagtcaaccaggccactacagtattaatgaaatcgaaatctgtcaccaataccaaaaaaaaaaaaaaaaaaaaaaaaccaaaaccaaaacgtctaaacaaacgcccttctgataacaatttccttggacacatgaaagcaagcaattccttatgctaaaaagaccttcaacaacgtcaagaatagatgtttctaaagcctttcggtaaggggccatacataagaatggaaaagttgactgattgacaagcaaatgatgttccctatattcatcttgacagtagtttcacaccaactgttccagaggcaacataaaaaaaaataacagaaatgaggccgggcacggtggctcacgcatgtaatcccaccactttggaaggcctaggcgggcagaccacctgagtcgggagttcgagaccagccttaccaaaatggagaaaccccgtctctattaaaaatacaaaattagccgggcatggtcgcatgcctgtaaccccagctactcgggaggctgaggcaggagaattgcctgaatccgggaggcagaggttgcggtgagccaagatcgcgccattgcactccagcctgagcaacaagagcaaaaactccgtctcaaaaaaaaaaaaaaaaaaaaacagaaatgaggcacaaaaggaggaaagggagaaaatgcgtgctgagataagcatttcgactcaggctgagggaaacgctcaaacagttactgcaaatgactaaaacaatctgagccttaaaacttggttgtgcaagttcggctactagagttcatcatctgttatgggcattgttcttgaaaaagtaccaaacaaacatcctgcctgcgggcttctccgggtgggtgctactaacccttttagttaattctgtgactctgcgtttaaaagaaataaagaaagaacaggatgaacatcaacaagtatttaggaggggcctagagagaacttttcacccctagccgcagcccaagatcctcccacgggaagtgccgtaggaccgcagcccgaaagagcgcgggaggggagactggccacgcccggatgcgccgcggacagggtcctggccggtcagcccgcgggccgctggctttgctgcagccgccccggcgcaggggaggagcgccgagaaagggcggggccgggcctcacctccacggcctggcccagctccaggtcgaagcccaccacacacacgcagtgcagccaggcggagaagctgtcccagcgcagcaggccccggccacggccatcgtcctcttcatcgtcctctggcgcgcctcccgccgccacaagggccggcgcctcgcggccctcggcccctgccaccgcttcgtccaacggccttcgagagccgggccccaagcccgcagggcccctcaaagccatcggccgccccctgaccgttcgcgccgcctccacagcggaccgcgccgcagagcgcgcttgcctccgcgcaggcgcagacgctgctgtcgcagccgctggggacccactcagtccgggcggggctgcgggtcacgtgaccctgggagcggacgtggggacgtcacgctgccgcttgtctcggattgtgaagccggtcctggcttccttgtctaaaagctctttgggactgaaatggctgtttatgaatccttgtcaacctcgttcgcagtcaacgaccagggaataaattattcgtggaatgacacagttcataattattataaggtattattaaattatgaaagcgtaggccgggcgcggtggttcacacctgtaatcacagcattttgggaggccgatgcgggcggatcatcaggtcaggagttcgagaccagcctgaccaacatggtgaaaccccgtctctactaaaaatacgaaaaaattagccaggcgtggtggagcgcgcctgtgatcccagctactcaggaggctgaggcaggagaatcgcttgaacccaggaggttacagttagctgagattgcgccactgtattctgtctaccctgggcgacagagcgagattccgtctcaaaaaaataaaaataaaatatatgaacgcataatggtgacggtggctaacattgaacgcttactttgtgccagttgatatgccaagtacaagtgcgaatacttacaaatattaccttattgaatcttcacataatcgcaaataagtagactatttatttctttttacagataaggaaatggaggtcctggaggttacatgactagcccaacaagtatgacaactccgatatcggcttgcggttcactcattcagtttgctgattcagagatctgtgcattcactcacctgttccttctccagcaaggcctccccaccctaccacctcctcctttcttagtttggctgtctgtgactcactcaacacacatccccagacctttctggaactccaggttgggcagattggcctccacagcaacctgtggatctctgaacactggggcaagggcctggtctcaagcagcttcgtattctgagatcagtttttactgagtattggaccagccaggatactaactagtatttattcagcacctactatgttgagtataaatagcatagtaaaagtaggaaacacacaataatacctcaacagaaaaatgagtaaaccagcgaggtgtcacgcctgtagtcccaggttcttgggaagctgaggccggctaagttcaaggaggatcgcttgagcaggagttccaggctgcagcgcgctatgatcgcgcctgcgaacagccattgcactccagcctgggcaacagagcgcgactgtgtctctaaaaaacaacgcaaaacaaaaaacacggcagaacttaagcattttgctgcactgcccagtgaaatccattccatttgacaaatactgccctcttaacattcttagaatttttttttggagcaagtgttagcgtccctgttttcaaggaggtggtcaagtatgcacagacatcagtagtgacgtttgctggagacttcctttagacaaaaatgaacttagggacagcacttaagttagaggccaagtctttggccaaagtagcctgccatcctactccagagaactgctgtggttaaaagaggaaaaactgtattctgcgatcaagtaaggctctaaacccagtattaggaaagaacagtagccttttgtattagaaagaacactggcgtggaagtcaaaagttctggattctagtgccagctagaatctaccacgatcgtggtaggcaagctgctccaaaacccagtttctggtaaatgagagtgatgattactaactcacctcactgactgttgggaaaagctaagctatcctaatgtacacattttaccagatgctacttcattattaattattaatgatctcaaaacaccagttgtggccaagcacagtgggtcacacctgtaatcccagcacgttgggaggctgaggcggtagaatcacgtgagtc

SEQ ID NO: 315557 - DNA, 4001 bp, Homo sapiens
gctgatgtttgtcgttttctccccatgtctcggttgatctgaaccaaccactccataaaattctaaggtaggaaagactcatctactagcttcccaccctaaagcccctcccagaaaaatacctgtagtaatgcctatagtgctgggtgtaaacgttaagggtgattggcaaaaaagacatagatcaggagtacgaccgggaagttggcttagttgcagccgttttatttaaggagtataattcatattcggaatggaatctccagcaaatgtagtcttttaatatgacaaacagttaagtaccttcccatgttagacacatgcctggaatgagagtgagagggacataaaatataaaggggtgtgtgtctgtgcctgggttcatgaccaaacctcgacatttgccctctatgatctaatttccttcattgacaaccagggtgccctgtgtgccagcaagtggctctgccagctgtattttacagacagagaatcccaagcaccaaaataacaaagttgattcccccatccagaccagaggggtcgtttccagtcctgtgtcctgaccactgtctctcatcatgacccctggtgttcacctccagatccaaagtgtcgtcgccaagcccccaaaataaaggaatgacaaacagccctcccaggccctcctccccacagagaggtcatcgtatgctaatgaagtccgaggaggcagcggcgcagcgcgggagagcgcgcccacgggttcacagcgctcccgggcaccactgcggcgcagccacagatcgcttcgcgctgcagcagacgctcccgccgcggggggcgactgggggaggggtctcgaccgccaccctgagttccgcagctcatccctcccatctgggaggtggttctagctctagtcccaagctttccactgcagtgatggtggggatgggggcagcacgtcaaatcacctgtagggctttttagaactccacagccccctcccctaattctattccactagttcaaacgaagaaaatctcagactaggcaaggggaggtggaccggtggagtctgcgaaagcaccacaggtgactccgggtacgcactcctcaggacacaagcacacacacggacacatcttgtgactctgagactacacagatcaacctcagattcgacccttccctcctttattctctgaggtgtccgtgttcgcttcagcttccctttaagtcgccctgcgcaggggctttgtggagtgcccccaaagtcctagaaccccgcgggacggtcggaggctttggcggccagacattaggaaaagcatctcctgcttctcggactgcctggagcgcgaactggatatcaaggagccaaggttaagtccagaagaagaaggaaatccgaccagttgctttagcaaactgcctggagcaaggccgcctcccacccgcacagctttgaggcttgagggggcctctcagtcgcagagagagccgagccccaccctgtgcgttccccaagcctgcacccctcgagcggggcatcccttcctgcagggctttgtggcaggtggaactgtcggggtgggcgccgtggctttggctgcagccccttccctggccgcgggaccggctcccgctttgccctcctttaccaagttgctgcaccgggtgctccctgagccggggaccccctccgccgcgccggccgccgtcttacctcaccaggcaacacttggttgcgcggtggcccggggcgctccttcttcgcggtttattcccttacttgggaggaaagaggaaccgagagacagaagggggaccgaagctggcctctgggcgtcttcccgcctgcgcagccctctcgggggagggggatgcagccccagtgggtgccgcggagaccaggctgccaggctgtggttggtagcgccggggtcttcaccctgtgctcggagttcagcagctccaaagctgtctatctccgtggcccgctactacggcactgcggctctgtgccctgcccctcgcagcctggcaagtccagctgccactctcactgcggagccctgcccccgggcgcagagcccgcccccgccacacacaccggcgcgcgcgcgtacacacacggcacacacagacacgcgcttccacacatgcacacgcgtgcgcacacacgaatgtggatccgctcgatgggaacctgaccccctttggtgcaactagggcgcgggcatcattaggacgctttttactgacagggcttcggtttgggaggaggagttacaggcttaggagtgtggagaggatgcaacagtggtgggtaccagagggcccctgaccccggaggcaaaggacaactgtttgacaaataaataccgactgggcgtttccttttctcaactctggtcaaggctaccgtaatatcccgaccaaatcgaagaaaaaataaaaatacaaaatcaacaagttctctttgtttcccaggaactcagtatctctaggatccaaatcactagccctgtccagagggtcatttctgacaaccttgacttcggtggcagtggattggtggcagttcaactcgaaaaggttttcccctcgtagcctggtggagactggcacagcctgcctgagctggactctgttggatgggtcgggtctctgggtgtgtttaattcccattctcctttgcttttaggtgaccttggactgtattcctgcagaataaatagatctcttctttttttaaaatgtagaagagcacagaaaagacgctggggtgaggggtcggggggaataggggagctacattagccaaggcactatgacttgttgcttctctttccatgacgtgcatgtccacgtgagggggtgatggtggtggtgacactatttcaggcatgtcacacagcaagatgactgctgtccatttcacaccacatttagagtcattaggagtttagactgtcatctttaaaatatgtggagtttactcatttccacagccgagaattcttttctgccagtgggcagtgaaggtccccgggccagcactgcagccaagaaaagctttccgcagagtgtggaggcgccgaggggctctgggtgtctgtgcatttggggaagaagcctcaaacacgaatgtcaaacagccctgaggaccctgttgggtggtgtccatactaggctatctgcaggcaggctggtgagacagatgagaaacagagctgagagatctccttaagattccacacagtgatgaagacagagctgataccagaaccccgtgtttgcgactcctcttatcctctgggtcttatccattctatcaccctgggtggcttctcaaagtttccttcagctaggctgaaataatcttggtgagggtgccttcaaagttcttccttgtcctttctttttttcctcttcagtcactgactcattcattttacagctatttattaaactcctactctgtcttcaggtgcttccccgtaactccagtcctgggccttacttgggaggaaagaagaactgagagacagaaagggcttagaactgtcctcatccctggaagagaggagccctgagcacaggtttctggtatatattttcactctgctaggttgcatggatgtggaagacacaatccttgctttttttgactgcatgctcaatggaggaaaatgcacatacatgtcacaagaaaaacattctggctgtctattcttgactccttctaaagaaggctaaactgaaggagaccctgtgtttggctgagcatcataatggacttggggtacatgtttgcaaataggtgttaggacaacattgagttgctctgcctattaggacaggaaggaaataaattgaatggaacaaatgaagaagacatgcagagactgagtgtggagccttagcttcgttgagagcacattggggaagggtaacgagaggggaggagctctgaggacagggttgccaagcaacttgcctgagaacaggca

SEQ ID NO: 315558 - DNA, 4001 bp, Homo sapiens
atcatccaaacttctggcaagaaaatgagctccttgtggaggttccttgagttctctgctgagaactaaattaattctatcctttaaaggtcgattcttctcaggaatggagaaccaggtcttcctacccataatcaccagattctgtttaccctctactgaagaagttgtggtcattctctggaaatacctgaattcattcctgagcggcggcctgggcaggtccccgttcttgccgatgcccatgttttgggacacagcgacgatgcagtttagcaaaagaaacatgacagcagcggttaacacctccgaacttgctggctacgccaggaagccaggccaagaatgccgcgaaattcccttcttcaaatttttttacgtgcctacattgcaaatacaataccactgtattaattaattgcaacattctggaatgaacatagaaaaataaattatataaaatatatttataaagtataaatttataaaatatttataaaatataaatttataaaattataaaaaatacagaggctgaaaggttagaccgacttttccacaaacattaaacagacggcatccaagagatggcatcatttcattcctgattatcatagtcttttgtaccaaatctaaattctaataagatgcattttttaggtgacttggaaacttgtttaaataaataaatatattaagcttcaaatcagattagaaggaaagacatgtttttacatgaatataagacttgtacctatagcatgtacgtatattgatatgagcatcaaggaacaactcaaaatgatgattattaactatcagggaccatatcaaaccggttttttctaattgctgattgctgctacaaatgatagttactgaagcatgacaccaaaagagcaaataaacttctattcgtgtcaaaataggtgtaataaacatcttccttggagaaccattaaacattgctcccttgtaaaggtgaattggggaggctagagtggagggtccttttggtcttcacgcatttggtatcaacgcgacaaaaatcacaatgatcacaatagtgaaaataatagcagctaacatttgggcatttactgtttcctaatcactgttgtaaccgctttacatgcctacttcagtttaacactctccattaaaaggagagattatccccatgggccaggtctggggaaaagcatgacttaatttctttttcattatattccacccttttatccttgggtactgaatgtctaggttaacaggggtcactagatttggtagattaagtcagtaactagcttcgctttgagaatattttaaatcagtcatcatacaacataaccccaaaactcattcctttattgagccccatgcatatacacactgttcagcacaatatgcgactttttatttatttttgagacaaagcctcgctctgtcgcccacgctgcagtgcagtggcgcgatcacgggtcactgcaacctcaaacttctgcccaagcgatcctcccacctcagcatccgcagaagcaggggccgcacaggcgcgcagatgtgtgactttctaaggtccggccgcccaaagctacgccgaccaatccaagtagcgaaagtcgctttggccctggcccgttacctccgcgtcctgggaagtatcagcctttaccagctaccggaagtaactgcgcacgaaatctcccgcgggagctaagcctcttcgacaagaattctatagcgcgagcaaatcagtatctcgcgagaaattgaagaggaaacgtgagaatgaaagtggatgcccgcgaatcccggaagtcagactgtttttttcagttccctggaggctttttgatactgattcgcgtacacctgttgtttgaaagctctcagcgggacaatgctgacccaggtgagacctggggcccggctgggtacctctatctgaatgagacgcttctggacgcggccgaggtggcgagggagggtgctgggatgggggaacatcacctttgttcgtcccctcgcgagatcagcgtttctttggctttactgtcaagccctgaaataatgctgagtgctgtaatgctgagtcccttccgtccagctcgcagacttctagtacccactccctccagctcttggagggctgagatttgttttctgtgtcacagcggtatcccgggagcttagaacagtgtctgttacatagtaggcattgaatacacgtttcttggatgaataaatgaaacaattgcaaggaagttcacgatgaaattggagtgacttttctccctaaattaacttttcactttaaaataacgttgcaaagatagtacagagttctcaaatacctttcaccaatttttcttgatgtcagcatccccggtgactttttagttttgtttagatacaagttcttgctctgtcacccaatctggaatgcagctgctccatcatagctcactgtaaccttgaactcctgggttcaagcgatcctccagcctcagcctccctagtagctaggactacaggagcaggccactacgcctggctaattttttttttttttttactttttgtagagacacgtccttgatatgttttccagtctggtcttgaactgggaaatgatcctctcgcctcgtccctgcaaagcatgagccagctggagtacagtggcgcgatctcggctcactgcaacctccacctcctgagttcaagcgattctcccacctcagccccctgagtaggtggggttacaggcgcccaccactactctcggctaatttttgtatttttagtagagacgggtttcccgtgttggccaacctggtcttgaactccagacctcatgtgatcctcccgcctctgcctcccacagtgctgggattacaggtgtgagccacctgcctagcccctacagtgactttttaaaattaattttgttccttttgacagtttcttcagccccagtagattctgttttaacctttgcttcacatttggaaaataattatttggaaaaaccttgctttttcataattagataatgtacagttttggtacatgtaaggtattgcttccatttcaagaactagtaattatccaaaaaaagtgttcttgtcttaaaaaaagaccttgctaatgttgacgttcagtaaatttgtaatatcactgtgtgtcagcaactttttcttatcgtcatagctgaaagcaaaatcagaggggaagcttgcaaaacagatttgcaaagttgtgttggatcattttgaaaaacagtattccaaagaactcggagatgcctggaatacagtaaggttagtataattcatctcgatgctttatgatggaacaaagtacaatatgtagtcctcctttttgtgggagggatgctgtgaggttaaaaggcaaaggaatctaaatctggttgccttttcctactgaagctatagaaaggaacaactaagaagaaatagaatgaatcatagcatgttggaaaggggaaataaaactttgtcgggatggtaagcacaaattgttacgcctttgctttgagcaattactttgatccttgaaataggaatgcccactagtttgacaaaattaattatactgtaaaagaaaaaaacataaaatttggaatatttgactgatttctgaaatttagaagataatacaacaaatctttaaagccagcactgctttatctcagccaaaggtacactttatttggtaatcatatttctttcctatgtcgatggctgggtatattttgaacacgtgcatatacacacaaaattatttaaatataaaaataaggaatgtttaatgcatggaagtgggagaaatgtgatttgtctgtttggtaagatgatgttaatgtatggattactgtatgggttcttgacattgagtgcctgatacactatataaccctctctggaatacagagcaagacagtctgcatgtccagtttacatgccgtctagttagtg

SEQ ID NO: 315559 - DNA, 4001 bp, Homo sapiens
tgtttcccctcctggacatcagagagaacacctgggtattcaggcagaagtttatatttctccaagtcaatttctgaaaaaaacgtgtcactttcaaagtcctgcatgatccttgtcacaaatagtttaagatggcctaggtgattcatggcttccttataaacagaactgccaccaactatccaaatcatgtctactttatttgctaattctggtcgttcagtaagttttaaggcatcatccaaacttctggcaagaaaatgagctccttgtggaggttccttgagttctctgctgagaactaaattaattctatcctttaaaggtcgattcttctcaggaatggagaaccaggtcttcctacccataatcaccagattctgtttaccctctactgaagaagttgtggtcattctctggaaatacctgaattcattcctgagcggcggcctgggcaggtccccgttcttgccgatgcccatgttttgggacacagcgacgatgcagtttagcaaaagaaacatgacagcagcggttaacacctccgaacttgctggctacgccaggaagccaggccaagaatgccgcgaaattcccttcttcaaatttttttacgtgcctacattgcaaatacaataccactgtattaattaattgcaacattctggaatgaacatagaaaaataaattatataaaatatatttataaagtataaatttataaaatatttataaaatataaatttataaaattataaaaaatacagaggctgaaaggttagaccgacttttccacaaacattaaacagacggcatccaagagatggcatcatttcattcctgattatcatagtcttttgtaccaaatctaaattctaataagatgcattttttaggtgacttggaaacttgtttaaataaataaatatattaagcttcaaatcagattagaaggaaagacatgtttttacatgaatataagacttgtacctatagcatgtacgtatattgatatgagcatcaaggaacaactcaaaatgatgattattaactatcagggaccatatcaaaccggttttttctaattgctgattgctgctacaaatgatagttactgaagcatgacaccaaaagagcaaataaacttctattcgtgtcaaaataggtgtaataaacatcttccttggagaaccattaaacattgctcccttgtaaaggtgaattggggaggctagagtggagggtccttttggtcttcacgcatttggtatcaacgcgacaaaaatcacaatgatcacaatagtgaaaataatagcagctaacatttgggcatttactgtttcctaatcactgttgtaaccgctttacatgcctacttcagtttaacactctccattaaaaggagagattatccccatgggccaggtctggggaaaagcatgacttaatttctttttcattatattccacccttttatccttgggtactgaatgtctaggttaacaggggtcactagatttggtagattaagtcagtaactagcttcgctttgagaatattttaaatcagtcatcatacaacataaccccaaaactcattcctttattgagccccatgcatatacacactgttcagcacaatatgcgactttttatttatttttgagacaaagcctcgctctgtcgcccacgctgcagtgcagtggcgcgatcacgggtcactgcaacctcaaacttctgcccaagcgatcctcccacctcagcatccgcagaagcaggggccgcacaggcgcgcagatgtgtgactttctaaggtccggccgcccaaagctacgccgaccaatccaagtagcgaaagtcgctttggccctggcccgttacctccgcgtcctgggaagtatcagcctttaccagctaccggaagtaactgcgcacgaaatctcccgcgggagctaagcctcttcgacaagaattctatagcgcgagcaaatcagtatctcgcgagaaattgaagaggaaacgtgagaatgaaagtggatgcccgcgaatcccggaagtcagactgtttttttcagttccctggaggctttttgatactgattcgcgtacacctgttgtttgaaagctctcagcgggacaatgctgacccaggtgagacctggggcccggctgggtacctctatctgaatgagacgcttctggacgcggccgaggtggcgagggagggtgctgggatgggggaacatcacctttgttcgtcccctcgcgagatcagcgtttctttggctttactgtcaagccctgaaataatgctgagtgctgtaatgctgagtcccttccgtccagctcgcagacttctagtacccactccctccagctcttggagggctgagatttgttttctgtgtcacagcggtatcccgggagcttagaacagtgtctgttacatagtaggcattgaatacacgtttcttggatgaataaatgaaacaattgcaaggaagttcacgatgaaattggagtgacttttctccctaaattaacttttcactttaaaataacgttgcaaagatagtacagagttctcaaatacctttcaccaatttttcttgatgtcagcatccccggtgactttttagttttgtttagatacaagttcttgctctgtcacccaatctggaatgcagctgctccatcatagctcactgtaaccttgaactcctgggttcaagcgatcctccagcctcagcctccctagtagctaggactacaggagcaggccactacgcctggctaattttttttttttttttactttttgtagagacacgtccttgatatgttttccagtctggtcttgaactgggaaatgatcctctcgcctcgtccctgcaaagcatgagccagctggagtacagtggcgcgatctcggctcactgcaacctccacctcctgagttcaagcgattctcccacctcagccccctgagtaggtggggttacaggcgcccaccactactctcggctaatttttgtatttttagtagagacgggtttcccgtgttggccaacctggtcttgaactccagacctcatgtgatcctcccgcctctgcctcccacagtgctgggattacaggtgtgagccacctgcctagcccctacagtgactttttaaaattaattttgttccttttgacagtttcttcagccccagtagattctgttttaacctttgcttcacatttggaaaataattatttggaaaaaccttgctttttcataattagataatgtacagttttggtacatgtaaggtattgcttccatttcaagaactagtaattatccaaaaaaagtgttcttgtcttaaaaaaagaccttgctaatgttgacgttcagtaaatttgtaatatcactgtgtgtcagcaactttttcttatcgtcatagctgaaagcaaaatcagaggggaagcttgcaaaacagatttgcaaagttgtgttggatcattttgaaaaacagtattccaaagaactcggagatgcctggaatacagtaaggttagtataattcatctcgatgctttatgatggaacaaagtacaatatgtagtcctcctttttgtgggagggatgctgtgaggttaaaaggcaaaggaatctaaatctggttgccttttcctactgaagctatagaaaggaacaactaagaagaaatagaatgaatcatagcatgttggaaaggggaaataaaactttgtcgggatggtaagcacaaattgttacgcctttgctttgagcaattactttgatccttgaaataggaatgcccactagtttgacaaaattaattatactgtaaaagaaaaaaacataaaatttggaatatttgactgatttctgaaatttagaagataatacaacaaatctttaaagccagcactgctttatctcagccaaaggtacactttatttggtaatcatatttctttcctatgtcgat

SEQ ID NO: 315560 - DNA, 4001 bp, Homo sapiens
tacagttcacaacatacttccatagactttaccccatttaatccaggcaactatccagtgaggtaggaattatctttccagagaagaaaactgaagcacaggttacacaacctgcccaagatcccatagctgcctcagggcagatggaaatcagcattgaagcatgctgactccaaaaccctccatgcttatactaggctaattttcttatttccaggatattatgctgttgcctaaatgtactacggttcattccttgagacatattatactgttatcttcaaaggctgaaaggggcaagaaaggtccaacagctaataaaacttgtgtgtggtttttgttttgttttgttttgagaaggagtttcgctcttgttgcccaggctggggtgaaatggcgcgatcttggctcactgcaacctcggcctcctgggttcaagcaattctcttgcctcagcctcccaagtagctagggttacaggcgcacgccaccatgcccggctaatttttgtatttttagtagaaacgaggtctagccatgttggccaggctggtctcaaacttctgacctcaggtgatccacccgcctcggcctcccaaagtgctgggattacaggcgtgagacaccgctcccggccctaataaaactttgtatcacagctacataaattaaaacacttgaagagcaactatcttttagggataaagagccaacaccggtagaaaacgcagcaaaggatgtagtttctgcacatcgccttaaatctctaagatttaagtgtaaattacaagatgtagttaaaacccacaatgacagtggggttaccaccttgcaagaaacttcaagggaaatcaccagacaacgtctcatttcactctggcccataagctgcaactaaaaccaggttgaaagcctgtaagtggccttctgcagtctacctgctagtgtatggcaaaccctcatggagtggggttgtaaagtgaaacagcctctgccttgaaaaatcataattcaagtgaccaatgttgctacacaacgactagatatgccatatccctggcttagggtttctgaggacccctgggactccagttcactgcaaacaaaggacccaacatgcatttggtcttcccctgctaaatgggacaagttaccaccagcaaacaaagaatacctcaccccttggcctcccccagtgacaaggtcggtgcaaaagggggcaaactaggggggccagaaggcaccgggcctccctctggacgaacggtccgggcagcaccgggaaggaggagaagtagacaaaggtctcggggcactcaggaggcttcctccaggccctgcctggggaaacggcgcatcccgaggcgaaggcgtcgttgcgccaatgaagcggcctctcccacggcctccgcggagcccctggctgcgaggcccgccccggcggaccggtctggcccccgcccccgcccgggctccatggcaacggcaggccgaggcctggctgcccacggatcggccgggccggcttcccgggcaggcctaggatgcccggcctgctcctcgggcccgccggcgtctccgccccactctccgccaggctggcggtcggaccgggccccctcctcacgacgaccacccccggccgcggcaggctcctcaagagggcacgaaaggggagaataaaaagcccaattcacctgttgttacagatgtgaaacaagcctctgtgcaccgcgcatgagccgcggctcccccaaccacggccggactacaactcccagcagcggcggcgcggccccttccgagtcccgtggcggaagtcccgccaccggcccggcgttccccacccggcgtcacggagcccgcctgcggcgcacggctccgctcccccgcgggcctggagcccggccccacctgggactcgtcgtagccgctcggggcacccagcgcccgggatgccccagcacccggcccaatggggcgcggcggcggtgcaggcgggacttccggcggagtcgcgaaggggacgggttggcgccggctgctctggggtcgcagagcgagcgggtttgggtggcggggtcgggcgtcaagttgctgcctttctcggcgacttagctgcctgcagtgtgaaagcgggaagggtcttctcgccctctgcgagccacccgcgcctcctgatgcgaataaacagcccgggtcatggctgagcggggaacggtttccagctcgggctccgggattccacccgccttccccgccacagctcgtagccacgcctcttctcttccccatctcccctctaatctgtttttttagggaggtgagcatttttgtcttgtctccccagtttgcagggaagatgaaatcaacgtgttggttcgttgatttcgtaaactgtacaacgttaggcaaaggacaaggtggcacttgctggtcgcggggagagtgccagtcatagttgctggaaatctggaggtccgcccggccacatcacctcttaggaatgagaaaggggattgtcccaattacacgctgtagtcctctagataaggttcaagtataggttcagtggaattcagcttcaaaaggaaacaacgcagtggcgtagctctgaagctgggtcaggattttacagagtatggttttaagatgtggcctttaggccgggcgtggtggctcacgcctgtaatcccagcactttgggaggccaaggcgggtggatcacctgcggtcaggagttcaaaaccagcctggccaacatggtgaaaccccgtctcaactaaaaatgcaaaaaaattagctgggcgtggtggcgggcgcatataatcctagctacttcgggaggctgaggcaggagaatcacttgaacccgggaggcggatgttgcagtaagccgagatcgtgtcattgaactccagcctgggcgacaagaatgaaacttaaaaaaaaaaaaaaaaaaagatgtgacctttgaggctgtatgaagaattagtgccatatcccgtcacttttgtgtgcaaacagttcaacatgtatctcttttctttctctctacattggctagaagaccggggtgtgggggtggaacatcatttattcattcaaataattagtgcatctgaacagggcatggtgctgtgttgtgtggagaatagagagatccctgcacggacatctgagtgctctgtgtatcagttgctaagctggtgtggaggctacaaaggccctgcctcaagggacttagagcctagtagagaagatgacaacattgtgtgaaggaaatggaaagtggtaaatgctggaaaggaggtattaggtactccaagagttcagagaaaggagtggttactcctgaatggcaaaatgaaaggaacgtgaacaaagacatacgagtggaacaagggacaaatcctaggaatattcagtagttcagtgtgaccacagggttggatgtgtgtgcaagctttacaggaaatagaactgaaaaactgttggggagtgccatactaaggaatttttactttttttggtaagacatttaaaaaattattaggagagtaaaatactgcacttttttgttgttgttgagacagagtctctactcagtcacccaggctggagtgcagtggggtggttgcggctcactgcaacctctacctcccacgttcaagcgattctcctgcctcagcctcccaagtagctggaattacaggtgtgcactaccatgcccagctcatttttgtatttttactagggatggtttcaccatgttggccaggctggcctcgaactcttggcctcaagtggtccacacactttggcctcccaaagtgttgggattacaggcgtgagccaccacgctgggccaatactgtaatttagaaagcttcctctggaagtgaaagggttgaatcagctgggaaaatagaaactagcatgctaattagatcccgagagagaatgaaagatttaactcaacagtgagaaaagcaagaaag

SEQ ID NO: 315561 - DNA, 4001 bp, Homo sapiens
tgggatatattaacaaggcagagatttgctgaaatgaaggggaagaagcaaagataaatctcatttggccttgccaagtgaataaatggtcgtgtcaccactaaaaggaggatgggaacgcaagtagaaatgaaaagttccattcataacatccactgcacaactggctatacccttcatgtggaaacaataatgaacattttttcctgacttatttaacttttcatctgtttaggtattattttctcagctagactgtaagctctttgaataccacatttcttcaagtccctggagcaatatgcataaaaccttgtttcaaacagagccttaataaataaaagttgtaaagttacttagacgtccgtatcctgattttcaagccagtatgcccaacgaaaaagttaatttggggctgtaaaagaaatggatttgttttttaaagaaaagtttaaattatgaagataaatggataaggcccccaaaacacctgaatgaacatgacatggttaaaagaaataaaaagaaatggaacggtttaaaaatagtagtctaggcctggcgtggtggctcacgcctgtaatcccagcactttgggaggccgagttgggtggatcacctgaggtcaggagttcgagaccaacctggccaacatggtgaaaccccgtctctactaaaaatacaaaaattagccggaggtggtggcggacgcctgtaatcccagctactcgggaggctgaagcaggagaatcgcttgaacttgggaggcggaggttgcagtgagctaagatcgtgccactgcactccagcctgggcgacagagtgagaccctgtcttaaaaaaaaaaaaagttgcctaaatgatgatctaattacactctataatacattttataaggtgcttttaaaaagtcaccaaaggcctatactaagaaagttcctgcttaatgataaaaattattttttattagaattttatttactagtcactcggagaactttgtttcccttactacagatctttaagacacaaatcaacctgacaatcacctgaagagaggagagtaagccaaatcatctctggagattcctttcattttccttttcaaagagaatctgctcatcaatagaaatttctccaccccaacataaaaaacaaaaacctaggtttgcagataattttaacactaataataaaagctggactatttttctgaatgatccacatccaaaacagtgtctgcctgcttttgttccgcgcaaacctatctcaaatgtagaaaggtcgctatgtgcttcttcaccaggcaaagaccttaaagtgacaattattattctaagggaaaggacggccagagatacgacaacgacactcctaataaagttaatttcggttggaacgtgaacttaacatttgctttgtcacagttctcaagtcctttaagcaaagtatatattcagcctgcataaatcctgcctgtttttggtcagatgagcatggctaatgttacgcagtacacccgctacggggagcgccagcataatatatttgcgcctcatttacatttcacaaaacacgtgcatcacttaagaaacaaaaccaagaaaaagggggcagcgggagagagaagaaaacctgtgctgcctcatcctctccactactgaatccgagattacctcttgcctctccgcttccttgttcttctgcccctgttttttcgcgtaccacatgccgatttcgcggcctttcaggtgcccgggatgccggcccctgccgcctcgaccaccccctccgccgccgccgcctcctccggagcctcggttacctccatgaccccctgctggcccccctccatagcccccaccggagctgcggggacccccatcacggccccagttctgatggtagtcataactcattgtcctggcagactacaacccgtcagaaccagcaaccgctggaaatggcgtccgggcccggaagccactgtgcgcccacttccgttttgcttccgtagcaccgcacaagagggcgggccatttagcgtcacaagcagtggtttctggtgacgtcacgggaggacgaccccggtggtctggagggtggcagggatcaggttctgtctgagcccccgagttgtttatctttgtacctctggagcaacagccagccaaaggctcgtagattttctttccctaggcccagcaagtgagccaatagcttttggtttttactttcttattcctggtaaatccgcagtttttttgcacttaggtcctagggtagtaaacgttgattgaaacaaaagaacccttggatcaattcgccgtcttctaaagaaaagtctctaaaaaatgagttcttctagtcttgaaaacagcctgacaactattcaaatatgtaatttaaaatccccttacctccttgaaagtgttgtcactatttagtacgtttatccaatagtgttaagatgagcgtgtctacccaaattcggtgcagagctcttaggcaatgtaaataaactactttgaagattcatgtgttcatatgaagccacatactgtttattaaccagcacactgagtgttttgtacaagctgttcttgaataatcaagtaattgggccacacaggcttggatgtacaccaggagatatccagctcatgttacagttaactgatgtaaaggtgctgggaatactcactgaacaaagcaagtatggcatgagcttttatttgcctacagtcttaagggaaagacaaaggctatctttgtgcagtgaattaagaaagggaaatgctgtatgccaggaaggggtctacaatacaccattgtggcctaaaaattattttgagcaaagacatttgagtttctgaaatctacctgtctaaatgcagaaccacacggaggaattcaaatcaagctcctccctgggagggaaacccaggaagactgactcttatcactggaggttagaagctggcaacacacttgaatagacattgtcacaaagctatcatatctggcatctgttttaaggtgtcatttatttttactaaaagtcatttgttttttccatacgtgctgttttcccctttccttccctttataagatggtagataagtcagaactctacctccctgaatcacctttttctgtgaactctattatgtatgtggttaagtctgtcttttcttttgctaatctgttttgtcactttaagtctggggcctgcaaacactgaatctaagaaagtagacaaaaagtatttcctccctaagagccaagagatactacagcaaaagaatttaattttggagttaggtgagttatgcaacaacttttgagataagtagacttttgccagactaatgggcagaagaaaagtatggcaggtgaaaggaacaatgtgtaaagacagataatgatgtgagacatcggagaacttaaaacaactaccctgaatcttaaagcctgatggggaaggccaaagaggtagataggggtctgattatggaaaacttatgtgccacttaaagaacagtgatatgtttatgcagagcagtggttattttgactgcttcaattggaaataaatagcggagacaagagtggatacagggaaactagttaatgtgatgtaggggaggcaaaatgggatgacagggcattacatgtggaaagaattggaatcaggagacattagaagataaaattacttaaatttgatgattcattgaatgtggagaattggaagggttaaacgactccaagtttaagatttgaattattaacccatggggaggcacattgtatcctgagatgagaaacacaggacaaggaacattttgggggtgaggggcagggcaagttaatgtgttttatttttacatgtggactttgaggaacttatgaaacatacaaatggagtatctagaaagcaggctgtaagagttaaaagcacagaggccaggtgtggtggctcacacctgtgatccca

SEQ ID NO: 315562 - DNA, 4001 bp, Homo sapiens
gaagtataactactaacatcaccctgctattctattctcttaataaccaactaattttgagtgctaactacatgccagacaattgcaattctatacctacctacacttgacttttgctgaggtctgaatgtgttcccctcaaattcatattttgtttatgtattaatttttctgagacgagtcttgccctgttgaccagggcagagtgcagtggtgccatcacagctcactccagcttcgacctcctgagctcaagcaatcctcccaccccagcctcccaacgtgctgggattacttgagccactgcgccaggcctcaaattcacattttgaaatcttaaccctcaaaatgatggaataagaaggtgcagcctttggaaggtgattaggttatgagggtggaacccatgtgaataggattactgcccgtataaaacagacctcagagggattccctaaccccttcttccatcttatgttatagtgaagagaccactgtgtaggaagcaggccctcacccgacaccgattctgcctgagccttcatcttggacttcccagcctccagaactgtgagaaataaatttctgtgtttatgaactacccagtttatggtattttgttatagcagctccagtggactaagacaaccttccaaatctgactaaagaactcattgcaacaaaacttataaaaggttgaacagaaactgtacaaagtagctcccaggcattattcaattaataaatataaaatcttgcacaacagcctcttgagggtagactgtcactactaatcatttatccatacttatgtggtaagtatgccttgattctcagccctatggctttttcttctcagagaatcacactggcaagtggtaaagtgagatgtccagggtaccattctaagcaagcatcttcactcatctgcaagctttaattgaaagtcacaaatctcaactgagaaagccatctagtcacatacacacattttaaagctgccgagcaccaccttccagaaaccaaagtgtcagatctgagtttcccaatagctcttcctgggctggagtcatctattacacaaaacgaactcattatttccttacatatgggcaccgtcaatctattttccgacctttcatcctcaacatccccatatccctttgaagtcaaagcatcagtcatttttgtcaggtgtaaaacacatacaccgcacgtgcacggggatgctctgatgttcacaatgtgtaaaaacttgaacgtttagagatcgcttaaatccctggtgttgcataaagggccttgataaaaaacataaatatttgcaaggttgcctttccatatttgtcgctttggggacggagggttcctaagtcagaaatggaatgctagcaacactctatcacctcacacaacccctatgccggggccaagggaggcggctggcaggcctggagcgcgggcaggcgcctgctcccggaggagagacagcgcgggctggcgctccgcgacccctcacctctcttgtccaggagccacatgaacgcgaagcagggcaggaagccgatgggcccccacagcacgagcagcgcgatgtcccagctggagaagccgtaggcctggcgcgccgagttctggatgggaccccaggtgttccagaccaggccctgaacgaacgccagcagcgagaagagcagcagcaccagccagcggcgcccgtatacccgcccgggacccgggaccgccgcgggcagcgccgccgccgccgcctcccggcttctccaggaggcccccagcccaggcccgagcccgggccccagcagcggctgcctctcctcttcgctgctccagcgagagcccatggcgacgcgtcgcccgcgaagccactgccgggcgcagtccgggtcaccgccgactagcccagcgcagaatagtcctgagcagcaggaggcggaggctgctgtggtcgccctcggcctccggaccgcgcctggtgcgcctgcgcggcccgagccgggccggcggggaggcggggaggcggggcaggcggcaaggaggctggggtccgccctcccctccgcgggtggcgaggaaacaccggcgagaggaaaggagccaggtcccagacggagggcaggtagcgctgaaaaggcagggaccagcgcggctgagtcggggagagggaaactcccagagaggctgtattcgaggaggttgggcaaggaaccctggggtgtttggaggaagtgtccaagttaaatcttgtgcctaataaacaactcagtgacctgttaagtgacgtcagttaacctgatgcttgcttctattttgggcttattctcatttttgttgagttagtaacttcagaaattataggcgaaggataaagtttaagcgtagttggtcccaggggattatctcataaaaatcatttcttacgtgcaataagtactacctatttttgttacttttttgtcttacatatccaaagaggagattccaaactagccaatttcattcatatatatgtaaactttacccatttcgcctgccaataggcgagcaataaaggtatgtccagtaaagttggaagatttttgccccaaagatccatctccagtgattatgatttgaccacagggtaaacgagaagaaaggtggttgttgatctcttcacacagctgtttgtttattttggtatacaaattcagaagcctgacagctgtggattagtgtccttgaaaacctaaagtcaagcaatttggcttgtctggatcgggaaatgagtcacagggaacgcaatcacaggattctttgcccgaggttcgtatttcccggcagccactaaaatcagaaggagtcaggttaccaccagaagggcaagagaggtgtaagagaagcgtgagctagcctcgcattccaggctgccaagagcggctcgcgaaagctcacggcagagacccatcccaccgccggagccccactaagcggcaaaccttcccctaaaactccaatcctttagggtggagaaaagccgaggtggaaaggaaggatctgactagaaaaggagaaacagaaacgaagctaagactacaataaagaacgctaaggtccgggttaggtaaaaagcgccacaactcagaccacgtgtttgtatttccacacccggggtatcaaaacaaagctgcgtggtcccgcccagcatccgtcacgtgacctccacgtgagagccggcgtttccgtaggagccgggcgggagtcgccggggctccttcctgtggtgcagcttcgggtctcggagtttggcccctactctgaccccaccccagctccgctccgccttgggttccggcagaacccgccttgcggtagccatggcagcaggctccgaggcgaccactcctgtgatcgttgcggctggggctggaggggaggaaggtaggtgccaggctgaggtccgaccctgagtacaaacccaatgccagttgactctcgtggcacccctcgtggggccgtttgccttagccccaacccaggtctctctggccttgcattagactatgaagaaaaatctatattttctagtgagcgtggcatttctcgaattgtggcatccagatttttgatcgtcgtagggtagcctacgagtgctgtttcacgcatggggtgttatttttgttttgttttgttttatatttgcccatcattagctaaatagaggtgttttgaacgtttagaggggattaaaattaaatttgtgaaattgaaggcaacctttgagattaatggaagttatctgagacttttgtgaacagggattatgcgcttttattctatttcagtgaaccctggtttagcaagtggggatgaggtttggaggcccatgagcctgagatccctgttattatttattgaatgattgcaccgtgcagggctgtgttctgaatactgtcgcaggatccagagacttttgaatatttataacaataccttttccaaag

SEQ ID NO: 315563 - DNA, 4001 bp, Homo sapiens
acagtgaaaccctgtctctactaaaaatacaaaaaaattagccaggtgtggtggcaggcgccagctactcagaaggctgaggcaggagaatggcatgaatgtgggaggtggagcttgcagtgagctgagattgcgccatgcactccagcctgggtgacagagtgagactccatctcaaataaataaataaataaataaataagctgggcatactggtgcacacctgtggtcctagctactccagatgctgaggagggaggatcagttgagcccctgatgttaaggctgcagtgagctgtgatcacatcactgcactccagcctgggcaacagagccagactctgtcaaaaaaaaaaatttgtaatatgtattactttttttcttcaaaaaaagggatcactatttgccaattcagactctggtatagtggctacttatgggacagatactgagaagatagaatccagtgaactgggtgactggtcatggggtttataggtttataatgctccatatattctggctcatgtgaatgacagggatgtgagtctgaagttcaagggcaaggtctggctgggtaggctgaagtcttagcagagtgaatgtggtgacccacgaatcacagagtacaggatcccagccaggggctctggctgcactttaagaagcctataacccgtggaggcggcgagactggtcctgtaagtatctcacatactgtataggtattcattttgttaatgtctatctacctcagttaggttgaaagctacagaggacaggttgcgtgtgtgagtgtgggtgtgcccgaacactggcgtttttattcactgctgaatccccactgcctagaacagagtatgacacccagcagacattcaacaaatgtgttaagtgaaggaatgactgaagctaacgacgtgggatgcatgtcacttaaggggcaggtagaggacagaacagaaaggagaagaagaagatctgagaggcaggaagcacaccggggtaaaggatcgggtatgggaggagtgcccacaagtttaagggagtcttcagtagtgtggccagcagaggccgactcagcacagaggccgcgagtcagctggttttctccttgtacagatgaggaagcagagttgctgttctagaggctagacacgcttcctaaaatctgcgcatgaatggcccagtcaagattgtggtttgtgatacaaaggcaccccaaagccgggtgacttttggctttatcctctccatggaacaactattcagcggtctgccgcagtcgttcattgatatatgcaatatataacgtatgtgtctagagaaatatagacaggtgctacagatatatgccgcacgttgtgtggtatgtgtggtatttgcgcatgtgtgtgtatggatagagcgtccttccactagaatgtcgggcccacttcggcatgatgggctgtttctcaactgcagccccagatcctggaacagcgcctggcacctggcaggtgctgacgcgtgccgagcgctgagaccccggcaccgtccgcagacgcgacgccaccgccacgttacctgctgcagctggtccacgaactcctcgtggcgctcattctcgctgccgcgggccttgatcaagcttgcgctcacttcgtcgccgatgacctcggctgagtacaagttgcggaagacgccggtgagcaagtgcgagatatcttgggtgcgcagcgaggaggggcgcagacgaagcagctgaggctcgggacgctgcgccagcgcaagctgcgtgaggcggcggggccgggctgcgaagctgtagtggaaggcctcagagtaggcgagggaggaatacaaggaggacttccaggtgggctggctggggctgctggacccggctggtggcgaagttggcgcccacattgtcccctggcactcgttggtccgggacgctaaagacctccgcgttttggagctcctggtctccatggcaaccgagacgccgctaactccctgcggcacttcggcttccggcctcaccccttccgccttgcctttctctcggatcccgtcatcgctgtggtcattgtaaacatttgtgtcttcagcattgtccttttaaaagtgagcttactaagtgtgaggacccatgaagaaaggtttaattgacacagccaggcctatctgcaaaaccttgtacctaactacctaccttcatccattctttaatttgttaagcaactgttcattcactcatcatatttattgtgtaaagattgtgtttcaggtctgtgctgattgctgaagataccaaagaagtatgatgctgcttctgccttcaggaagtgcacagtcgtgtatgtgtgtgtttgtgatgatggcggtgggtgtggaggtaaaagtaaaacaactgtactttagtgggttaaggccaaggtggagataaatattggttgtcatggaactacaaaggaggacaggaacttagtctgtagaaggagcgattacttcttggaacaaatgaaaaccaagcagagatttcaaagaaggagtagactgaacatcattagtcatcaaagaagtggaaattaaaaccacaatgcagtactacagttagtagaatgacaaaaaacaaaaaagtacctaaataagagcgtgtgtgtggtggctcacacctgtaatcccaacactttgggaggctgaggcacgaggatcacttgaagccaggagtttgagaccagcctgggcaacatagggagaccccatctttacaaaatatttaaaaatgtgggaaggacggaatgaaattcaggaggagtggaacttaaagagtgtgagggtggaggaatgacactgataggttagggccagatcataagtgggttggtaggccacaatagggaatttggactttattttgagggcagtaggaggttcatcaagggtcttaagctggggcatgtcatggtcagctctgttttactaagatcattctgattgctatgagaatagacaggagaggcaagaggcatcaggaagttcagttaggaaactagcacagaagttaggaaagagatgaagggagattggatgagagagagggaactggattggagatagatccaaaaagtagaattgataagacttgctggtggataatgggaggtaagaaacaggcaccaagaatgactcccaggtatcctgtgtgtgcaatcaggggggtgatgacagcatcactgagatggaaaagaggactgcatttgtccagggcagcagcataacatcacattgactgttgtcatttgcacaccatggcttttgctcacaggtgatacaaccaaccactttctactccacactgagtttgcttgccttacatcctgaaacccacttccagagatgagtgctagcatgcttgcccacacacctgggctacttccacttctacttctcttggttgggcctggctctctcttttgtcctttccaggaccttttctgtcctgagagctgagaagccagggccgcctgccctggactgtgtgcttgagaggcccatctctggctgtcccccgcactctttcccacagagtaagagatcacagggccaagatgatgtgccccgtgcctcgcctccaggcacatgggaccccaaaagtatgtgcccacatgtcctgagttcattccagggcctatgcaggcctcttctttaagtttatcctcccagggctgacttaaaagggtagctatggtggggggaggaggagggaagtggagggagctttggcaaacaggcatttctccaattttccacaagcatgcaaggcccccagtggtgcaggaaggagctgtgggtaggaagaggggtgcaacagtctgggggcctccattgctctaatgtggcaaatggagccccagttgggtggtcttgtcatttaggagcagttccgcttgtggaggctctctggcccccttccctgttatagggaaggacaggacaatggactcttg

SEQ ID NO: 315564 - DNA, 4001 bp, Homo sapiens
aaatccttcaggtcaattgatgtcactatgttcatgtacacatattccttagaatgaccaaaaaataaaaaaaaaaattaaagaaatacaagaaaaatttaaacatatatcacattagaaaacggaggagagtgagcagtttggaataaatgtgtactggtagtttgccaaagtaaaagatcaaagtattagcaacagtttcagattacctgataatgcaaaagcagattatctacaatttgtcatcataatccaaatttttaacatttcaaaatacaaattcttagtatcccacagttgcttacagaatagtgcttagtaagaatgatagagtgaaatactaaaacaccaattcagggttattaaggacatctgttgggggggggctaactgcctctcttaatcactagagaaatgttaagaaagtttaacaaacattttcgtgtttccatcttctgaaatgatatgaggcttagattccctaagcaataaagctaggaccgtgctgtctcatcaaagttacacaaacgattctaaaacggcaatcaaaaaactgacacacggaaaagcaagtgacatcgacaacagagttacggaataaactctcaccttgcttccggaccggcatttttctccagaatcaggaagagggcacacacctttaaaacacacaacggaaaggaaaaaggatagaatcatgttaaactagcattttcccctatcgaaatagaaaaccctcgcagcctatttgaaaaccccacgttccaaagttttaccaagtcaaagaaagagtctcaaaacgcagcagttgtctgtcaacgtggaaagcttttccttggagtgggtacccctccaaattaagaacagacagaagtcggcttccaaactctcctcgaaagcgtcccctccccaaagagcctagacctgaggccgcctcttcccccgcacaagtatccacactccccacctgctactgggtacgggcgggtgaagcgctccgacccttggcccctgagccagcagcggccgcagagcgctgagaggggaccagcgggactggccgcccgccctgctcgggccccctcctctcgcttgcctttctccttgctcgctgcctccgggctgctccagcgggggccggacagggcagcggccgctctccgcgacgccctcgcgccccgcatgcacacctccgcgggcccccacacctgcggcgccgccacaaagttccggtgagcggcgtgcgctcggaactggggtgcgccccggccagactcggagcagctccccagcccggccccgctccacgtacccccgccccgcccggggcccgcggagccgagcggagggggcgaagggacgggggaggagctcccctgggccgccgcacccccgcggcctcgtcctccttctcggccgcgccgcctcctcgctcgccgcggccccccggcccgctcgcccagttgctgccgcacgccccacccccggaacctcgcctccttccgcgcccccaaccgctctcccccgaaactttccgccaagatggcggcccccgagctggcctgccgcgctcccacgtgaccgctttcccggcgctctcagccaatgggaagtgaggaggcggctcgcgccgagccccgggctccccgcgctgctaccttcgggttggaagggggaggcgggtcgggggagggcaggggaacggaaggggtacccggggagcatcctaagggaacctcttcgcttaaaagggcggccgctgaagtggctctgagaacaaaggagttaacactcggactccacaggtggcccggggtggccctggaggagcccgcctttaccttgccctagcccaccggcgcgtcccgcagttccgaactaaacgcgccaggccgggaaggctcgggctgtctgaagagaggcgtgacctcgcctacaccagatccaaggcgcacataccgagacacccctcaacctcactcagcagtgccgtttccaactccgcggcagagacagcgcctggcgaccccgggggtagatccccaccggggaaaagccgccttaaggaggagccaactgcacctcccagggggcggggagggcggggcctgggagagggagagggaggagttcggggaggggtgccaactctgcattgccttccactccaggctgattgttaagttactcttcgtcccttagtaataggcttggggggaggggtttcattacagaaggacatatgaaatagagacactggttaacttggcaagagtttgagggttatagtacaagatttttaagcctaactgattaattccgagtatggtatacttaagggtgggcagagaaggtttgttcattcattcgctcattcattcattcattcatttccctcaagcctgcgtccccgcccggtcagcatcgcaggtgttacccaaactctgacggtccctttaagaactcacccggagtcgcgccctccgaagctgagccgccctcggccagcgctgcaggtttgtttcgtgcgcacctccgggcggaattaccggccggctgggaccccgctcccggtctgagccacccaggttatagaaggggaatctcgggaagctttccaagtcactgcccacgtcttcgaacttcctcggggtgacgaggacctccctattaggaggtccagagagaatttgcccaaagttaccccgagtgagtgacagaactggaaacccggagatcctgtctttcaaaaccggaaggctcttcccagtaaacctgacggcctctgactgaggccgtatccattggctaccaaagggaaggccgaggaacctcgtattgtaaccttaacagctactcagaggtatactgaccactggttttacttttggattgcaccttagaatcctaacttactgtaaggacccaccgactttagaacctatctaggacaaggaaccgaggtccggaaaaagggaagcaacttgtccaaggacatagacgctaatcagtaacagagcagccgagaactcaggtctcctagctctagtccagggctctttctcttgtgattttggacaacttgacagagaggtatgttggtatgttggcagcagacctctgtgctttcccggatcaagcatcctgggatcttgaacaacagttaaagcaacattgcatagagaaaatgggatagaagggtcaaacggtgctgaaggcagaggtgtcctaacagccgggaacttaacagagggacggaatttatttagtagtgaaagtggctcatgacaggcatcatactctcaagacttcgctgatggactgtgaatgggatggttgcagtaagaaaccattctaacaatggaatctcttcagaattcagaagaaacagggagggaaatttgccctctcccttgataacatttattgttcatatatgttcacttgctaggaaacggggatagaaataaataagatccgagtcctgctctcaaggatacacagccttgtagcaagtacacaaaggccaatgcaccttttcccaggggacactgaggagtcaaaaacaaaatttgtgtgagttctcaatgtcatcctagccttcccctaaaagcaaaaaggaggaaggggaggaaagaggacgtgtccttttttcttgtcattctgtgtgacagccctatttggttgtcagcggtgtacaaaagcagcagtgaacccagcacttgttctacccttagcctaaggtgccggcagcaagtgcctagcaaatgaacatatatgaacaatgaataaaggctctttactcttcattcctcctttctacccatctttattagttacttattgctggataaaaaaaaagttcctcaaagcttaagggtttaaaacttattagcttagtaagttaaacagcgataaatattatctcagtttctgtgtgtcaggaattcaggagcggcatagttgggtggttttggctcagggcattatgatgttgcagt

SEQ ID NO: 315565 - DNA, 4001 bp, Homo sapiens
tatatatatataaaaagttctaaagatatctgtcttgttgacaatggaaaatatcatctagtattaatctacaatgaataacattgtcaacctttagtctttgcatcctttcgtgatatatgtaattgcagtcaaaataaggttagtaaaattcttggggcagtattcaatttaagagttaaatcaatcgttgcccattcaataagttttgattgtaacttaacctcaatgcctacataatgactcccccttcctaggtaattccatttctcccaaatatttgagaaaagtaagtagaatttcttacttaagaaagctgatgttattttaaatcaacaccattaaaagacaattctagtaaccaaaaacagtaaagaaatttataaaaaacatataaagaaatatagaactgttgacagttatagtttatatttattgagctgcttctattattttctttaaaagacagctttaagggaatttattttaaaaggtcctaaggaatgtgtatgtatgtattttcctaatttaaatatcactgatgtcagaggacaaatgcattctcaacttgtttttagaccatttctcgtccttttatttttactaaagttgaactgactgcttaaaaatatttagaaatatgaatatttcctcaaaccacccttgtagcaaacaataggtatttcaaacaattattaatttttctttatttttcctcccatagacaatagctcatttcctcaaaaagtggtgttatgtgattttttttaattttgagagacttttagtatttgctcatctctttaaattgtgatttgactatgtgaaaaaatattccatgactgtgtaattgcacaagttcacttaatttcaaattaagctagataaataatatttacaaaaaacgattcattaaatcccttgaataagccataatatagctaagatgtcagtatatataatactagccaattatattaaattgaatctattttcaaaacactgaaaaatgaaaatatttcaaagtatcttctgtttctttactgtaacagtctccctaaggttatctaataacatacaaaaactaaacaaatcagcattttctttggtcagacatcatactctacagcatttagcacagtctaaaaaggagatgagcattattaattcatattttatgtatcaatgggcttatatttttagaaaagtcattcaattgaatctgaggctattttgtttggtattacataagagcataaggaaaaatatttcttgttcccccttttgtgctaaagacctacacggatggacagaaaacatacatttctacacatccaaggtttcaaggctattctttaaataaaaaatctatattaagacatttttacagagcaaacgtaaacagaaatagattgaaaataatttcaacaagtggtatgttacctgggtggagctggtggctaccgagatgcagtcaataaagctgtgtcttcgagtgaaaaatgcaactatctgctgccagcgtgaaggttctggctcagcttgcagttcatctgacgagcccttttttgcccagtgtttctgctttgggcctgctgagccatggctagagctagtattgcctcctcgactgccgcgagagtatagaagtgtgttgtttccgaaaatgtaattcatctctgcagccctgcaggtggttgccaagcaggcttacttctctaccagctgctgagtggtgaatgatcggtaaaaactgcagctacaattacagcagcatcacttgtagatcagtgaaaataaaaaccttgagaaatgatgctcattttctcagtgatttcttcctatgaaagagctcgtatcttccctctgtacctgttagctgtatgatggctgagtttatttttgcagacaaaaaagacgacataaggtggatttctttctcatgattattttttcaccagcgtctgcaggaaccaaaagctgttcttttgttagctgataactagatggattgaaatccaggaagtgaggtcgattagcaggtaaagaaggatgctataaacactggactaccaagaccctgtggggctgcctgatttaatgcactgcgtggaaaaaccctggattaccaagtttcaaccacagtctgtagtaaaatccaatggcaccttcactgcttatataaattataaatatgaactgaattaaaacatataagaggattctctctgcaaatagttctgactgttaaaatgatttcactaaaagaatctttgtcattcatatccaaatttctacaccaggcagatcttacacattatctggcactggctctaagttgttcaaaggtgctgcctacattaaactctgactatctaacgatagcgcttcattacaaatggattttcctttatcattttatgtaatgtattggtttttaatgattaacaactgggtctcaaggtagattaattactaaaacaagtattttgcttctggaacctttatgataaaaaagaactttcaagaaattatcagcatcatctctctagtattttataaacattcatattacaaggtcataaatttctaaaaatgagaaagaattaacgctggtaaatttttcgttttataatcagtgaaatgtgttttatccaactctacataaataccactctggttcaccaaatactatcacctgattgctaaaggaacatattctaacatctaatatttaggttaacataatagttcgcctgagaattgcctggggcgctagttatatatgcagattggtgtatcctctccccatcaaaatgtttacgggcagggggaacctgggaatttttatgtttaaaatgcttcccaagtgactcttaagtaccttcaagtttgagaaccacaaactcccaagcaagccctcttaacactgtgctatattagtaattacaacaatggtcattttaaaacaatatgtgaacaaaaacgctacttgataatttactattggttgaataatctaatttttaagctgataagagcatatcgtaagtcccaacctcagccatggatattttttcggatgtggactgacagaatcttccttgtctacgtgcttaccagcaccaactggatgcagccttttgtcaaactacaatgttgaggtccactgcaaatcttgactccgcaagaaaacatgctaatgctgtctctatgatgcgtctgctgagaagtgaacatgtgctcagtaagggtgagagccatgtgggactcttgagggcaagatattttgtgacagagattataccagaaagtttggtgcttcttcccaaggactgtgccggcagtagctgacaatttatggccccagagtgatcctatctaattcggagtagagaatgtaagaaaatactaagggcggacaggtaactaagaatcctcttgtgaaggaaaaaatgaaacctcccagaaaaaaattcaagttttgttatggaccaggtacctagtaaagacctgattagtgtggtttatataaatgctacggtaattggtctggccctaaaatatgtgccttgatccatgtctgatgaaaacttcaaggggaggagaaaactgatatgggttctgttattctgaattagtatggatgaagatactgaatacaactgttgaatgcaaatctcctacctcaaactgtaaacagtaccaaaagacatacaatagtaggctcttagtgagcatctatttatcctacagagccagagaacttaggggtcaatggtaggctcttagtgtgcatctatttaccctacagagccaaagaacttagggtacaatctaaagttgacagatcactgcctcccatatttccccaatgtacagggaagaaatacttcttgatgcaaatttcctatccaaatccattcacatcaagaaaacaacttcaagttttgggaaagacttctttatgaaaatgtcctgttacatgacctacaaaaatc

SEQ ID NO: 315566 - DNA, 4001 bp, Homo sapiens
catgttaaactagcattttcccctatcgaaatagaaaaccctcgcagcctatttgaaaaccccacgttccaaagttttaccaagtcaaagaaagagtctcaaaacgcagcagttgtctgtcaacgtggaaagcttttccttggagtgggtacccctccaaattaagaacagacagaagtcggcttccaaactctcctcgaaagcgtcccctccccaaagagcctagacctgaggccgcctcttcccccgcacaagtatccacactccccacctgctactgggtacgggcgggtgaagcgctccgacccttggcccctgagccagcagcggccgcagagcgctgagaggggaccagcgggactggccgcccgccctgctcgggccccctcctctcgcttgcctttctccttgctcgctgcctccgggctgctccagcgggggccggacagggcagcggccgctctccgcgacgccctcgcgccccgcatgcacacctccgcgggcccccacacctgcggcgccgccacaaagttccggtgagcggcgtgcgctcggaactggggtgcgccccggccagactcggagcagctccccagcccggccccgctccacgtacccccgccccgcccggggcccgcggagccgagcggagggggcgaagggacgggggaggagctcccctgggccgccgcacccccgcggcctcgtcctccttctcggccgcgccgcctcctcgctcgccgcggccccccggcccgctcgcccagttgctgccgcacgccccacccccggaacctcgcctccttccgcgcccccaaccgctctcccccgaaactttccgccaagatggcggcccccgagctggcctgccgcgctcccacgtgaccgctttcccggcgctctcagccaatgggaagtgaggaggcggctcgcgccgagccccgggctccccgcgctgctaccttcgggttggaagggggaggcgggtcgggggagggcaggggaacggaaggggtacccggggagcatcctaagggaacctcttcgcttaaaagggcggccgctgaagtggctctgagaacaaaggagttaacactcggactccacaggtggcccggggtggccctggaggagcccgcctttaccttgccctagcccaccggcgcgtcccgcagttccgaactaaacgcgccaggccgggaaggctcgggctgtctgaagagaggcgtgacctcgcctacaccagatccaaggcgcacataccgagacacccctcaacctcactcagcagtgccgtttccaactccgcggcagagacagcgcctggcgaccccgggggtagatccccaccggggaaaagccgccttaaggaggagccaactgcacctcccagggggcggggagggcggggcctgggagagggagagggaggagttcggggaggggtgccaactctgcattgccttccactccaggctgattgttaagttactcttcgtcccttagtaataggcttggggggaggggtttcattacagaaggacatatgaaatagagacactggttaacttggcaagagtttgagggttatagtacaagatttttaagcctaactgattaattccgagtatggtatacttaagggtgggcagagaaggtttgttcattcattcgctcattcattcattcattcatttccctcaagcctgcgtccccgcccggtcagcatcgcaggtgttacccaaactctgacggtccctttaagaactcacccggagtcgcgccctccgaagctgagccgccctcggccagcgctgcaggtttgtttcgtgcgcacctccgggcggaattaccggccggctgggaccccgctcccggtctgagccacccaggttatagaaggggaatctcgggaagctttccaagtcactgcccacgtcttcgaacttcctcggggtgacgaggacctccctattaggaggtccagagagaatttgcccaaagttaccccgagtgagtgacagaactggaaacccggagatcctgtctttcaaaaccggaaggctcttcccagtaaacctgacggcctctgactgaggccgtatccattggctaccaaagggaaggccgaggaacctcgtattgtaaccttaacagctactcagaggtatactgaccactggttttacttttggattgcaccttagaatcctaacttactgtaaggacccaccgactttagaacctatctaggacaaggaaccgaggtccggaaaaagggaagcaacttgtccaaggacatagacgctaatcagtaacagagcagccgagaactcaggtctcctagctctagtccagggctctttctcttgtgattttggacaacttgacagagaggtatgttggtatgttggcagcagacctctgtgctttcccggatcaagcatcctgggatcttgaacaacagttaaagcaacattgcatagagaaaatgggatagaagggtcaaacggtgctgaaggcagaggtgtcctaacagccgggaacttaacagagggacggaatttatttagtagtgaaagtggctcatgacaggcatcatactctcaagacttcgctgatggactgtgaatgggatggttgcagtaagaaaccattctaacaatggaatctcttcagaattcagaagaaacagggagggaaatttgccctctcccttgataacatttattgttcatatatgttcacttgctaggaaacggggatagaaataaataagatccgagtcctgctctcaaggatacacagccttgtagcaagtacacaaaggccaatgcaccttttcccaggggacactgaggagtcaaaaacaaaatttgtgtgagttctcaatgtcatcctagccttcccctaaaagcaaaaaggaggaaggggaggaaagaggacgtgtccttttttcttgtcattctgtgtgacagccctatttggttgtcagcggtgtacaaaagcagcagtgaacccagcacttgttctacccttagcctaaggtgccggcagcaagtgcctagcaaatgaacatatatgaacaatgaataaaggctctttactcttcattcctcctttctacccatctttattagttacttattgctggataaaaaaaaagttcctcaaagcttaagggtttaaaacttattagcttagtaagttaaacagcgataaatattatctcagtttctgtgtgtcaggaattcaggagcggcatagttgggtggttttggctcagggcattatgatgttgcagtcaagaagcctgccagggctgcagtcatctgaaggcttcagggggactacgggaggctctttcagcatggatcattcacatagctagtaagttgatgctggctattgggcggaggcttcaatttctcaccatgaagacctttctatagggctgcttgagtgtcttcatgacgtagcggctgacgtccaacagagcaagtgattcaagatggcgagacagaagaagccacaatgcctttcatcacttagtctcaaaagtgacactctgtcatagtctgtttgggctgctataacaaaataccttagactgggtgatttataaacaacaggaatgtattacagctctagagactaagtagtccaagatcaaaacaccatcagatgtgatctaacagtcatgagaataaaaattaaaaaaaaaaaaatggccaggcgcggtggctcatgcctgtaatatccagcactttgggaggccaaggcaggtggatcacgaggtcaggagttcaagaccagcctggccaagattgtgaaaccccgtctctactaaaaatataaaaattagccaggcatggtagcaggcacctgtaatcaactattcaggaggctgagacagagaattgcttgaatccgggaggcggaggttgcagtgagccgagatcgcgccactgcactccagcctgggcgacagagcaagactc

SEQ ID NO: 315567 - DNA, 4001 bp, Homo sapiens
aatccaaacacttgggcccaggcgggcggatcacccgaggtcaggagtttaagaccagcttggtcaacagggtgaaaccccgtctctacaaaaacacaaaaattagccggcatgatggcgggtgcgtataatcccagctattcaggaggctgaggctggagaatcgcttgaacccgggaggtggaggttgcagtgagccgagatcgcgccattgcactccagcctgggcgacagagcgagactccgtctcaaaaataataaaataaagtgcacctcccttctttccccctggccaaggctcagcaaccagactcctgggagaccccattccccaccctcgtccactcgccctccgcgccttttcgaggtcccgctgcccgcgctggccccgcaacccctccgcctcaccgacgtaccggttccaccgagcagtgcggggatgcatcagccccgtctctagggagggacgctaggccgttgctaaggggcggggccatccggcaccgcagggcgggagcttccgtccgcgaacctccccagcctgaacccttacctacccaccaactccaggtctcggttacttccgcccaggacagtgggactgggatgttccagcatatgccccgatcggcaggattagggccgaccagggagcgtcactcttctaggctccattacccacccatcttccctcctgtgcccttttagagtaagcagcgaaacagctaaatgcagcgtgagaactttgattaaatcctgatttaaatacatatacatatgtaaataatttggggaggaataattgaagaaatttacgaactggaagttggcatttaagccacagctgcgggacagctggtcagggcactgaggaaaaggtgggttctggttctcctggggcttggctcacaaagccacacccacccattgcacggtgactccactcaggccgccgcttccgctgggcagcggatgcgcccgacacccctcggctcgggcgcccaccctctgatgcccctcatctgctctcagcacctggcatgggttcaggttttgatcttcctgccctattctgaatattgaattattgttaattttcttagatgtgataatgctactgtggttgtatcagactgtccttagttgacgtggcctgaagtgtttgaagaaacacgtcagaatgtccgctacaatttcctttcaaatggttcagcaaaaattatacatataggtaagcatagctagataaaaagacaaagaggagataaagcaaaagtgctgcaatataacaattagggaatctgaaggtcacagatgtccatgtactagtcttccaattttttctgtaagggaaagaagtggtttacaaaccaaaagaaccaaaagaaaaacatcaccccatctgtacctgagaacccctgcccacagccttctcaaaactggccccatttcacagatggggaaacagacttgctgagacggttagtactaggggaggtcataggccctgatgttgaattttacttggcattttagtcgtgctggcttggtgccaggcctgttgctgggcactaagtgtctggaactgaactggaccctatccccaccataaagtgtattgagtgggaaagatggagaggccaggccatgaggaacctagaggcagggtgtaatctatgcctggagacagtggttcagcccttgcacaggcttctgcttcctctgtctagaacctgtctccatccactcctgcatctggcggactcctactcacccttcaagacctgatggtggtgcaacctttcctgaatccaaactgtggttttatttttcttgttggcattcacacaggtactcagtgatcactgcagaaggaagaaaggactgtgaggggaactggaggcaaggtgtccacagctcttagaagggacaaggactccatagccctgtttagggcagtctggctgctcaatgggtctgcgtataggttgggtaccccccttggcctgtagagaggcacctgcttccctgcttttgcctggcacttcccacactaggtacagctgtccaaaaagctgcagcatctatccgggttgccatggcaacatcagcctatggtgggatgtcagggatgagaggggcagaatgctaatcctggaaagttgccaagcaacacagtgggctggtgacatcacaggggctgtggctgctggacagatggacaggccacagctgaaagggtccactctcaggaggcccagctcacagaaccactcactgcttaccatgtgatggtcactgctgtttctcccaactggagaatggacttgaggggtgggggtcgggggtgctgcttttaccagcagccctgccagctccacttcgcccctcttcaagggcgggctgtggatatgactgcctccctcctccctggaaggacaccgtgagtcagtccctgttctcctgggtctcaggggctaccctctaatgtgctgtcttctcccatggctgcgcaagggttcaggctttggtcttcctgccctgtcctgaaggccaccatacttaccttgctccctgggaaaggagcagggggctgagccatgacccactggactcctgcccctcttgtgatgggagggccatcttttgccctgaataagctggaagagaggtcagccttacccttgttgaaatgggaggactaggtttctacaagagttggggagtcactgcccatctcttactcagatcccccttgctgaggactctggtggcctggaagctgggggattggggcagatgggctgcttaggatgccctggcccagggccatgcctttccagcatggagtctgaggtcatggcaagtctgcacaccccctcccctgtgtctccttgctggctgagatgggagcaatgcttcactggctgcagagatgaaagccccttgtgaatgggcagcagaatgggcccttcatgtggctggccagccagaacggaaggtgacaggcatccagactgagtggctgagctacccgctccccacctgtccccagcctccctcttgggcccccaggatcttcctctgattttctaggcctggagctctgagctatgccacaagaaagtgagttgcaggcatcgggggcggggggtgtcagagaagggaatgggtgaggtctacgattcactgcctccccaggcctccccgacataagcctccctgccattgctcagctgccctcagcagttctgaccagcataatcatttctttgatgaataaaaatggagaaaatttaattctcctttgatccacatgatcaccttgacagacaagaccttgaaagcccagagctcaagcaaggagtagaacagagtttctccggggctggtggactgaagaccactggcccatgaacagacaatcttcatccatcacagcccccacctaatcccctgcccacctttactcctgtgcagcctccctgccggagcctcttccctctttgtttttctatgatcttccatgccatcttgggctacttctcaggacacactccctgagtgccttggccaacagaacacacactctcctcagggccccagaggaccatggtcagtaccacttggtagatgactcactccctaccatgtgatggtcactgctgtttctcccaactggagggtggacttgatggatggggtcagggggtgctggggcagaggcacagcttttctcagcagccctgcccatgcgtcagtccaggaaagacccatagaaatgactggaagatagagcaacccacatcggggccatcacctcaaagatagtggctgttgacaccagcccagttgcacatgaccccacatgatcccaccctcacctcctctcccccagcctatttttctctgacctccatctgagggtgcaggatgctgaggctctgcgctccaggagcagcggcccaagggggggatgcctgttggtccccaccttcctg

SEQ ID NO: 315568 - DNA, 4001 bp, Homo sapiens
aaagaatgtgaactttagaaccagaccaaccaggtccaaatcccagctgtgcaaccttaggcaagttacttaacttctctatacctcagtatactcatctaaacaatggagctaacaatagtacctaccttataggattgttgcaagaagtataggcgataagaacaatgtctgtcagtgtacagtgtataatatttgctaccattacaattacttttcaattgtttttctaattaacttgaaaatagtattttacccatgaacaacctccacagttaaaactttttaggagaatatgaacactaatcattttacttgaattccaagcaagaattatctactaatatgctacttacactaactgattaattttctgctgctgctccttggatcttctgtattttagcagcttactttgtgttggtgtatcaacgcctatgttttctgggagatggacaatggggggtaacttcaagttcagagcttccttttctgctgcaatggcagctttgtttgcatctgacatcttgatcccctaaagattaaaatactctgtactctgaggagaaaaagtccataaagccattattatgtcagcaagcctcgacacattcataacatatctaacatatcaataccaaaagtaaaattctagacacttttggatcttcctcccaagtatggtattagtctaaagaatgacagttgaggtaagttggcagggattcctgttagaactctaaaactcacttatgaagcaatgagccagtcagttccccttcagggcttgtttcctaatggatgaaactaaggaattgaattagatgctctgtaaatatccctacagctgtagcattctgggtgcaaaattttcccgagatgcaaaccactaccaccaccaccacaacaaatccagttgttgagggatgatccccttcccagtaaaagctgatatttaacatcattaatggtttttttttttttttttttttttttgagacagattcttgctctgtcgcccaggctggagtgcaatggcgcgatcttggctcactgcaacctccgcctcccaggttcaagtggttctcctgcttcagcctcccgagtagctaggactacaggtgcgcaaccacgcccagctacttttttgtgtttttagtagagacagggtttcaccatgttggccaggctggtctcgaactcctgacctcagatgatttcccgcctcggtcccccaaagtcctgagattacaggcgtgagccaccgcccccagccaatcattaatatttttaaacatcagtatgatatcttagtcttgctgccttccaagaaagtgatgctatgatcaagcaaaaaataggcatacttgatgcatggcaaatataaaatgtcatgtaaatgctcaaaaattttactgtgggccaggcgcggtggctcacgcctgtaatcccagcactttgggaggccgaggtgggcggatcacctcaggtcgggagttcgagcccagcctggccaacatggtgaaaccccatctctactaaaaatacaaaaattagccgggcgtggtggcaggcgcctgtaatcccagctactcaggaggctgaggcacaagaatcgcttgaacctgggaggcagaggttgcagtgagctgagatcccgctaccgcacttcagcctgggcgataaagcgagactccgtctcaaaaaaaaattgtactgtgataacaactatatttgccatgaatgcctacaggatttggagattcctgccttgaaagagtgtttaagttggcacccaaatcgcgatacctgccctgggagagaaaggaagagaacagcagagaacaagtacctgattgtttctcactacttccccgctgcgcagacgccagagagagagagagacagtcagagcctctcctcaggtgaaaggcagggggataacgagggagaaacctccggaacgccaccggctctcaaacgagtagctggagaagggcggtcgctgaccggttggaaacaacgtcgtcgccatggaaactgtggcggccccagctggaggggctgggtgaaggttgcctggagaggcagttgccaagctgcaaggggttaggattacctgtcacaacaataattcgttactcaagtaaatggggtgtgaggttttgtttgtttgttttaacctaactgcctttcctgggaaggggaccaggaaattagaatcttcaaactgtggaaaactgcaagactggaaatttagatctgttggaaaacagatttatggaaacactctcagcaagagaatcaagtcttcaaatgtcccctagtgacaccctgtaaatattgtaactaatcagcaatataatttatcttgcttctagatttgctatttgttgacacagcacttccaggaattctttggcaaaatcaaacaggttaaggtgtgtgaatttagtggtatgctgggagaaagatgtgaaattttgctgtttgaagctgcacaatgcatactacatctaaatgataatagcctacgagaatactatgtgccaaaattaaattagggaagtgaatactgccggtgtgttaacagcatattcattcaacaaatatttgagcaccttctatgtgccagttgctacgtaatttttttttttttttttaatgagagtacagcctacactattgtgtctggcacagagtaggtgctctaaaatgtcatttaagcgagtgaatgaacaagtaaaacttcctggtagtttgtaaaagcaaattatctttctgtagaaaataaaatacttgtataaataatgtgacttttttttttttttttgagacagagttttgatcttgttgcccaggctggagtgctcaccacaacctccacctcccaggttcaagtgattgtcttgcctcagccttccaagtagttgggattacaggcatgcatcaccaaacccgactaattttttttcttttcttttttttttttttagtagagacggggtttctccatgttggtcaggctggtcttgaactcctgacctcaggtcatccgcccacctcggcctcccaaaatgctgggattacaggcgtgaaccactgcaccatgccaccttttctcttttaaactcagtcctatgacagattagacagtttttttaatgtcaatttgttagggtttattttttagagacagggctctcgctctgtcacccaggctggagtgcagcggcaccatcatagtgaaaggagtcagctagattttgcattaggtagatagcaagggaagggtccccagagaacccccagcccatgggtcagtgcctcatccccacataacataaaaagcagcctgggaaaaaattcaagcggcaggcaccaataagggaactagcacagggtgttgtgcctggagacatgcccacggctccacagatagaaaaatctccagcccatttggacaaaaacttgcacagacctcctcctcactcacataaaggaacaaagaaatgcctttgtcctttgtatagtcaatgggctcccagggaaaaaaaagtttattttccttttgtgggtatgggcacagtgggctccagtaggttccagtgggcactctactttcctttatttggattgtaagtccggcttctaggaatcatcacttcagctcctgatttgtcctgggccaaggtccagggccaaactttctcttcagttcctgataggtcccgagccaagctaagcagcatctatgaatcatcatttcagctcctgattagtaccaggccaagccccagggtagcggggtcgggggacgaagcacattccttccccttcccagtccataaaaaccctggaccccagcctcatagggggcaccccattcaggtccccctctctgctggcagagagctttcttctttctcttattaaacgttcgttctaaactaacctttgggtctgcgctccttaatcatcttggaggtgggacaaataac

SEQ ID NO: 315569 - DNA, 4001 bp, Homo sapiens
aacatgcaggtttgcaactctcatgaaggctttctttttatttttggttctagctcccaaactgattgaacgacagaccaatcagttgatctacttattaatctataataagttcaagactagcctggccaacagggtgaaaccctgtctctactaaaaatacaaaaattagccaggtgtggtggcatgcacctgtaatcccagctacttgggaggctgaggcgggagaactgcttgaacccaggaggtggacgttgcagtgagcggagattgcaccactgcactccagcctaggcaatagagactcagtctcaaaataaataaataaataaataaatgtgagctgaaaggagtgtttctctgtattgtatgttttttctagagctacagattttattcgtactttatcacttttcccaactcacctcataagcagcacccagatcctggaatttctcctgggcttgtggatcatcagggttccggtcgggatgaagctgcagggctagtttcctataggcctttttaatatcctttatagaggcacttcgaggcacccccaagatcttatagaaatctcgtctgggaagtagagggagagaatacttcattaaagagttacatgttacatttttcaaagtaaaagatttatttttcctctacatttaggtttgtatctgagcaaagaggtataaaaatgaaggtttatgtgacacatacacacacaaagaatgactaaagagagaacaccagaatttgtaatgaatcttatatattgaagtaatcacagtaagaggctatatacttcttttcggattattcaaaacatctgtggcacttttctttcagaaccaccttcggtcaagaaaaccacttccttattttatggtctcatgttatctttaggcaataaccatataatcaaattaactcttcccccctttccctatactggctccaaatgattttgacttttctaaaagtcaaataacactctcaaaggatgattttccttctttaaaaagattatgccacataaatgtcctaacagtagcactgccagaatgttaaagatgaagcaacttaagataataaatagctcaagaagctgggaagtacaagggctgtctaaagatcttcttgttcccatcccgcatccaatttcgttcagtcccaactcgggctggcatcatccacccactttaatgtcagccccagaatggctcttcgaaggcttggcatagagcatcgtccgcttctccacctcagcggggcacagcaactcacctctttgatcaaacaaacgtccatcccctcaacctcagcctggcactgtcactatctttccttacagtcaggcatccctctttcttccccagctctacgtgacactgcttcagctcgcaaccaccttctttccctcatcccccaaatgccgtttggcaatgcatccaactcccactcctctgggcaaatctagctctacctaagaccctctctggacctaaggccctctcactggtgtcacccacggttctcctctcaccccactagcctggcccatactaccccttcctccgccaccccgccaacccacagcgatgcccctctccactccgtcagtctggcaatgccacttcccccaccccctcccaccccccagcaaaggctgacccacaggccccgttgtctgcgagtgtctgttcctcacccggcaatcaccgccccgatgaggtatagcagcaacaggcaaaaggtgctcaggttctgcggagccatggttcctctgtcccgggtcctgttccacacactcctcacagcctcctccgccgccgcgtcggctcgccagcccacccggccctgtgaggccgcctcacaccgggggggcgcgggggtctccttggtccgcagagacagctagctagccccctcttctgccggtccacttcccgggagtcccgagtcccggtgagagaagcccccggtaggcgagagccaatcgttgcccgggacatcacacgcggccggcgcctggaagccaatcagcgcagtacacttcacctccgaggcggcacgggcaaccagttaggcttcagaactgcagtcgcagctcttgaccaattagaagcggagacgtcagagggtcgcgccgctgcaggaacccgctctgcctgagctaccgcgagtcgtagaaaattacgtaatgatagggggccggtcagagtgagggcacctgaggtacacgaaatccctccggcttgcccacttcctcggactttccaccaatcaggagcttcctccccagcaccaaccaattgtgggagagaagttttctctgtgctacaagcccggaatttcattcatacccagctacgctccgaatgagggagcagaggtacagcggccgaatgagcgggaacagttattccacgacaggtgtacatcagacgcattgcttaggcctcttattttacgttctccaagcaactccataagacaactgtctcggaaaggctacagtgatgacagaccgacttaagttcggattcggcttccaccgcttcttagtggtgagaccccccacccctcccctcctcccaagtctgagcctaagtttatcaacaaaactgaggcaaagcacttattggcagttctgtgaattttaacagggaaaaaaatcggtaaatcatcgggcgtatagtaagcaggcaacgagtaaaaaccattattacggttcaagcagaactctttgattccccatcttccccccgattttgctcatcgcagttacacaacacctagttgatcaggacaaagctctaggtgtttttattcctttcatgcataagctatccaactctttacctctgaactatacttcaatctgttcactacatctccattaccaggattctgggtcacagtgtatctctcacctggccagggcctcctaactggcctccttgcccccactcttaatatcttccttaatatcttaatatatgttgctcatccctgtccctcactccatgatttaaaaaaaaaaaaaaaaagcccgggcgcggtggctcacccacccaaagtgtaatcagcactttgcgaggccgagacgggcggagcacctgaggtcaggagcttgagaccaggctggccaacatgatgaaaccctgtctctactaaaactacaaaaattagccaggtgtggtggcgagcgcctgtaaccccagctgctcgggagcctgaggcaggagaattgcttgaacctgggaggtggaggttgcagtgagccgagttcctgccactgcactccagcctgggcgacagagtgacacaccgtttcaaaataaataaataaataaataaataaaaaataaaagtcaaatcatgtcactcccctgtttaaaagcctggaatggctcttcatttgcacttagaataaaatcccaactccatgctagtttacaaagccgtttatgctttgtaaacctattatactcctaaccatgctccagcaaaacttgcttcctttcttttttttgtatacaccgagctcattcctgccgagggcctttgtgctagctattgcctttgcctgaaacactgtactctccctcatgtgctagcatgggtgattccttctttaactcatatatcagcttaaaggtcgccacctcagggaggactttccctgaccaattaatcaaaattagcccctactgagttccttactcttacaccaccctgttttcttttctttatttctttttttttcctgagacagagtctcgctctgtcgcccaggctggagagcagtagcgtgatcttggctcactgcaacctccgcctcctgggttcaagcgattctcctgcctcagcctcccgagtagctgggactacaggcgcacaccaccatgtccgtctaatttttttgtatttttagtagagactgggtttaaccatgttggccaggctggtctcgaactcctgacctcaagtgatcc

SEQ ID NO: 315570 - DNA, 4001 bp, Homo sapiens
gcacccccatgctgggcatccacccacctacacctgctgacacatgtggcttagcagaggagttgaagagcagaacttctccactggatgtagctacagatgaacctgattctttatctctgtggctggatttttgtcactatgtctcggttagcagttagcacctgctgtcccttgcaggcttgttcctggggcgggagaaagatgcttgccctgcacagttctccatgatggcggtggcagtgggagaggcactgctgttgactgtgttgctggtggggagaggcacggtgggtgtccatggagatggataaggtgtcattatatagtagaggtgaccatgggagcagtgttgatgtggaggtaatggtcatggtgggtgtgagggggagagtaattatgggtgatggtggagttgatcatgatgatggtgatgctggtggtgacagcagcaaggcttgtgcttgagagtaattgatgatggtagtggtggtggtgatggtcatgccagaggagatggtaacagcgagcctttgttgtggttggcagtgatggtgcaggtatgatgaggaggtgatgggaatggctcctagtgagccattggtgtggttggcagtggtgacagtaatggtgatgatgaaggtgaaggtggtggaggtagcagaggttgtatcttgttcggctataccacagtgacagcttccacctctcagtggctcacgacaaacatctagttccccccacttcactcactggtgcctacaggcagctgccagggccccacctcccatagcttctcactgtgggtcccaggctggagaatcagctctgacctgcacacccctctctcatgacagtgccactcagagacagcaggaacttgggctgcctctgaaagcttctgttgggccatgatgtgtggcagtcttgctgcatcccatggtcaaggccagtatccatggggcaaagaatgtttccttcaggaaggttctgcaaatctcagggcaataggaagagaggcctgagattcccatggggaagagggagtgagcagttctccaacatatgccagatgctcaagatgggactgacagcggggctggtaacgatggctctgctgggagcagtgttggtgctgctggtgccggggacacccgtggtggtgatgggataggaggcaggaattgtgctattaatggaggatggtggtgagggtggttgtggaagaggcaatggtagaggggggtgccgaggggtgagaaggacacagtggtggacatgctggtgtgagtgccgatggcgatggtgatggcactgaggtgtggggctctgtattttctgttgctaacttggcattacaccaacctcttccatggtctccttgcatcctggagaaatctgagggattttccagaatcccatcaccggtataattccagactagagcctgccaatacaagggatttggagagtggaaaagagaggccgttgcaggcaggtgacaatggtgagctttgcaacagctcggggcaatcttctgcgaagaccctgcttctgagccacaggctgaggcatggatggggagcttcctggaataccgtgagctcctcagcagctcccaggcaagctctagagagccgctcacctgggagctgcaggtgagcatctcgattccttgttccctgaccgctggtcccagactgttcagggtgcagcgtgtagtaaatgtcctcctccttggtacacatttgagggctgtgtactgtgagggtgatggcggctcagatgaaggtggtggttgtgatggagttgggtgtgaggatagcagagagaaagcagatggtgacatcaggaaggcattggaggggcagtggtggtggcagtgatgatggtggcagtctaattagaggcagtggtgggtctggctgaggcagacccggtggtggtgatggtggtggtagtagagggggcaatgacggtggtgatggcaaaggcggtgtgagtggttgatactggtggcagagctgataaggtgatgtcacagatgggatggtgggtggagatggaggtggaggaagtgtggtgacagtgatgtggtggtgacacaatgctgacacgggtggagagcaccgtggtgacggtgacagagatgatagtgatagtggggctggtggcagtggtagaggagatggggatgggacgctggggtgttgatggtgatggtgacactgctgagggtgttggtggcctgacattgtaaaggtgaagcctgaagtttccatgacgatggaatcaggacagtggaggaggggtggtgaaaacaatgttaagagacaaaggacctagtatgatgaggcatccaagaatcctgtggccgcctccccgtcctggccctccctgccttgttggagaccctggctctggtctgcgttgtactcccaggggaaatttcttccagccactgccctgctccaacccttgttcctgggatgggtctgtgggagtcagccaggatggagacagggctggagaccccctcactgccgcccattcagggctgtcttagggcacacagaacagaccactcggtaggacttacgggaacaggtgtgtcacctgggagcaggtcccacacctcaccatcaagggcatcctgagatggaggcccctgtggggagctccccatgaagggagctgtggaccgtggagccgggcagtgtgcagaggagtttcccttctgcaaagggttcaggctagtctccttccacgccagtttttggggagccagtggggagcatcaggggctctgaggcctccatagggcctgctggagggacagggacacacaggcatgagcgcacacttaggccccacacgctccaccgtcaattctgtcaggccacctcccctcttcaagcctctctgtcctcattcaccagtgggtgcttttggggatttgccctctctggggagccagcctaggcttcctggcctcagatgtcccatgtccctcatctcaggcccaccctaaagccaaccccgagccatggccagggagagaaggaccttcagcgaccaagcgaggcccagagagggcagggcacaccgaaggtcacacagcagtaccaggaaggtctcccccgggcgagctgatggagccgattaagcagccaattggtattcggagcagccagaggcccctctctgtctctgtaattaatggagtggctttttaaaaggattctaatcacccccgatcctatctgcttatcactagagttcctaattagatgatcctggcagtcactcagctaattccctccagccccctgcaggcctgcctggcctgggcagcccaccccacccccggccaccctggcccggccagatgggcagtttggggccttctctcccctcagggcccctggtcctctaactgcattagctccaggatggatgggcgacagcgatggatggatggacgggcggctggatggacagagtggcaggcgaatgaaggggctgaacggtgggcagtcacagagtggatgggcggatggacagacagacgggccaaggggcagatcccacagtggggaagagctcagcctgtcaggtgacacagcctgggttccaaccccagcactgccactccccagccatgtgtccttggggaagtcaataacctggctgtgccccagtgtcctcatctcatctgtaaaagggaagtaatgatggtcccctctcacagggttactgtgaggagctcagaatggagaaggagctgtgtgtgcgtgtgctggcatcctggcagtgtcgataatgggtgggcagagacagatgaaagggcagcctgcctggtgagccagtggaagccatggtaggcagacaggcccatggcaggcttacatgcagattggtggcccatggggtgggaaggcggtgggctacgcaaccgtagaagggccagtgagctcacgtcctccccagtggtgccaggg

SEQ ID NO: 315571 - DNA, 4001 bp, Homo sapiens
acagccttgtttcaattactaatttaaagtacctcaatcagaagcaggggaaaggtatgtgtagcagaaacctcatattcacctgtgtaaacagaactggttgaggaatgaagccaaattagttaaaacacatcttttcaatttcaaccctaatttgggacctattgagaaccggactccactatcaaccttttaacaaatttaataaagccagtattgttacagtccacctgggcaaggcaaccatcttctatttatttgtggataaagttaaattattccaaacaattcattcacttattaatattttattttttagcttaagtattttgtttacaactaagcttgttaacaatatataacattaatatattttagactatttattactaccactttagaaaaagaggaatattcattgcctctcagtggaatacaaatgctgatattttccatgaactgaactctagccttaaggttctttacattcttatttcttaataatcctctgactcctcttttcctcccttaatatgttctacttcctgttttcaaacaaggagtataatgtaataatttctacacaaggacgtgtgttgcctgaatgcattgtgatactaacagcacaagccaagtctgagatatagtagcttaaaaagcgtttcacattacacaaaatgtgaacaaggttttacgttatatgatagataagccaataaagtactttccaaaaatcaaagaactgtgttctggataccgaatttctgacaagtggtttctataaatttatttttttaaggcaaattctgtttcatactcccataaactcaaagtactggtaatatattataaaaccttatcactgtaattttccctgcaggcagtagtttcaaacctagaaacctatcaagtccataaactgagaaagaaaatatagtaagaaagaattactgggggcaggttctgaacttctacttttttccccaagacactgtattacaaaaggctcaacataactgtacactataaagcccttcatagaggacgcaacagcatcaggtacagaacctcctttttgagggaaatcagaataacgtaaaagggaaaagcagagggaaaatgagaaataattactttgggagaccaccgccacattagggtgaaatctttacttttttcccccctctaagcaacggacacaggaaacaatcttaagacaaacgtggttaacggaacacgctacaaaaggagaaaatttaagggaaggcactcttaaacatagttaagtatcaagtgattaacagccacttcactgagcgtctaagtcctactttacccactccaaaggccacattcaaagataaaatcacagcagcggaggaaaggccacgtgaataagctgccttgcaggaaggaaaagccttaggggagaaaatgattttagaaaaagtactggagaacagacgacgcggatgctcatttcctaacaaaacgaaacaaagcaaagaaagtcagtctgcaggacttgttcggaaggagggtcgctgacccaaggaaacaagagttgccggcatccagcaggaagggtgctcagactaggagactggaagggaatcccgagggcggaacccacaagggaatgaagagcctgtggggtaaggatatgttaaggcgagtggaggagcgtactaggtataaaacaagcaaaaaaaaggggtggggctggacagggcagcgccctgagctaatgtcactcaaagccgggggggcgtccaacgaaaggaaccagaccagcagcctgggggaagggtaatctgcttccttagcagctgcaggctgcagcagccaagaccaccccgttttccctgccctgagccccacaaagtccccacggcgtgggaagggagtaaggcagagccccagagcccagtgcccggagtcggctttaccttcgcgggaggctggagaggctccagccctagctcctcccgccgccggctcagcttccagagtgggatgaggcgccctccggcctcctcaccctcaccacttcccctttcccccgccggggccctgcagctccgctgccgcgggttcctggtgccgccgcggcgctgcctccccgccccctccgcctcctccctctgcctctcagagtttcactctggaggccgccatcttcgctcaggctttgagcgagcgcgctctaatacgcctgcgtcgccaccgcccaggctgtcacgagacccagtcagctgatttcaactcttccgtcttctgccccgccctccccgtcctccccgtcccgatcgttctttccctgaaattctgctttcctccggccagcccccagcagctacacatgcgcagagtaacgacaccggccgtgggatttggattccacgcagcgcgtcagggggctggcgcctcggtgggtgctgaaaaggacacgcccctgggcgcgcgcgggtgcccatgaccacgcccctccggcgggtgcccatgaccacgcccctccggcgtgtgccttagggccgcgcccctccgcttatgtcctgcggagagtagggtcgcaacccggtacttaagctttaagtccgaggaaatcttgttttaaatcacctctttttagctcttgccgtcaagtgccatggagcatctgcgaggcagtctgaagcctcagcctatctcctggtttggctggattgggagccagcaggttcatttactattgagacgtcctgaacgacagcagagcagggtttaagttatggatgctctggaaggtctcagagaccaaattctcagagacgcctaaggcatttgcaggtgggaatgctggaaagatagttctggtagccccatttattgtgtccggatcaagtgtttagaagtttacttaaagctgcttaatcttcaactctctgagatacgaatcatcctcgttttgcagataagttgaggcccagcctcagagtagtggatttcatgtttgcacccaagtaatttgaacccagaacctgtgccctctagataaccatcttcctgaacctcacctgagagggaagtcagggcagtgaaaagaggggatattgggactaaaggattcggctagaaattatgtgttatctgtgggcaatggtttaaataagaaaggtcaatgtccactcccagatctgagccgtaaagaccacagtttaaaaattagtgattaaaaaaaaaatagtgattctgctgcagacttcagagtagaggcagtgtagggtgacctgcatggatacattattgtataagggttaaaggtctctgataaggagttgaatactcattcttcatggcagtcctgaaattgtgatttcttggcgtccccttcagcaagttggctcattttatagacagcgattgcaggatgaaaaaatgtggaaaaatggtttttacagactttacctcttgattctattaaccctttgccctaccttagggcggaaaaagactatttgtgtttatccttagacttttctgtaatgcagcagtaagataaggtgcatgtaagggaaggtactaggaatagctgggtgtgggaagacagaacccgaaatagagtaggaagggaggaggaggaaaaagaaacaggagggctgtgttaaggggccttattggcttatcccatggaaacagaaacgtgtttatgtggttacaaagccttccagtaatcccaaaagtaaatgtggggtatattatttcgattttagagaagcagcagacccagagagtccaggagacttgctaaaggtgacctaactcctaaaggttgagccaagattaagacacagggcctgcctgtaacatcaaggccagtgaactgttcaacctccacactgcctctctgttcaatatttgagaccaataaaatcaattctcgtgttgagaggagccttaggcatcatgaattgtccccatcctctgtagtgcaaaattgcctcacaagacatctttttcca

SEQ ID NO: 315572 - DNA, 4001 bp, Homo sapiens
aatcacaacatattcaacaggtgatcacagccaaatctattcttaactgtgaccacagagagtatgaccataacatcaagccaaaccctatagcctaattaactagagtgctacctatgtatgatgtttgggagtgccagggccacatggtcagatcggatcactttagaatcatatacctctgtgtgtgcgatgcagagcagatgaaggaaaacaagaatatgtacagatgatgctgaaggtgatggtatgtgaaaaagtgaaacttgggtctagtggggtactagaattgtcaaaaccccatccaactctgtcacatataacatctgatgtttcagggtagcaccatcacaaagttcagaacttctatactctccttgcaggaagcaggagaatgggtccaaagcaatcacttagaacttcatggatatttggaaatttacccttccctaagtgtggctctaggtttcaaatagaagcagcaaagaattaacaaagtcttacagattttggtaggctttgaaaaacttgttttacttgaggctccatatgcttcatggcttgcaaaacgtaacggcctaaaaccaaaagcaacagaataagtaaactaaatctccaatctccccgacttcacttccatccccaaaccataaacaaacctgcaaatcctgcagcagcaatggtcagtccaactgctaccactgtactggcctggtaagggggagaagagtaaatatttacttctctaattcccaccctttctcattttgcccattcttccatccccaactcattacaaactgcattttaataggagaaacaacttttttttttctttttttttttttttttttaagagacggagtcttgctatgttgcttaggctggtcttgaactcctggcctcaagcaatcctcccaccttggcctcccaaagtgctaagattataggcataagccaccatgcctggcagagaaacaacttttaaggcggaaatattctgtccagtaatctttaaaactactgcatctgttatgctgaatgcattaaagttacaggattcatcatatgggaaagagggcaagttcgacttgcttatttatctttacaatagtgaaaaagatgattccctccctttgaaaacttctttcatcaccagacaaattaagtcacattaaagttcaatcaaaagtagtggaaataggccaggcgcggtggctcacgcctgtaattccagcattttgggaggcgaggcgggcgtatcactaggtcgggagatcgagaccatcctggctaccatggtgaaaccccgtctctactaaaaatacaaaaaaaaaaaaaattagctgggcgtggtggtgggcgcctgtaatcccagctacttgggaggctgaggcaggagaatggcgaacccgggaggcggagcttgtagtgagccaagattgtgccactgcactccagcctaggcgaccgagcaagactctgtctcaaaaaaaaaaaaaaaaatgtggaaataaggtttctgctacagaaggaaaaactgtttacagacggctcctgtaaaattctaacaacgcattttcgaggctaaacgtgggctaaactaggagactaatacctttggcactgccctgttgtttcctaacaagacaggcccaaatatgttcaggaagcatggagaagacatctgtcagcaaaagccaaagagaaggacatagcaaagtggagctagtgctgtgaagatgtgttagggcaagggcacttataatcaaatacgtttccactaatctccgagtccatgacagcctctgaccttacaggagttccaggcaagcaacacctgcagagcccgtgcggacaagaagctggagaaccgtgcagaaagacgatgtaaaaacacaaacccccaagagagcgagccaacagggttgtgtcctggtgagtgtgactccccaataaccgaaacctcccgcccgcagtcgcactaaggagcacaacttcaactccacacctccgaggcggggagctgaggttgaggcctgggccggaggtcgccaagaagaccggaaggccgcactcaccatggctccggctgggctcccttgcttccaccgggagcacggctcatcccagctcagaggccgcggccaacacctgcacgcctttaccagagagcgacgcaacccccaacctcaagcacaggcgccctacgcaacacggcaggagcagccgcaaactaggccggaaaactgtcgtaaaaggggacgcggaggagaaggaaagtcgctcaagcagtggacagagcggagaaagcgacttcgggttggttgaagggtgggcggatctctttatttctgggtgtaggggtggggcttctctgtgttttctgtcctttgctcctgggcggtgggtatttggaaattcttgcagggaagggcatgggcagccttactcagaccgattttttccccctacatcttagcacctcgttttgcctttattttatgttaataattgtcaagggtaatgaatgtagttaaacatgctgtgacatttccaccacgaacccaaacaaatatgttgtaacccagtgtaggaaacgagatgcccagaaaaacaaatgaaaccaaccacactgtgtttcagggattgctcggtagcattttttaatgtaaaagaacttcatttaaggatgtgacttgacaagactttgtgaatatttgggttttcgttttgtagaatgggattaaagacagttcatattctgaacatggaatgtcaagatcctacaactgaaaagggctatttaaaagttttcctcctcacccaaaataaaaagtagggctggattttgcccttacgtggacatcagtttcatacatccctacataaatgcttgagaagaaaaaaataatggagacaataatggaattttacaatgcaacgtttgcatgatcaaaataagtttggagttacttcccactcagaatttacagtgttaaatatccgtttacattgcaatgcaattctgctttgatgagtttgttagttattaaacaaatatgcaaaatttttgggtttgttttcctcatctgtaaaagcagtttgcatttgataatccaagagctcttctagcgctaaggtttttgtgatgtaatttattgtcaacacatgatttaaggtgacatccagcactaagacactagcattaagtttataacttcctcttttgcctctcttttatctggtttttacccaacaattacaaaataaataatcaagtgaggcataagaccttgggaccaaattggcatcaacaagctagaatgctatctggaaaaatttattatgcatatttttggtatgtacaaactgtgtaatgcagtttctggaggaatagatttacagtagactctaattagctttgagactttacaaaacccagactcaggaaattgggagtagcaacacagcaagacattttgttgagctggagatagctctttttttggtggcagatcaaactggaggtaacctggctctgtcacttactaatactgtgacttggaaaagttatttctgattgagtttcttcctcatttgtaaaatgaaggtaatgataactaccttgccgagtttttgtgaacgtagagattatgcacatattgtgttctgcttatggtcatcactcagtgtggggctattattatgagggaagccagagtgcaaattggagtgtagaagccttcctcattctcatgatacctcactcatgaatcttaagtctggttgcctcttacctacctgccaagatcctagaaacagccttgaaaagtaatctttttaaatgtccactgactgatgaatggataatcattcctcatttcttctagcttctggtgactgccagcattccttgacttgtgactgaatcactgcagtcttgtaagccagcatcttgaaatctcactctgctccaacttttccatcttcacattgtc

SEQ ID NO: 315573 - DNA, 4001 bp, Homo sapiens
aaagtgaaacttgggtctagtggggtactagaattgtcaaaaccccatccaactctgtcacatataacatctgatgtttcagggtagcaccatcacaaagttcagaacttctatactctccttgcaggaagcaggagaatgggtccaaagcaatcacttagaacttcatggatatttggaaatttacccttccctaagtgtggctctaggtttcaaatagaagcagcaaagaattaacaaagtcttacagattttggtaggctttgaaaaacttgttttacttgaggctccatatgcttcatggcttgcaaaacgtaacggcctaaaaccaaaagcaacagaataagtaaactaaatctccaatctccccgacttcacttccatccccaaaccataaacaaacctgcaaatcctgcagcagcaatggtcagtccaactgctaccactgtactggcctggtaagggggagaagagtaaatatttacttctctaattcccaccctttctcattttgcccattcttccatccccaactcattacaaactgcattttaataggagaaacaacttttttttttctttttttttttttttttttaagagacggagtcttgctatgttgcttaggctggtcttgaactcctggcctcaagcaatcctcccaccttggcctcccaaagtgctaagattataggcataagccaccatgcctggcagagaaacaacttttaaggcggaaatattctgtccagtaatctttaaaactactgcatctgttatgctgaatgcattaaagttacaggattcatcatatgggaaagagggcaagttcgacttgcttatttatctttacaatagtgaaaaagatgattccctccctttgaaaacttctttcatcaccagacaaattaagtcacattaaagttcaatcaaaagtagtggaaataggccaggcgcggtggctcacgcctgtaattccagcattttgggaggcgaggcgggcgtatcactaggtcgggagatcgagaccatcctggctaccatggtgaaaccccgtctctactaaaaatacaaaaaaaaaaaaaattagctgggcgtggtggtgggcgcctgtaatcccagctacttgggaggctgaggcaggagaatggcgaacccgggaggcggagcttgtagtgagccaagattgtgccactgcactccagcctaggcgaccgagcaagactctgtctcaaaaaaaaaaaaaaaaatgtggaaataaggtttctgctacagaaggaaaaactgtttacagacggctcctgtaaaattctaacaacgcattttcgaggctaaacgtgggctaaactaggagactaatacctttggcactgccctgttgtttcctaacaagacaggcccaaatatgttcaggaagcatggagaagacatctgtcagcaaaagccaaagagaaggacatagcaaagtggagctagtgctgtgaagatgtgttagggcaagggcacttataatcaaatacgtttccactaatctccgagtccatgacagcctctgaccttacaggagttccaggcaagcaacacctgcagagcccgtgcggacaagaagctggagaaccgtgcagaaagacgatgtaaaaacacaaacccccaagagagcgagccaacagggttgtgtcctggtgagtgtgactccccaataaccgaaacctcccgcccgcagtcgcactaaggagcacaacttcaactccacacctccgaggcggggagctgaggttgaggcctgggccggaggtcgccaagaagaccggaaggccgcactcaccatggctccggctgggctcccttgcttccaccgggagcacggctcatcccagctcagaggccgcggccaacacctgcacgcctttaccagagagcgacgcaacccccaacctcaagcacaggcgccctacgcaacacggcaggagcagccgcaaactaggccggaaaactgtcgtaaaaggggacgcggaggagaaggaaagtcgctcaagcagtggacagagcggagaaagcgacttcgggttggttgaagggtgggcggatctctttatttctgggtgtaggggtggggcttctctgtgttttctgtcctttgctcctgggcggtgggtatttggaaattcttgcagggaagggcatgggcagccttactcagaccgattttttccccctacatcttagcacctcgttttgcctttattttatgttaataattgtcaagggtaatgaatgtagttaaacatgctgtgacatttccaccacgaacccaaacaaatatgttgtaacccagtgtaggaaacgagatgcccagaaaaacaaatgaaaccaaccacactgtgtttcagggattgctcggtagcattttttaatgtaaaagaacttcatttaaggatgtgacttgacaagactttgtgaatatttgggttttcgttttgtagaatgggattaaagacagttcatattctgaacatggaatgtcaagatcctacaactgaaaagggctatttaaaagttttcctcctcacccaaaataaaaagtagggctggattttgcccttacgtggacatcagtttcatacatccctacataaatgcttgagaagaaaaaaataatggagacaataatggaattttacaatgcaacgtttgcatgatcaaaataagtttggagttacttcccactcagaatttacagtgttaaatatccgtttacattgcaatgcaattctgctttgatgagtttgttagttattaaacaaatatgcaaaatttttgggtttgttttcctcatctgtaaaagcagtttgcatttgataatccaagagctcttctagcgctaaggtttttgtgatgtaatttattgtcaacacatgatttaaggtgacatccagcactaagacactagcattaagtttataacttcctcttttgcctctcttttatctggtttttacccaacaattacaaaataaataatcaagtgaggcataagaccttgggaccaaattggcatcaacaagctagaatgctatctggaaaaatttattatgcatatttttggtatgtacaaactgtgtaatgcagtttctggaggaatagatttacagtagactctaattagctttgagactttacaaaacccagactcaggaaattgggagtagcaacacagcaagacattttgttgagctggagatagctctttttttggtggcagatcaaactggaggtaacctggctctgtcacttactaatactgtgacttggaaaagttatttctgattgagtttcttcctcatttgtaaaatgaaggtaatgataactaccttgccgagtttttgtgaacgtagagattatgcacatattgtgttctgcttatggtcatcactcagtgtggggctattattatgagggaagccagagtgcaaattggagtgtagaagccttcctcattctcatgatacctcactcatgaatcttaagtctggttgcctcttacctacctgccaagatcctagaaacagccttgaaaagtaatctttttaaatgtccactgactgatgaatggataatcattcctcatttcttctagcttctggtgactgccagcattccttgacttgtgactgaatcactgcagtcttgtaagccagcatcttgaaatctcactctgctccaacttttccatcttcacattgtccttctcttctgtttgtaaaatctccttctggtttcctcttaaaggatatatgtaattgcatttaccagctacccagataatccaggataatctccccttcttaagatccttaacttaatcatagtttccaacactttgccatataaggtaacattcacaggttccaagtattaggacctgaaatctttggaacacattatttagtttactatagaaagtaataaaagacaaaagagggggtagggacaaaagaatg

SEQ ID NO: 315574 - DNA, 4001 bp, Homo sapiens
ccaagatgggcagatcacctgaggtcaggagttcgagaccagcctggccaacatggtgaaacccgcctctactaaaaatacaaaaattagcacctataggaggtgcttggtcaatgggcgctagggataatcctattctgaatgcctggcattctcgggtgactgtgagtgccctgtagggtagctcttgcagtgttttggggatggcctcttggtaggatggggagggtgaggcagccttgacaaggacttcggacatgctctgcaggacacagctgctcaggggagatgcagagttcaagcccccatgatggactcaccaaggaacaaaaagacagccgggtttcatcagtgaggaaggagatgggaactcagtggctacccaggctccacgggccatgtgtgaagtggggaaaatcattgccttgcatgtcagggtttcccattgaacaatcttgtcatggctcccacaggcttggcattgctatcctggctaaacaacaccatctagaaggccttggttacctcccaaagggcagggccacctgggtctgagaggctcgtccaaggaagaacagagcctgccagtcctcactccaatcctccttcccagtgacagcaacagcagcggctctggctcatgaatacccaccttgctgcaggctctgctgggtgcctcaggcaccctgagttctcttcaccagccagtgctacaggtggtatttggatgtggtcgccattttactaggggagctggtggttcagggaggggcagggcctcccaagctcacaagtctggtaggtggaatctggacccagggctcctggcccccctaccacaccatggtgtctcaggtttcctaaggtaataagtacctttccagagtcctgggaaagggttaagttgccagcatcaaaaattaattaacctgtaggataaagggagtcaattgactccagagaaagcaagcagtgtccccggacattgggtatatcacccaaggaaagcgtaagcgaaagtggaaggagtggggaagtagaggagagggagagaggaaggaaggaggagaagaagaaagaaagacaaagagagggagggatgatgaggatgggagagagaaggaaggaaggaaaaaagtaaggaagggaaaggaagaaagaaacaaagaaaaagagaaaggaagaagaaagaaaagacagaaagaagaaagaaaaaggaagaaagaaaaaggaagaaagaaaaagaaagaaagaaagagagaaagaaagaaaagaaagaaagaagaaaaggaaagagagagaaaggagctgggctttgctggtgaaaaggagtagctgtataaggttacttcatctttctttgttcatcacctctacatggggagtaatagtccctcttcataaagattatgaagtgaaaccatgtgcttatagtgcctgatacaggcattcaataaatagcaataaaaatcataatggctaacccttatctggaacgtataatgagccagatactacattaagagctttccatttgccaactcctgtagtccccccagcaaccctggagggaaccattgttatcacccctgttttaagatgacggcaggaggtacagagagttgaagtggttattgttccaagccagcttctacattccccctaagggccaactttaagttccttgagtctcttaaagtctgcagacaggagagagggtgtgaggggtgtctgggatcctcctcccaggaaaggggctcaccttcacaatgacatccatggcattcttgtcttcctgcttgctttccccaaaggacctgacgttgaaggagcagatcctcatggccagggcgctgtggatggagaggaggagaagcagcagtggggccagctcccgtgacatcctggcgctgctctggcttcaagactctgtgagaagacagcagtgcttggagtgctggattctggccacttccgcaggctccactgacttataaagcctgcagataacaggaattactggatttctccttgcaactttcagttctctgaggaactgaagatcatgggttttaatccccaaggaaatacagatacattgggctagcctttaaggagcccttatgttcgtcaccctggtgcagaaattggcatgcctcatttaggcgccatcctccacaaagtcactcatatcccaaccgggagccagctctgacatctagtcatcggtcttgcggttgcatgccatgtgccttttcctgacagtggatgaactcggaagtggtccaccctagagggcacctggggtgacggaaccttctgctgggggacaatgaggcaggaggcatgggaaattctgctcggttttctctaaatcactgggatttggcggcctgctgtcctcagacacacccagactgtgactctaattgccctggtggtgtaaagtaaggtcaagagtagtttgaattacttaatttttttaggcagctttaccgtacaaatactaggagtgtgttgccagagaaagcaattggggatctgatggaatggatgaggaaaatgtccctggactctgcgagcaaatagcccgtgaaacccatggagagacccgtgattgaagctgatattaatttaatattggcgagagttgtgtgaccctgggagagaaaggtcttgtaagaactgtaggatatcaactcaagcaaaatgacttttagagatatgggcaggaaactatgaagatctgtaaagcaaaaaaaaattaaaaaaaaaagcaaaatccaatcaaggtatattaatggactttggcaaagacaattctgtgaaaagggtagggaataagaataactccaagccagcatcgggatctgtggaccaacccctcttgtggtgatgggtctgtggccacagccacagggaaaattatacatatatccccaacatacatccaggcagcatactggccaagcatgccaggaattctataagataaccccaaatagtacatggaaggaaatggtttcctgagttcgtgctgcaatgaatctccctgttgtctgcaacctaagacctcaggcctggttgaatctctggtaaaggtggctctgggccgggcgcagtggctcactcctgtagccccagcactttgggaggctgaggtgggtggatcacttgaggtcaggagttcaaggccagcctggccaacatggtgaaaccctgtctctactaaaaatacaaaaattagccaggcgtggtggtgggcgcctataatcccagctacttgggaggctgaggcaggagaatggcttgaacttgggaggcagaggctgcagtgagccaagattgcaccactgcactccagcctgggcaacagagtgagattccatctcaataaaatacaaaaacaaaaaaaaaggagctctagggaatggttaattgtctttcttggtgaatgggcatcttccaaccagaaaaaagatttagaattaaagtgtagaaatgtttaagagactcagagccatggtatactctttttgtgtgttttaagatggaatatgcggtatttcatggacttaatgagagctgctgggccaactatatagaaaatcttgtaactctcttataaaatgtgcacttggtagggtttgattcaggttcatgactttacgttgaaacctttgtctgaatacagttctggaacatttataaacactttaggttatcatcaatgttttgtttgtttactttattagaattcaaatgatttagtattttttaaaagtagcttttttgttagttcagacaattgaagaacttttaaaagaaaatagggcatattaaataaagtataaaatgtttataaattggccacaaaccccttataagtaattatttaggtttgttgggtttaggattggcagatttaacaaataaaaatatagaacagtaggtagatttgaatttggggtagttcgtattcaattgggcaacttttattt

SEQ ID NO: 315575 - DNA, 4001 bp, Homo sapiens
agttgcttggtttggtagaaaaggcatctaagttatgctaaaccacagctgctatgaaaatgtcttcagtgtaactgtctctctcatttagcaagcattaagctctgccctgagcccaatgctgtggccctccaaagggaataacaatttttctaaagctaaaaacacaatcctaggaatgcaagaatttcgttgcatcttgctgggaaaatcacacaccaaatcctagtgctttgagattcacatgtacctatcttgattaccttgcactggctctgtctcagaacacacttagtgttattagtctaaatactaagggaaaagaagaaactattaagcattcagcacgttctcatttcactttcacaatcctgtaagataggtaaacattatccccaatttatacattaataaaatgacgttaaatgatgttaaattacttgcccacaccaccagtaaagagaagctaggactctgaattccactttgtccactattcaagggctcctccccccacgcccccacccccgccaaaatagggctcctcccccctccaaaaaaatcaatcatggggtgccactggagagttgaccactcacatcaattatttgttattctagttcagcagttctgggagcgagttatggagaagataaaccaccaactcctcacttcacagaatcaactcagtattcagggaatactctaagagaaggggtaaaatgtccctagaggtgaatcccagctcttcgcatcatttctcaattccttctcaatagagactctaggaccagagctccctttatcacctccatcctaacatacctaattgtttcagaaagttaccttttaaaacaagatcttctaccagaatagaagacctctctgctggtcctcgaatttaaataaattcaattttcacacgataacctgcctgatagcattccaaaacattcgttaccactgcagtttcaagttattttgtagtgaattgtgaactaaatcttgattaaattgcggtaaagatgggaaacaaaaatctatgtttagacaggtttcctatctaaaattttccattacgagcttaggaaaaacaaaacctgtacactcaacattttaaatctgtttctaactgaacaagatgataggtgatgcaatgaggcttaactctatcatgtaattgccacaaaacactaacattgtaaaacattcaatactttaaattactgaatattctttttaaagaagttgaatattgtaagaattatttagcttctggagtttaacacttacaacattaaaaaaaggtttctaagaggaataaggtctcatctgaaaacagggtttaaaaaaaaaaccgtataaacattgatacatgtccaaaaacatttcccatcgtaaggtattatttctaatactaaaggcaaaacaaattaaaacagatcaaacatttgcagtcaaatgtccaaatttttgaactgggaaaatgatgtcaacgtttttcatccgttttcttgtaaggttccagatcaaaaataaacagccatcgggctcatcaattcaggtgcggaaactcattaaaatcgagcttttggaggggagaaaacatattcccagaatttggtttatcgggtaaaattgccccgtggcccacaccagaaacctcgggcaactgcccgggccttgcccacccctcccgcgggccgcacctgccaaggccgcaccgccagcgccccctgccgccctctctgcacagagacccgcgcccacccccgcacccgcacccgcacccgcacctgcccccaccccgcgctcgccccgcgccgaggccgcgcagcctgcgggcagtggcgggggcacgaggatgcgaatccaggcggggccgggagctgggcgcgtcccccagaacccccgccacggccaggcctgagcctcacctacctacgccgtatttctcctcctccgtgggggtccacatggccgtgccgggcgcggccccgcgggcgcggcgaccgggcgacaacgcggcggggacggccgcgggcccggctgtggcgcaccgcgagtcgaggcggggacggtcaggcggcgcggggcagtgggcggcgcatccctcacaggccgtccgggatgccgccgccacccccgccacgtctggaccgcgaggctccgcgggtggcccagcagcccctggcggcgcgggcgaaggctcgccacctgtccgtcgccgctgctcccgtgccgccgcttgcttcttcacagctccgccgcccggctcccggcgccgccgcggctcggctcgccccagcgggctcgcaggacgcccgcgcatgcgccactccctgccgcgcaggggctcgcgctgcccgggctcgcgccgtcccgagcccgcgcgcgaatccacgcgccgctgctgcgcgccagcggagggaaatccgcgagaagctattggactgcccggccccggaccggcttctagaatcgctggtccggggccctcagctgcagcaaaccccggagggggcgaagccggtcaggtgggcgactccctctacccggactccccactcgcttccgcttccagtgcctcctgcctgcgccccgagatggccacaggcctcctggtcggagaggggagatccagaaaaggaggacacgacaccattttcagacccatcccagtgtcacccacagtgctgtcggaaaggtccccggagccaccctgtgcattcccagggcccgcaggatggagtcgccacgagggaaccaggtggggtgcactcgtgcccctctctcctggatcccctgtgggctgaggccgctgacacctcctgggttcttgcttctctgagatggcctgagtggtgaatgtttggggccagaacaatcaacagccgccttgctagtaaggaagagcttcattgggcccttcgtgttcctacccaggacacggcatctgctgctcctgggtgtctgcctcccttggagccctaagaactggctcctaccggaaactttcctcctctctctcctccctaagaatccattcattctgatgcctgtaaatgtcaccttgtgacccccaagtcaaccacttaccaaagaacaggaactgcaggacttctcctttccacctacatttggaccacatgctctaatcccagcagatttgcccatctctgtcactagcactactaagtcaaaaccctggtgtcatccttcactagcactctcagacaccaccactcttcaaagcccagctcagcccctcacctccaggaagcctgccctgacccatagtctcctttccttctttgtctggaattggagctatgttcggtttgtcttatttcccttataagactgtcagctcccagaaggcaagctccaggctaaaatcaactttctaaaccctcaccaccaacccagcacctgttgtatagttgttgcatgggaagccagactaatagaagaatatcttgcaatcaacagatcttgttgattcttcgttcaaagtgtcatgattggtaactcctcccaggcctgactgtgctcccctgggttatggccaccccttcccaccttcggacctttaggctcctcctctcactaatcatagctgcccactcccgcccagaaaaatgtctgttctgtgaatgatagaatttctcaatagccaggtacacttctttttaggggtagcaggggtgtccaagaacataacgaaagagctaactgttccaagaagatagacccctccccggtggccaccatggaagtattctatggaatgaagccacattcttacaaaactctccaggtagctattcaacaagtggggctgagctacgcaggccttcagggaacaaccttaaagctcttatttcatcctctaagttcactcccttgtctgctgtatgtgatgacagtcacagagcctaagggccagtttttccaaagtttatactcttgttcccagtctgaatccatcttagattatg

SEQ ID NO: 315576 - DNA, 4001 bp, Homo sapiens
gttttcctgtttctatgcttgctctctataggctactctgaacacagcagccagaatcattttttaaaaaacttaagttggatcatagcactcctatgttcaaaaatcccccaatggttccctatatcactcacaacaagagcctaagtccttaaagtgatccacaacttcttacgctactctcatcctgctctgctctggtcacactggcctcctttttgttccttgataaaatcaggcatgttcctgtcttaggtccccttcactgaacgatcctttgctcgactctcttacctcataccctcatatgtacatggctcactccctcacctccttcaaatctttacctattaaggcctttctcagtaaggcctgccatgatcaccctatggaaaactgcaacttcctcccagaccagcactcctgatcttccttaccgtttgctttctgttgcagagcacattttaatacaagaatgaatcattatatttctaaattatagtctaaattatagcccgcttctctcatgaggctctgtgcctcatccccactttccctatattcattttggacttcatccttgagagtgttaaggtccttacctaagattccattccaagtactgaacaaaactttgggtaggagtgggcagtaataacattttttttttctattgtcaacatccttgggtgaaagataatagggcaactaaagactaaaatgaaattgtaaagctgcacctaggaattatatctcaaacaagataatgcagaattctgtgtataagccagcacgaaataccatacaattgttcccttcaaagtaagtctagcagctctaaacaattttaattacatattaaatagaagagaaatataaaaaattgtccactaaaataatctatatactttctatttaataaataataattttcactaaagctagatttatctctaaagctaaaataaattacgtaatctgaactttaaacgttttaatttactattcggctgtttatcaatggtgtttaaaacctgcctaaaaaaataccgcactttacctagcacaatgaaacattctcctgcactcatcactgacaagctgatctaagtccttgccactgacttacaatacccttcccccgttttaaaattatatcccttactttgtcataaatcacttttataatgagagagcagctaggacacgttgccacgtcttccccattctccaaatcttcctacaacgaaatcaaataccatgtggtcaggatagcttctcttcgccatctcctcccccaaacctatcccacccctagatgcaagtctcttggtggcttgccttccccccaaggtgggtgagaaccccagggccttcagcgagaaatgccgacatcattttcccctagaagcgtcacttaggggaaacacctaggaaggtcaggcgagcttcggtcgccccaaaagccctgggaaacaaaaaacgagtcccctcctcgacagaaatatcccaggttgggaccctaaggcagggatcgggcagagagacagaggctctccgccaccctctccctgacctaatctaaggccagaactgcgtgcctaccgagagagctcagggcattagttggggtggggggacgcgggaggaggaagattcagcaacgggaaagagggcgtgggtgacacagcgcagcaaaggctacccaatgatggaaggaacgggcggaaccaaactgcgcttgcttgggtgaaccgccgggcgggaccctgaagttaccttggtgatggagaagttatctccacatgggcagggatagaaatacgtctccgagtcctcgtcatattggaagtcctcgatttccacctcgtcatgaaacactgccatggtcagcgggggtggccgaaggggtaacgccccagcagtccgaggccagctccgagggtttaacttcgccggaaccggcctgggctcggcatcatcaggtcgcgccgggcaaggactagcccttccggcgcataggcaatgacgcaactccgccctgcgcggccaaatggataaccggtagcggtcaccatggagatggctgaactaggggcggagacactgggaagactgaaagcttgctcagcggggtcgcgcaccgctcctcctattgggcggcagcgaccaatagaatgtggggctcgcccgcgctgctacgtcacgtctgggaccgcggagtattccaggcgcctgcaactaaacgtggccgggtctgcaagctaggtgccagcggggaaagtttccctgcttcttatcgtctgctttaacgccttaaatagcccgctgaaggctgcagcaggtgctaggtagcagcctcccggccctcgggaaaggcggggtggggaggcgagagcagcttagcctcctcgacctcccttcctggtgacggacgaacagttcccgtagaatttcgcttcaccgagtgaccttgagcccagggcgacggtcagcttgttaattcctggctgcaggtacattccgcttcttcctcaccccagacgccttaaaataccctaaattgtgttgctgaaaggaccaagccctggaaggcagggattgagttctagtcttctgtttgccaggcttataacattattaacgacgatgatttttagtaatagtaataacatcaccttttattattgggaagttatgtgccagctattgcactaagtggaattgtcaactctaggagtttacatgttattccattttattaatctttaaactgaggtacagagagttgggcatcttgactaaaatcatacacctgggaaataatgaagagcttgtctgtctccaaagcccaggaacaaattacttatgtgagtaccagttttttcgttgtgaaagaaatggtgtcagtaggcaggtttatcagtgtgaggcctatgtatgccttgaagcgaaatgcagataaaaggcatttttgtcttgaaagcagtgctagtgcctgttttggtaaaaccgattacattgggtcttacttaattactaggcattttaatatcttagtagagaagaaatgcattgtagtgaaaaagcactttcgagagaagatctgggatcggaatcttgagttgttgattacctctggcaactggatatttacattctttgggccttatttcctcttctaagaaaggattggagtagagatgatataagatcctttttagatgtaatgttccacttttgcacggaaattatgagctttacttggttcagcaatgatatataacatttagtttacatttacgtaacacatatacataatatatccctgtgcacttttgaagaaaacattacaatgactactaaactttacatttattcctaaaagggcggatcacgaggtcaggaatacgagaccagcctgaccaacatgatgaagccccgtctttactaaaaaatacacaaattagccaggtgtggtggtgtgcctgtaatcccagccactcaggaggctgaggcaggagaatctcttgaacctggaaggcagagattgcagtgagctgagatcacgccactgcactccagcctgggcgacagagctagacgctgtctcaaaaaaaaaaaaaaaaaaaaaaaagaagtaggtcataattgtataatgcaaactatatttgatgagtgctgttgtatatcaggccagaaggagttgtttattggcaataccaaacctccacctctctaggttgtttgacaaggaagagaaggggtcaatgtattaggattgattttagtaacactgttgcttgccaggtactttggtagacattttatttattcctctcagtaatccagtgaggtggcgtgggtaatgttaaaatggcaagaggagacttgctgaagattagaaagcaggaaggagtcacacctgagcccagttccgctgatttccggtcaaatactctgtgtatactacttgtttaccactaaggtgtctttgcctg

SEQ ID NO: 315577 - DNA, 4001 bp, Homo sapiens
tgctatccaaatttgcatctgacattttcagcaacaccctggggaaggcaaggacagcaatgttaaggatatggtagtttacttctcttaacctgctttctccttttataagcaaatgtttccttctacttcctgttacccagatgagctcttgttttcctttcctcctctttttgccctccctcattttctggtaatgggataattttatcaattttataccctgtcttgtccattcagtgacaatgtttttttaaaaattaggctgggtgcgatggctcatgcctgtaatcccagcactttgggaggcccagggggggcggatcgattgagtccaggagttcgagatcagcctgggaaacatggcgagacccccatttctacaaaaaaacacaaaaattaggcgggcgttgtggcgagcgcctgtaatcccacctactcgggaggggttggtgggaggactgcttgagcccaggaggcgcaggttacagcgatccgagatcgcaccactgcactccagcttcgcgagactctgtctcaacaagtgaaagaaggaaagaaagaagaaaaaaaaataggtgaaacttgaaagaaaactgaaaatgacaaacacttgttgacaagttccaatggaatgaacagaatgttttagaacagttataagacgatattggtaacaaattacttattacgaagggaatggaaaaaagattcagagcattttacgcaggtattttatacctgatttatgcacgggggtatgttactcactgaaagattccagatttaaattgtgggggttggataacataatctctcttcgatctagttctaaatacaaatattaagcctgcaataatattgagctggttggaggagaaggatttggctgttcagaatagcaacaagagccaaaacaccaaggcaagtggtggagtaacgaaggcagaaggaacgatgcacttaggaattgctggagcctaatgttggacacggaatgtggcaaaatatgaagcaggtgttctcataggtcactctaagaagccagagcaactaaaggaaatttcattcaccaataatatggcagcactggacaaccaagtacctttacaatgggctttttctgtccctgggaaaatgatttggtccattaatctcaggacccagggtgaccatggtccatttaagttactagtgtatttaacacattcaaaatattgtctggacctggcacggtggctcatgtctgtaatcctttgggaggcctttgggaggccgaggaaggacgaccacttgagtccagaagttcgagaccagcctgggcaatatagtgagacctcatctctatgaataaataaataaataaataaatttacaaaagaaaaaaatgtagtctgaaaaagctcagcttcagtttactgaggaactgattggaaaaataaattatgaggccccaccccaccacccaagacatcctgaatcagatcatggagggtgaggctgaggggctgaggaatctgtgcttccacaagccctccaggtaattttttctttttttctttttttagacaggctctgacgcccaggctggagtgcggtggcgcgatcatagctcactgcagcctcgacctcctggactcaagcgatcttcccactacagcccatgccgtcccacccccgcccctccccccacactccagtagttgggattacaggcccgcgccaccacgccccgctaatatttaaattttttgtagagaggagacctgggatggaaggagattgcggggacggagaggatgtgggtagggggcctcactgtgttgcccaggctggtcttgaattcctggctgagttcccagactcaagttgatcctccctccgcagccttcggagtgggtgggactacaggcctgcaccgccacgcccagccctccggacgattcttaagctcctgaagtctagaagccttagctagatcaggccataaacaaagggctttggagacaggcagtccgcggcagataatgatcggaattccggctcctcccttccagggtggaacctgaatgcagccctctaagatgcagccaggaaagcactccgcctacccggttgggtgtggcccctggtgctttgaatgggcaatttagaggaaagctgacctaatggcctgagttgatcctaatgccttaggtagggacaggatttcgagtgggaagaccatttcattaccatgttttcttttcttcattgcattttttacaatataatcattttaggccgggcgcggtggctcacgtctgtaatcccagcactttgggaggcggaggcgggcggatcacctgaggtcaggagttcaagaccagtctggctaacatggcgaaaccccgtctctactaaaaatacaaaaattcgccgggcatggtggcacatgcctgtaatccgagctactagggagactgaggcagaacaatcgcttgaacccgggaggcggaggttgcggtgagccgagattgcgccattgcactccagcctgggcaacaagagcgaaactccgtctcaaaaaaaaaaaaaaagtaagaaaatctatgaaaatctatgggaagaatctatattggaatagcttagggaaactttagagaagattacactttttgaggaagagcttaccagtcgtggaagtagtcaatacaaacagggaacagactccctagctactcgggagtctgaggcacgagaatcgcttgaacccaggaggtggagattgcagtgagccaagatcacgccactgcactccagcctgggcgacagagagagactctgtccccccaaaaaaaaaaaaaaaaaaatcttatttgttttcctggggttttttccccagctttttgagaatgttttattatgggaaggttcaaacatgtacaaaagtgtgtctactttttgtcatagtaatttacttacagccagtctggttacatctaaattgccgtccattcctcctccatgggttattttgaaacaagtgccagatcgcctatgatttcgttcataaattcagggaaaaggccggtgccatggctcacacctgtaatctcagcacgtcaggaggccgaggtggcaggaacagttgagcccaagagtatgagaccagcctcggcaagatagtgagatctcattgttaccaaaaaaataaaaatgaaaataaaaataaaataaccgggcgtgtgggtgtggtgagacatgcctgtggtcctagctactcagggggctgaggtcagaggatcccttcagcccaggagcccgaggctgcagtgaggctgtctcaataaataaataaataaatccagggggaaaaaatacttcgttcctattataactacgatatcctttttacatctaaacataatttaaaaaatcattatttaatattatcaaagtattcaaatatatgttatgttcaaatatccagcagtattcaaaactccaattatctggctgggcaccgtggctcacgcctgtaatcccagcactttgggaggccaaggcaggtggattacctgatgtcaggagtttgagaccagccggccaacatggagaaaccctgtctgtactaaaaatacaaaaattagccaggcatggtggcacgcacctgtagttccagctactggtgggggctgaggcaggagaattgcttgaacccaggtggtggatctcaaaaaaaaacaacaaaaaaaaaactccatttatcttatatatttttctcttccctcattttcttttttttaacaatctatttgaatcagcgtccaatcaaggtctgtgataaattgaaataggccttaaatttttctttataagttatctccatctgtttttatttatttattttaggatctcactatgttacacaggctgggcttgaactcctgggctcaagcaatcctcctgcctcagcctcctgagtagctgggataacaggcacatgccatcacacgcag

SEQ ID NO: 315578 - DNA, 4001 bp, Homo sapiens
gcctgccaccacacccggctgaatttttctatttttagtagagatgggggtttcaccatgttggccaggctggtctcaaactcctggcctcaagtgatccgcccacctcagcctcccaaagtgctgggattacaggcgtgtgccactgtgcctggccttggccttccttttttcattcatttaattctcatagcaatctggcaacaattacttctcagacacagaagctgagaatcagaggtaacataaagacacagattaggggtacattagatataaattaaaatttaaatataaaggctaggctccgtggctcacgcctgtaatcccggcactttgggaggccgaggtgggctgaccgattgaggtcaggagttcgagaccagcctggctaacatatcgaaactcagtcactaccaaaaatacaaaaactacctgggcgtggtggtgcgtgcctgcaatcccagctaatcgagaggctgagtcaggagaatcgcttgaacccgggaagcagaggctgcagtgagccgagatcggctactgcacaccactctgggcgacagagtcaaactcattaaaaaaaaaaaattaatataataaaatttctcctaaatctaaatccttttcttcactttcagggtggattactggacaaattaacatttgtatggcatttttacatctctatagcagttctacattttgatttgaaatttatatttgcataaaccttacaaaaagtactcactttggacctcacaaaagacttaaaaccgagacagttaaaaatgacccagttcaagtcaagaggacctgagagcgctcggatatggccgttcagtgcctgtgcaacgtcttaaatcctctcttccttcagtttctgtctgcattgttcccaatgtctggcttctgattactcctaggtcctaaggacgctgggaaaaggggacgaattcattctcagcaccctcggtttaggatctgtgtccgtctaaaggaaattaaggggtttcattcttttccaaactcagctcaattacctcttcctaaaatctttcctttaacacccttttctcctgttaccatttccctctagcccccatattcagttagttctttctgacaggactaagcacctcttcaaaacagaaaacccgggccgggagcagcggcgggcgcctgcagtcccagtagcactttggtaagccgaggtgggaggatcgtttgagcctgggcggttacagtgaatagtgatggtgccactgcactccagccagggagacaaaagtgaaaccctgttccaaaacacaaacctgaaaacctaattttttaactttttcttttgaggtggagtttcgctctggttgcccaagctgggggtgcaatggggcgatctcggctcaccgcaacccccgactcccgggttcaagcgattctcctgcctcagcctcccgagtagctgggattacaggtgtgcgccaccacacctggctaattttgtacttttagtagagacggggtttctccattttggtcaggctggtctcgaactcccgacctcaggtgatccgcccgcctcggctgcccaaagtgctgggattacaggcgtgagccaccgcgcccggcctcttttttttttttccccatcttttgacacactcaacctcctcaactaaacctagaaaacctcatttcttacttgtctgctcactccaatataccaggctgcaatcatattcttgggccttactcttaaaataaaaaaaaaaaaagtcaagaggagaaaattcgaaggcacattcttttctccttaaaggaaaaatcaggagtgcccagggaagacagaaacacaaagacagacagaaaacaaatccactaaaactgtactgacctccttgccttttgccttctccatacttgtagaagaagcggagcctcgcaacatgcttccaaaatggcccctgccccaagattgctatttgcaaagtctcctcccacttcctgccgcccgaagaccctttttctctccacctcacctcttcttttcttctccccttctgttccctcccccacaatttgtaaatgctaaaattgcattctttcttattcatggggtgacttttgtctgggttgaattactaatactattcctggcccttttctgttcactttaaatgtaattatccaaagtatggttccggagacattgggagattgagcactccttcagaacgattctacggggaaaaaaaacaaaaaacaaaaaacaaaaaaacagtggccagagacttgagcaggatgtgtgaagggatttaataatggaacttgtggcaacagtagacttcagagaccagactggcggcttgaagaaagctattttctcgtaccaaatacattccatttcctaagtaagttactcaaccaactaaaactccaggtttctctgtactaataccgagcatcttttcatctgccaacgaactaataatagtagcttttaaagtctatagagtatttgttatttattttgtagagggcaagtgggggggtctggctattttgacctggctggtctcgaactcctgccctcaagtaattctccagccttgtcctcccaaagtgttgggattacaggcgtgagccaccactccccgcccgagtatttttttatatctcaaattgtgagttttaaattcagtcattattgttccccattttatatatgactaaagttggtataaatttttattggtaactttttcaatagcacagtaagtgaacccctaacctactgactcccaaagaagttcaagtttttctccttaaaataatttgaaaaatctttcctcagatcagtgctccctgtcagattgtcaagagatgtgaagtgaaggaagcagtggctgtgcgactgaaaccctcccttgtcagggtccaaagtctcttttgttctttggtttactttgttgtttttttttcctacatctcattgcttgtcctaaaatgataaataagagactgtctttatccaaatggtgttagtaatctgctcacaggctagaaatccacggacagaaaaagtaagtaaacggagcccaggaatagagaaggaagtgcaggttgtggactgggcaacccccaaggcggcaaagaggaaaccaggtgagttgaggtcatctgggagatattagggctttgatttaacaattctttaccacagcctttggtaaccaccagtaggactttctaattaaggtttgtgtataaagtgtataactgaatcatctttcttttgtcagtgtaattgaacgtaacattcagaataactggagttctgggctgggcatggtggctcacgcctgtaatctcagcactttggggggctgaggtgggcaggtcacttgagttcaggagttttgagaccagcctggccaacaatggcagaaccccttctctactaaaaatgcaaaaattagccgggcatggtgcgtgcctgtaatcccagctaccaaggaggttgaggcaggagaattgcttgagctggagaggcagaggttgcagtgagtcaagatcgtgccattgcactccagcctgggtgacagtgtgagactccatctcaaaataaaacataaaataaaaataaaacataaaaacacagacaccaaatccaggccagattgattcatttttaaatgtaaggctttagcagctagccagacaggatttaaacccaacctccccttcactagctgtgtgacctgggcaataacgttaggtctctttgttttctcatccatgaaatgagagtcatgaaaataatagcctttacttagagggttgtgggcatgtctggagaaaacagtgtctggagaaaacagtggctggcacagcacatgttgggatcagaagagcagggcgtggtggctcatgccagtaatcccagcactttgggaggcaggagaatcgcttgagctcatgagttcaagaccagcctgggcaat

SEQ ID NO: 315579 - DNA, 4001 bp, Homo sapiens
taactatgccactttttggggtgaggcagacaaatgtgaaatgggtactaattttacaatctcacttgttcagagtatgtgaacatgtcacatcatctgactaggcttggtgaagtaatgcaggtgcacactgctcatagagccagtgggagttacattgttattattattagagatagtctttagcatttctatgctactttcttcttgcaaattgctgcctattttcctgaaaaagattcacaaatggattgcaatacatagcatatttatgtatttgggcacatttacattgttggtaaatgtacagagaaaaactattgctggttactgagtagctaagataacagttttttcccctcattaaacctgactagtaaagcagagcatactcactttccttcacaacctctagagactgagcatcctaccattctaatcagagataaaatggggaactcagcaaataaatcaatcaataagcaaatattaattgatgacaaacttcaatgcattagaaattgaatctgatattgagtagaaactgttcggtatttgctttaatgtatattccataacaaatagccttctgtatggatgctttaatattaggcacccatttggatactgtcagtattttccttgctcaatacccttgctcactgctagccatacagacccttgaaaatattcaactacaaataaatgagtgccgagtaagaatctttctcacattgtctctacttctccttgactataagacatcctaatgccatgtcaagcagtggttcttcactcttatctaaggacagatattttacagaccttttagtatcagtaagcaaaggcttcacctataaagtgaaatagtcatgcacaatgagtttagaatccaagtttcactttgctattgctgcattattattcatgcatgtattttgatggtattcaattaaactaaatgcatgaactggaacaaatacctaattgcaatgacttctgttgccccagtaagctacagcaagtaatggaagtctcacaattaaataacaataccctaaaaatcatataccatcatcaaaggaaacatacacaatcatcatctcaagtactacatatctctgctgggaataattggattctgacttagaaacagcctgactttaaatagaccattgaaaatagtgcctctccaaaccttcagctctgaattgccagggtgctgaattgaggagtttaaaataacagacccttacaattaagtaaaatccttaagaggaatacaatcaacttccatacaaatcctagaaataataacagctttttgttttctatcttttaattcttccttgatatagcttctagagcccacaaggatacaattttgggggaaaaaataaaagaaaaaggaatataaaaggtttctgctgtccaaccacttagaagaaaaagaaaaccatttcctcagggctttggtttttaaataagagtggatattgagttttaatgcatatttttagagatccacagaaccccaagctgattaaataaccttgaggaaaatactatgtcctaaattagaaacgaaaagaaaaattacttaccctaaaattttcttctgatttctggagaccgaggagtttaccacttcggctcctgcagccatttactgacagcagacatacccaagcaaagcaaactttgcctttctcaggactcagaaactatgaaatgaacagaaagaaatcacccatttttgcctctaaggtgaaattacttgagtgctgcttttccagcttccctattagaccttagtgcatgtttcatagctgctttcgaatgtatccgttttctttagaggatttgggagggaccctaaactgagcgttgcttgggtcagccgctcagaggttctgtccttggtgctgaaagagggatggagtaggcataggcagtatccgttttctacctcgctctcttttcctctttgtctctctatctgctcggatactgtgctttttagtacatgtatattttctcctcagtgctctttttaatcttagtttttccactgtttttacctttatgctttaatttctcttgaataactctcaccttcctcagtttaattgcctttccagattttggtgggtgtaaagatgattagttcagaaggaacagatcatcaaattgataccacaattggttaatggaaatcagtacaatttaaaacacaattgacaggataattgaacttggaggtgtaagcctgtctgggaaaagaaggttaaaggaaacatattacaaaggtagcaaaactgaggcatggcgtataactggcaataaggatgaaataagcttaatactgtaagaaatgttaaatgtttacttagcagcacttcttgttttcagaggacttcataaatatttgccaattcattcttactgcttctctgtgatatatacatagataccttttttaaaactggtttggaacaagctaaagtgagatgcaaccaaggacaatatcagtgaaagtcagcagtagaacataaacaatcctaacttatggtcacctgttcatcttacattttactgtggcatcctaaccatttcctgttctctctctcttttttttctcctctgtttggtcagtgtggtaattcttcggctgttttctctgccaacagtggatgtgcttggcaactgcggtgcagttatagggaagctagctcttgtttgactatgatggagacctctgctggctgagaaagaaggcagcagcatcaacaaggtctaaatactgctattgataacaaccatcatttattgagcatgtacttttagccagtcattttaatgcattgctccttttaatcctttcaacaaccctacaaggcaggtactattttttaccatccttaatttatggataggaaaattaaagcttatggaggttagtataatgtctgaaagtcacacagctaacaagtggctgacccaagatttggatctaaacaacctaattctcttaaccactatggtatagtcttccaaaagaagaaaatttaaacttcccaaaagactgataatatgtcagagagaataataattatgacagtaataataatattaataatacatttgtatataattatatttagaaatcatttagatgatttagaaatcattctgtaaattatattacatcagtcttcatgatgccatctttatagaggctgttatggactaaattgtgtcattccaaaattcaagtgttgaagccctaaccttagaacatgactgtatttggatgtaagatctttgaagtgtgagttaagttaaaatggggcctggagggtacgccctaatccaatatgactggtttcctataagaaaaagaagaggcaccagaaatgtgcacacagaggaaaggacacaggaagatggcatctgtctgcaagccaaggagaggggtcttgcaggagaaaccaaacctgccaccctgttgattttggatttctacccttcaaaactgtgcaaaaataaatttctcttgtttaattcacctagcctgtggaattttgttatggcatccctagcaaactaatacagagggttagagaggttaggttccatatccaaggttgcccataacttattgggcataaatgtattagttatatgacataactatattgaacatgccctaagactagaactcctgggttgaatgtgaactccaaggcttttcttcccttggataaggggaccaagagaatatgcactgctaaaacttggcttgtctgacatataaaagcagggagtaatgtcaggctgttatgtgagcagaatgaagcaaaggccttctaaggagttaagaacctcatatcactcattttcagcaacatggttttcacgtttcagtatcctatgtttattttctttaacatttgaagacattgtgcctaatgataatgctatcttgataatgcgtgaat

SEQ ID NO: 315580 - DNA, 4001 bp, Homo sapiens
actgcatctggccaatagtgtcttctaaagggcataagtattaaattttgatagagtacaatttactaatactttccatttaatggattgtgttttgatgtctcatataagaaatctttgcctaacccaaggtcacaaagattttcttctaaaagtttagtattatcaggttttaatcttaaatttattatttcttttgagtttgtttttgtttatagtacaagacatgggttgaagttcatattttgcataataattttcatgttttctaccaacttttgttggcaaagttattctttcaccattgaattgcctttgcaacttcatcgaaaatgagtgtccatatctatctaggtatatttctggactcctcttttgttctattaatatatttgtctatcttgacaccaataccaaacagtcttgtttactgtggctatatatgtcttcaagtcaggtgatgttagacctctctaactttgttcttgtttttcaaatttgtcaggctattctcgttccttaatatttccatatgaactttaaaaccagcttcttattttctaccaaaaagtctgcagagattttgattgggattgcatttattctacagatcaagttatatagatcttctatataaatctatattgaatcttttaacacataaacaaaagtaaatctatttatttaggtctcagtttttctcagcaatattttttaggttttagggtacaggtcttttatatcttttgtcagatgtatctttaagaaaatgtcttattcttaatgctattataaatgatattgtttcataatttctgtgtttttttttttccttttttggagatggagtctcactctgtcacccaggctggagtgcagtggtgcaatcatggggcactgcagcctcagcctcctgggttcaagtaatcctcccgcctcacctggtctcgaagtcctgaggtcaagctatctgcccacctcagcctcccaaagtgctgggattacaggtgtgagccactacactcagcctggtttataatttcaatttccaattgcttgttgctattatatagaaatacaattgctttttatagattgatttcgtattctgcaccttacttatttagttctagtaggattttttttgggtagattttttggtgtagattttatacatagattaccatgttatctgaaaattatgacagttttatttctttctaattggctagcttttatttcccaatctgtctatagctatagatacataggtatctatagataaataaatacacacacaccgctacacttaatttacaaaacatataaatatgtttttgtttttttagaggcaaggtcttgctctgttgcccaggttggaatatagtggcatgatcatacctcattgcagccttgaactcctgggctcaagtgatcctcccacctcagcctctcaagtagctaggactatacaggtgcataccacaatgccaagctaattttaaaaatatatatttttgtaaatacagtgtctcattatgttgcctaagctggcttgagctcctggcctcaagggatacactcacttcaacctcccaaagcatggggattattggtgtgaaccactatgcctagcaaaaaattatacctgttatatagaatttaaaaattcttactgtttcattttggatagtttttgttttcatgtgaaattcactaattttttcttccatgatgtctaacatgccattaattccatccaacaacattttcatctcccatattgtcttggtccattctgtgctgctatgacagaatacctgagactggataatttataatgaacagaaatttatttggctcacagttctggagtccgggaagtccaagagtgtggcacagacatctggcaaagacctttgtgctgtgtcatctcatggcggaaggcagaagagcaagaaagggtgagagcaagaggaggttgaacttgcttttataatgaagccactttcaaaatagctaacccactctggtgatagaaacattaatccattcatgaggacagagcccttatgacctaatcagcccttaaagtcccacctctcaacactgttgcattggggattaaatttccaacacacaaactttgggggacacattcaaaccatagcatatatcatgatttttatgtctaaaaattcaatgtgttttttttcttttgcatgcctctacataactttttaaatataaagaatacagtaacaataatgatgtcaatatccttacctgcctatttaatatctgtgtcagttctaagtcagttttgactaacttatttttcccctcattatgagagttaataactattggaactaatccctgaatgagataaaaagaaattctactgtaacaattgattagaaggcctaaaattaaacagttcagattataacataaaacaagaaaagtcatgaaagttgtcttcaaagagaaggcagatagatgtattatgaattgttaagaacctgcaagtacaaggtatactattggtgagaggaaggttaaaacaacaacaacaaatctctataaatgaaaagtatcaccagcagcaacaacaaagaaatacaattagaaactcagagaaaactgaaaatgcatataagaaatttatgttatgaaaacgaagtaaattatactgcatgatatgagcaattgatggaaatgaaaaagcagtattttctgaaataacaaagcaaaatttcagataattcagaaagatgaagaggaacaactaatgcttggtattcgtgtatactttctttaggcttgtcataattactaaatttaatcatattcctgtgatgtatttagttttcctgtttgaaactaatttgtcttttttataggttattttctttttcataggagcttgtccctatttatctcctccatgggttcaaagtttttaaaaataaaaacttttctgttgttgtttaggcctagtagtatcttcagatgcttaaagacagttgattaagtattgccttttgaaaacgtaaacttatgcccattaagcacatgttgaaagactcttcacacaatcacttaaaccccttcatgttttttctttttctttctttttcttcttctttttttttgaaactgagtttcgctcttgttgcccaggctggagtgcaatggtgcgatcttggctcactgcaacctctgcctcccgggttcaagcgattctcctacctcagcctcccgagtagctgggattacaggcacgtgccaccacacccagctaattttttgtatttttagtagagacggagtttctccatgttggtcagggtggtctcaaagtcccgatctcaggtgatctgcatgcctcagcctcccaaagtgctgggattatgggtgtgagccaccaagcccggcccatgttttttcttaaattgttttccttaacttcaaagacaaatttttggatgaaatagtttttttttttaataaataattttctgaagttcagtgacacctaaagtttcctttcagtttatttttactgtaagattcaaacaagattatattttatagctttatttagaaataaataaatatgtattcactgtgttggatgagaaatttatcattcatttacttccttcatatttcctctcccaagttctggatttcattaataaaatctgagattttatagacagattacttttgttattacctttcagattatttaccattttctgacttaagagttacctgtggcattacttttacttttaaaaaaggtgaatagcaattattttttattttaaggtattgtaggtagtacttcctgtgaagcagacagtgagaagcatcatagctcaacttgttcccctgttcaatcctgctttccaggatccttattatttctaggtaagatttctcagggttgtcctctagtactgtccccaggccccctacagatgtcactg

SEQ ID NO: 315581 - DNA, 4001 bp, Homo sapiens
gccagagcttttctggtctgggctgtaattcggacttgctatattgcctgataaaattaataattatagctaaaatttataagcattatcatcattcaacctcacaacaacctgatgaagaaggtaagcactattatcctatcaagttttctagataaaaaaggtgagtcacagagaggttaaatatcttgctgagatcacaaaccagtaaatgatggagttgattcaacccaagatttgtctgattccagagctcatgttcttaactatgccacttaactatgccactttttggggtgaggcagacaaatgtgaaatgggtactaattttacaatctcacttgttcagagtatgtgaacatgtcacatcatctgactaggcttggtgaagtaatgcaggtgcacactgctcatagagccagtgggagttacattgttattattattagagatagtctttagcatttctatgctactttcttcttgcaaattgctgcctattttcctgaaaaagattcacaaatggattgcaatacatagcatatttatgtatttgggcacatttacattgttggtaaatgtacagagaaaaactattgctggttactgagtagctaagataacagttttttcccctcattaaacctgactagtaaagcagagcatactcactttccttcacaacctctagagactgagcatcctaccattctaatcagagataaaatggggaactcagcaaataaatcaatcaataagcaaatattaattgatgacaaacttcaatgcattagaaattgaatctgatattgagtagaaactgttcggtatttgctttaatgtatattccataacaaatagccttctgtatggatgctttaatattaggcacccatttggatactgtcagtattttccttgctcaatacccttgctcactgctagccatacagacccttgaaaatattcaactacaaataaatgagtgccgagtaagaatctttctcacattgtctctacttctccttgactataagacatcctaatgccatgtcaagcagtggttcttcactcttatctaaggacagatattttacagaccttttagtatcagtaagcaaaggcttcacctataaagtgaaatagtcatgcacaatgagtttagaatccaagtttcactttgctattgctgcattattattcatgcatgtattttgatggtattcaattaaactaaatgcatgaactggaacaaatacctaattgcaatgacttctgttgccccagtaagctacagcaagtaatggaagtctcacaattaaataacaataccctaaaaatcatataccatcatcaaaggaaacatacacaatcatcatctcaagtactacatatctctgctgggaataattggattctgacttagaaacagcctgactttaaatagaccattgaaaatagtgcctctccaaaccttcagctctgaattgccagggtgctgaattgaggagtttaaaataacagacccttacaattaagtaaaatccttaagaggaatacaatcaacttccatacaaatcctagaaataataacagctttttgttttctatcttttaattcttccttgatatagcttctagagcccacaaggatacaattttgggggaaaaaataaaagaaaaaggaatataaaaggtttctgctgtccaaccacttagaagaaaaagaaaaccatttcctcagggctttggtttttaaataagagtggatattgagttttaatgcatatttttagagatccacagaaccccaagctgattaaataaccttgaggaaaatactatgtcctaaattagaaacgaaaagaaaaattacttaccctaaaattttcttctgatttctggagaccgaggagtttaccacttcggctcctgcagccatttactgacagcagacatacccaagcaaagcaaactttgcctttctcaggactcagaaactatgaaatgaacagaaagaaatcacccatttttgcctctaaggtgaaattacttgagtgctgcttttccagcttccctattagaccttagtgcatgtttcatagctgctttcgaatgtatccgttttctttagaggatttgggagggaccctaaactgagcgttgcttgggtcagccgctcagaggttctgtccttggtgctgaaagagggatggagtaggcataggcagtatccgttttctacctcgctctcttttcctctttgtctctctatctgctcggatactgtgctttttagtacatgtatattttctcctcagtgctctttttaatcttagtttttccactgtttttacctttatgctttaatttctcttgaataactctcaccttcctcagtttaattgcctttccagattttggtgggtgtaaagatgattagttcagaaggaacagatcatcaaattgataccacaattggttaatggaaatcagtacaatttaaaacacaattgacaggataattgaacttggaggtgtaagcctgtctgggaaaagaaggttaaaggaaacatattacaaaggtagcaaaactgaggcatggcgtataactggcaataaggatgaaataagcttaatactgtaagaaatgttaaatgtttacttagcagcacttcttgttttcagaggacttcataaatatttgccaattcattcttactgcttctctgtgatatatacatagataccttttttaaaactggtttggaacaagctaaagtgagatgcaaccaaggacaatatcagtgaaagtcagcagtagaacataaacaatcctaacttatggtcacctgttcatcttacattttactgtggcatcctaaccatttcctgttctctctctcttttttttctcctctgtttggtcagtgtggtaattcttcggctgttttctctgccaacagtggatgtgcttggcaactgcggtgcagttatagggaagctagctcttgtttgactatgatggagacctctgctggctgagaaagaaggcagcagcatcaacaaggtctaaatactgctattgataacaaccatcatttattgagcatgtacttttagccagtcattttaatgcattgctccttttaatcctttcaacaaccctacaaggcaggtactattttttaccatccttaatttatggataggaaaattaaagcttatggaggttagtataatgtctgaaagtcacacagctaacaagtggctgacccaagatttggatctaaacaacctaattctcttaaccactatggtatagtcttccaaaagaagaaaatttaaacttcccaaaagactgataatatgtcagagagaataataattatgacagtaataataatattaataatacatttgtatataattatatttagaaatcatttagatgatttagaaatcattctgtaaattatattacatcagtcttcatgatgccatctttatagaggctgttatggactaaattgtgtcattccaaaattcaagtgttgaagccctaaccttagaacatgactgtatttggatgtaagatctttgaagtgtgagttaagttaaaatggggcctggagggtacgccctaatccaatatgactggtttcctataagaaaaagaagaggcaccagaaatgtgcacacagaggaaaggacacaggaagatggcatctgtctgcaagccaaggagaggggtcttgcaggagaaaccaaacctgccaccctgttgattttggatttctacccttcaaaactgtgcaaaaataaatttctcttgtttaattcacctagcctgtggaattttgttatggcatccctagcaaactaatacagagggttagagaggttaggttccatatccaaggttgcccataacttattgggcataaatgtattagttatatgacataactatattgaacatgccctaagactagaactcc

SEQ ID NO: 315582 - DNA, 4001 bp, Homo sapiens
ccctggcgctgtttctctccaaataaataaaatggttttatttattttgtttacttgcctactgtctttctgtgcatgacctggcccccagtataagctgcctgagagcaggggccttgtctgttatattcatctctgtgtccagtgcctaaaacagtgcctggctcccatgtacgtgcccagcacatgggtgttggatcaataatacatgaggctggtgactggagaggaggcgcaggcacagccagctccttctttcaatactcaccttttggagacaggaatccacagcattaggaatatgtccttcatgttgatgcatatcaccagacggtgtttctgcttgtgattgtgtcagtgaagaaatttgaggtctcgtgttcttctttattgaattttcagtgggtaccaggaaaatgggcacaggtttttcgtcaacaagtatttggtgctctccttttttcaacactctctccttagcttcagtggagacattaaacacacacatatacacacataaaaatgggagagatttcaagtaatcctctcattcctgtgtctgtactctgccccagcacctcccagtaaggctgctccctgcatcctggaatggtgggttggcgatggagaaagtcggggagctattaagagctctaaagtgtgcggattaagttttactatagaagtgaaagcttaatgacaatggaacattgtccaccgattaaacatcatgtttctaaaactgtctccagtctcccctttccttcttccttctttccctccctccctcccttccttccttctttttttttttttttttttttttagacggagtctcactctgtcacccaggctggagtgcaatggtaggacctcgtctcactgcaacctctctgcctcccgagttccagcgattctcctgcctcagcctccagagtagcttggattacaggtgcgcaccaccatgcccgggtaatttttgtattattagtagagacggaatttccccatgttggccaggctggtctcgaactcctggcctcaggtgatccaccaacctcggcctccaaagtgctaggattacaggcgtgagccaccgcacccggcccagtctcccatttcaatactcattatacaggtaagtgacaacagcaggaatcaaaagtgcagactccgaattttgtaaatatacatgtgtttgctggcattcataaaaaaaggcaggaaggaaatacaccaaatggtcacattgtttatcttcaggttgttttcttttttactcttttatttctatagtgagcatatatcacttttgtaatcctcaaaaacacaaaatggaacatccttttgttcatggatggaacaatggaaccattatttaaaacataaaagtggaatccctgaatgacaaggacagcagctggcaggcatctgggggaaggaagatgacagctgagaaattaagttagaatgaggatatggaaagcatccacactaaggcgccgtcagccagacccgcaccaggcacatgtgaggccccatcctccaccgagtgttcactgtctcagtgagtctcttggcagtagggccccgtccctgtccgccaccgcacagtgacatactttctcccgccctctcccctaggtcagctggaactgggtccgcctggaaacccgggggccgggcccccagagggctttcgcagcctggccgcccgaagctcacctgccctttcactgaactccacccggaaggtgcccggggcttcgtgttcctgggtgctgaccgtgcactccccgccgcccgaggacttagagctctggaagtagctctccagcttccttcgtactcgggggccggacttgtacacccgcacgaggagcggggacggcgggcgcaggtgggaggccatggctctgcgcgtcgggagggcgcgggggctccgggaggcagctgggcggtaaaggcgcggcccgccctgcggactgggcgcaaagtttcagtttcgcttccctggaggtccctccctgttcccggcagagccgcttccccctcctccctgtgctgtctgcaccgaggagagcggcctgccgggtgagtaggtccggtgcctctgggccctcggggtcccctctcctgcaggctcgaggtgggcggggagaagggggacgggcgcggacccgggtcccagggccaggcctcccttgtgagtagactatgcaaagaaagtaagtttctcctgtgtttcttattctttgtaactcttactgctgttaccactattatttgatcctaaaaagtaattcacattctgaatccatgttaaacttacccatttttgaaaatttgaatgtgttcatctggtaattgtgacctgttaccccttccctccctccaactctaccctttagacgggcttctgcgggcttttctcctccattgcttgatttaaccaacagcactgaattgtttcttgctgcccaaagagcagagcaaggccctgatgtcaagggctggtgaggggaggcggacctgtgaaccaaggagcaaaacttctccaaggcctccaaggggaagtttcaagcagaatcttaataaattgagtgtggcggcgagatggggaggacaggattggggggaaaagcacctgaggcttagggaccactgtggtctgaagcacagagtgggcctggggcctgggaggagaggagatgggtgaggggatgaaggagggagagcctacctagatgggcactgtccagcagaaatacaatgggagccagtaggttcattctaaaatttttgcagccatattttttaaaggataaagaaacagatgaaattaattttaatgatttttaggaaatttttaaaggataaagaaacagatgaaattaactgtaatgatgttatttagcttgacatatccaaaacttaatcatttcagcatgtaatgagatttttacattctttttatcataccacgtctttgcaacccagtgtttttcttatacttacatcacatctcgattcagactggccacatgtagcctcagtagctatgtgaggctgatagtccaccctggacaggacatatttagatggtgaaaagccttgaagagcagtgaagatgacctgaagggctttaagcagggaaagcaagaaaatgacttgccagatttgcattttagaaatatggtgctgacaaccgtgtggaggacacatttacaagcagggatgagtggcggcagagaggcctgagataaggtttttgcacatggctggtaagactggaaatgggcccgtctttactgtgaacaatttggcaatactgtcagaattacaactgcatatactttttggttctggagttccatttctaggaatttgtcccattgatatattagcccctgtgtgaagtgacctgtgtacaaagatgttctttacagccttgtttacaatagcaaaagatagggaactctttaatgcccataaatagggggactagcagtttaataataatagtatatctatacaatggaatacaatgggcagtaggaaaaatgaaaaagctctctatgtgctaacatgaaaagatctctaggatacattatgtgggaaaaataagatgcagaagtgtgtgtataagctactacctttcgtgtaaaaaatgccactggaagaatacaggagaagcgctgattgactctggacagggaatttagcagcggagacaggaggaaaccttttacattttctaaatttgaaccatgtaaatgtaatacctattcaaacaataaaatgtcaaactaggtacatttaaatctttgaaaagagtatattgatggctgggcgcggtggctcacgcctgtaatcccagcactttgggaggccaaggcaggcggatcatgaggtcaggagatcgagaccatcctggctaacatggtgaaaccccgtctctactaaaaaaaatacaaaaaaaaaaaaaattagccaggcgt

SEQ ID NO: 315583 - DNA, 4001 bp, Homo sapiens
atggccaggactctgcacgccaaacaccacagcacccacggtcagcatgggccatgccaagcatgttacacgtgtgccctctctcgtgttctctccatctaaaccatgaccacttcacagataaggaaactgaggccccagaaggtgaagtgacgtgcctggactccaaactggtacccataacacttcggggcccccagccatggcaccagctttagggcacttgaggacaggccccagctaattcctcttctgcagctcccacgcacacctagcacccatgggtgttcagtaacagctaagtggtaaagaaaagcagacaaccccatcttagccagcacctctgggttggcaaactcctcttatagatgagaccacaggtgccagagccacatctggctcagttagaggcagagaggtcctgggcttcctgaacgggagtctagtggttgcccagccccgaaactacagctggggagggtagtgggaaggtactggctggccccttcccccagcaggggcaggtttttgaagggggtcctggctccacttctctagaaccctcccttagaacacaagccccacccccagccttggacctgcagcgggggagggccactggggcgatacagggacaggagaaatggggagccccttgcagcgaggcatgggccctgcgcccgagggtgccgcaggcctcccctcccctcccgcccgccccgctgccagcaagaggccattttggaatgttaattggaaacaccggcctcagccactcgccccccggtgctacctctcccttctgcaagctccggggcagcaggctagggacctgggggtcccgagagacccgggccagggcaatggagcctgcccataccctgccccaagcgcctcctagaggcggcaattctccggtggaagaagcaattcccggatccaggagaccccaacccaaatggtctccatgcgctggaggtgaggatggtgctatgaaaggtgcccttcctgatcctggccttccagaaacacgaattctaggctggacttgggcgccctgccgcttttagggttctgggaggcggcgccttccacctctgaggggctccactggagcccaggcactactgtcgccccatcaacaggaaaaaaaaggaaaccccaggcaggggaaagtttgttccacccactcgaatcgtgccgagaaagggggcgcagagggagccccgcgcctgccaaaccacacagtggggacccggctccaggagggcggatgcgggccggggacgacgtggcgcccagaggggcaggccgagcgcgtggagaggaaagcgcctccaaggggggcgtcagggagtcgcgggggggccccgatcccgtaaggcgtctcggtgccgccctcaccttggaggtagtaggcctggcagccgtcgtcgcgcagcttctgtaggagcaggccgagcacggaggcgggagcgccgggctcgggctgccactcggccgtggcctcgtcgtagagcagcacggtggccgccttgcagcgcgtggcgaagcgctccttgtcggcgtggttggggatgatggagcggatgggcaggttgcccttgcgcaggcggcgcaacatgaggcccgggatggccaggttgatggccgtctcgatgtgcgacgactcgaagagctcgtgcggccggcagtcgagcagcagcaaggacgcgccgccgcgcgcctccagctcctcctgcagccactcggcgctcttgcagggcatggcccctgcccccgtcgccgcgcccgccccggtgcctgcgccggaccccgaccccgcaccgggctcggaccccgcccgggtgcccccagccgccgccgcccccgaagtcgacatgtgcgcccgcgctggggggccgcggagctggtttttcatggggagcgcgggcggcccggggccggggccgggcagccctgccctgggacggcgccccggccgcgcgggccccagccgcgtctccgggcgcccgcctcccgccgagctgcgcgcccgccgccccggcctcccggcctcccggcctccgtcccgcccgcccgcccggccctccgcgcgcaccgcggcctgacagccccaattaaacggcggctccggcggccgcgcgccgaggcgttctccggggggcggggccgcgggggccggcgcccgggcttaaaggcgcagcgcctccaccgcccctccccacggggtatgcgggcgcgctcgcgacccgagcccgggagaccagcggcggggccctcccccaccgcctccgcaccgttgccccctggactagctcggagctgactacgatccgcctagggaccccggcctagacgccctcatgggttcactctgcgcgtgctcccaagctcttctggacactgcgggaagagaggccctgggggcgtcctatgcctggcacccccaccccacattcacaacagcatagttttcctgggacggggcgtggtgggggggatggtcaagctgagcaacctctcctcctcccgcctgtcatcccattcattttttctgtcatcgagttcattcaacaaatgagaactgaacgcctactacgtgccaggcactgtgctaggcggtcaccgtttcagaggacctcatcgttcccctgacggtcacaggctccagacctgagggagagcgtctcacgccagcaggcctgatgggaaatcaggacctgggcaactggcggggtaggaagactcagggccgtgccaccttccgtgggcaggtgtggagaaatcctagaaaggaccagctttgggaagggatcgcgagccctttaagaaagctttacaagcggggtggtgacaggcgcccagtgaagcgccacgtgactttttccacggggccggtgggaggggaatgctcctttataatcagctttccttcccctgcctccctctcaacggaccaatcaacttccgcggtaggcgggcgcctgccatgcagatggccaatcctggccgaaagaggcggtggcggagggaggcggggcccgccgcggtttccacccagggcggggaagtgggcggggcctccgcccgccctgtgtgtcgatttgcaggcaggcggggcagcggaggtgaatggacccgcaggtagcgctagaacaaagcggctagacgcaggcggcgcgcttgcgtaggacctgcagtgctttccctacggagccagggtggcagcttgaggctggaccctgccgtctatctggtccattcttttgcctggcggggtgcccctccttggggcttaaccccccgactccgcccgaggctggtcggctctgagacaccttgcccccatccctgactgggggagcggtggtgcttgagggacggcctctggaaccccgaggatttgagctttccgctaacctctgaccagaaggcacgaaaaggggtgactcaggagcagtccccgcctgtctttcaagcgagggatagtctttcggaagagtttcatcctgggccacagggctgtatcccaaaggagcaggggtctctcccacagtcacattctcagagtgtgaaaggagaagcaactctccgcccaaggttgtcctgggggtcctgggcctgtggaaagagcttccagggcccaagatgccaagacccagattctgtcctgccacttgcaggtgtgtcctgtgaccttagtatggttcttccctctgggccttgggtctcccagtgtaggagagtgctagtgtggactgagcccaatccgtctatgaatccatccggctgggaggacgtggtctgaggacaggcctctcggctggcaggctggatgctgcttgtcagggatggaggcagcactcaaaaaagaggcctgagcaaactcccaggggagggtgagctgctgagcagtgcaccattcactcagcaagccttgctgagggcctcctgagtaccagcctgcctggagccggagtgacaacagtggagcctcc

SEQ ID NO: 315584 - DNA, 4001 bp, Homo sapiens
ccttgggattgggagagcagcccagagttgtccaggcttaggaggcaggggccaggtccagtgggtctggagataagtacagggtggagagacagcctatcttagtccctcaaggcatctggatctgaggtggccccagggcactggactctggctcatcttcccccattccttatgtggaggcagtagcttgatcccttctaaccctattcttctcttgccaggccaaagtatccaccccctcacccagaccccttctagatccatccctcctcagaatcttccaattagaggtgtctgtctctgggctgaaggcagacaatcattatcacaccaggagcaccccaccccagggcaggaacaacaacagaaacaagaatagttagaatctacaaagcactgcccactgtacaaagcactctcacacacatgatttcaggggctcatccaaccctgagttccagggcagaaggtgacagcaaaacatgccaggcattagacagaaggtgcttgcttcctagtgctaggtgggccaggggcttgggagagaagccagacagatgaacactggggagaagaatgtctcctcttggctgtggggcctcagctccaaagagcagtgcaggcctcaggctagggctggagaggcagccttcaggcctggaggggccttccccaccgcctccaggcccagcgcccagttagtgaggcggcaggcaagtgtgggcgcctccccctcccccagtctcctgggagttgggggggttcgagggggatcagccaggcccccctcttcccaggccagctgcttcagaaccttccggctccaacattccatcccctcttaaagggaaagtgactgcttccaaactgtgcctgtccagatctctgcagctgggtggaagggaagaccccaccagggaggggaagatagagaacaccaagaaactcttcctggctatcccacccaggccccaggcccttcctaacgtctctccactggccaccaactggaggaaaaaagcccgaattggaggaaagatcagcacctgggtcagtgaggactactccgcaggggtcaggctctctgttccggtgacaacacccacaacagcccacaaaggagagggcaggcagctagataaacatcagatctgcagaccccgctcgcggccaggcgcccgagcacccccgacacccctcccccagctcaaagtcccagcagagccctcagatgcagcatactccaaatatggctgggagctgtgctgctgaaaagatgaagggggcgaagaacgagggccacacgacccaagtctgtgcggaaaaaggtggctctggctcctcggcaggaggaggatgggggactcgggctctgaaactaggtggagggggggtgtgtctgtctctgtgggccactggtctctgaagaggtaaggggaccgcaccggcaggaactctgattgctagtggggaattggacgtccccttaaacaagggaggccaacgtcccctcttcagaggtaaacgggagttgctactggggctggaaccaaaggggcccaaatgggccgagtcgcccctagaagtcagagcggggctaggagccggtgtagcgaggcaagtcgaaacggaccgcgtcatcccttagaagccagagcggccggggctcccggaggcggggcgggggccatcctcacccgaaatcgtcgtccatagacttgaagaagaacttatagctgggtcgctgcaaaacgcccttaaagtccgccaaggtgacgcgctcggcgggcaggggcagcttcacaaggtacggcgtctcctgcccatccaagtggtagatgatcttggtctcgcccatggctctggcctcgggcccggcggcccgcgcgcggcctgctcgggcggccgggccgagcctcccagacggcggcggcgcgcggcgcggcccagcggctcaacccagctcggcggctgctggcggcgccagctcccttgttctccggccgctaccgggtcccagcgccgcccgccgccgccgcggccgccgcttccgctccccactctcccgactggactggcgaccgcgactcttccggtggccgcggccctcccggcccagggcttcgtccgggcccgctcccctcctccggcccggcgcggccccgccccggcgcgccccgcccccggccgccgcggagaggcgccggcgtcgcggcagatggcagggtttcccgcccactggccgggccgcggcgctccggtcccgggtccctagaaacggaaggggagattcaccgggatggcggcgttcccggacccctgaaggccctgactccggacccaagtgggatcggcgactcctctgcagtccaggaagagtggaatgcagggattgctttggtccccagaaatggtctggggaaagagggtgggtctgactctggatccctggaggagaatgacctcaacatggcccttcagtgtttcttgagaagcacaactgctgtcactgagtctactaaactgatctcgagagaaggacagcatccagttctgattcctccctataaccttagcgtccagttgcaaggtagtggtttaataaatgggttgaatgcggaataagtggggcccgggcgcggtggctcacgcttctaatcccagcactttgggaggccaaggcgggcggatcgcccgaggtcgagagttcaagaccagcctgaccaacatggagaaaccctgtctctactaaaaatacaaaaaaattagccgggcgtggtggcgcatgcatgtaatctcagctactcgggaggctgaggcagaagaatcgcttgaacacgggcggcggaggttgcggtgagccgagatcggtgagtcgagatcctgcctttgcactccagcctgggcaacaaaagtgaaactccatcccccctcgcccccccccaaaaaaaaagataagtggatgcatgcatgcctaagacagtaagtctcaaaccagaactccagaactaggtatagccggttcctcacagatctcctcaccccttaacttttaattcatttaataaatactgaaggcctactgtgtataaggcatatcgcatgagatatagcgatagcgagacagacaaggctgctctcaggaccttccctcagctggagggaagcacataggcttgtaaatacataacttcagagtgaccactgctatgaagaaggtaaaacaaagtgatgggatagtgacaggggaagccaggcgcaatggctcatgcctgtaattccaacattttgggaggctgaggcaggtggatcacctgaggttaggagttcgagaccagcctggccaaaatggtgaaaccccgtctctagtaaaaatacaaaaattagctggacatggtggcgcatgcctgtagtcccagctactcgggaggctgaggcaggagaatcgcttgaacccgggaggtggagcttgcagtgagccgagatcccaccactgcactccagcctgggcgacagagcgagactccgcctcaaacaaaaacaaaaacaaaacaaccaaaacaaaacgagaaagaggtttctgattggttagagaaaacttcttccagaaaaaaagacctagaaatagcaaggatgaagtggctatgagaagatctggggtgacagccttctaggcagagggcacagccaatatacaggctcaaggcaggaataaacatgttacatttgaggaataagaaggccatcatgactaaaggaacagtcctaggtgaggctggaaacatagacccgccagattacatagggccttggatgctatggtcttaagtatgggctccttctactccattttatacactgttgccaaattaacactagaataacaacatcattcagatacctcttctactcagaaacctttccacattccccaaagcccccaaatatccctattcaaggccccccataatctaacctctacctacttttacagcctt

SEQ ID NO: 315585 - DNA, 4001 bp, Homo sapiens
tttgtttaaattagtaaactaaaaatatattatacaatttttttttgcttttggatcctaatttatttttgccctatgaatatcacttatgtaggcactaattcaattttttaaaaagttctgatcacaaatattttctaatgcagtttaagataaatccatgacaaagtatcacttgcaaatattaccacgatacaaacattaactcatttgattcccgccacaaccctagaggcaagtattattatttctataacaaccattttaaagatgaagaaactgaggtttatagatgtcaagcaacttgcttaagatcctagggcttatatgtgatagggcagtgactcaatccaggctaatcttcagtaggtgctttcaaccacattaaaaacaagggtaaaaactaatttttcaactagctccatgtagctttaaagaatatcaataatcatatattcttgcttggcagcagtctattaaaaaagtaattttttctatgtaaacattcatatttaaccacgcagcctatcaagtagtatttgacttcttgtttcctgtttttagatggatataaccaaaacaacaacaacaacaacaaaaaactctggtattgagccgacaccaaataccaaagtttttaaatttaatcatcgtataagccaaacttcagttatctcgcatgtaaagagctatatagagaaatttctcctataaatgattcaggagctaagcctagaaaaatgcgaatctgcgaactattctccctcagtcctctatccccacccccagagtcactaaagaaacagaatacacaacttccagagagccgaggagatacagaacaatcaggagaactgacactggaccgtttctccttattacatccatttggctgaaaagacttaactagaaagttgtgttctactgccctttacaaatttcagaattatatgtgacagttaaggtagctgcaacacgagcacattgtaccagagaacgctgaatcaagaacatttatcgccaggtcttagttctagcttctgtcaattatacaaagagtcagctattaaatattaatggcatgccatttgcgctgcagctctcgcaaagagcctcctgctaccaatttttgtgatgaaagaaaacctgtcattttctagataaaccccaggccacgagaatccctcagatgagcgatcgaattctgtccttcccaggggaagctgtcagggccacccccatataccggggaggaggaggaggaacctgagggagggcgggtccccgcaggtcctgggtcaagggtctcgtgttccccttctctcccagccatccgcgacaggtcgggaggcgaggcggggcggggctgggccggctgtccgcacaaagagagccagcgagctagcccgcggaccaggtaccccgggccgctgggggccgggcggggcggggcgaggcagggaacacttacccagcagtagcacgttcttccccgcagggagcttggagcgcgagcgggtggagacctcgctgaggatgcaggacctaacgggaagcaaggcgtacggtgaggccggaggccggagccgcagcgcgggagggacggacccggcctcggcgcgccggggatggggctgccgggaacgcagtggccgggcccggcgccgagctccagcgggcacgggatcccgaggcgtccgcgcaaggccgggggagccagcgggggctgagggagaggtggagtcgttaccaaaggttctgcccgtcctcgtcgtcgcctgccgcggcgccaccgttgcccgacgctatctcgttgcccaaggggccgccagtgtaagtcgaggataatcccggcggagaagaaccgaaggagccgactcgccccacggccgccatcttggtcgggaatcacaccactcccggcaagactaaatgtgcgaggcggctgaggcggtggcggtggaggcggcgggaacccggatatggggcgttcagcgcacgggagcggggcggggcctgcgggggcggggccccgggccgggccaggactgatggagcgagcgagaacggactgcgcgtgcgtggctgcctggccggcgctgaggggctgagcgtacgcgggcggcggggtgggccgctatgctgcaactgaagcccagtgatctgacagtatggaagtgctttccttccgctcatccgcggccctgggctgcggcaggggggttgggtgtgtcaggtgaaaagtgctccctcccacccttcagacaggtccccaaaccctgcggcctgcgcggaattcctgcattgtcattgccggcccacccactgttcaggctgagagcggtcccccgcccaaaccggcgcttcgccggcgccaagatagaaatgggtcgcccggctggtaaagaggctgccctgcaaccctgggctggagtattgctgtggtcctggatttctggactttatttgcgttctcaagtggcgaagtgttcctcaacctggacccacatcagaagcaggttctccgagcccctaagcagcggcgtgacaaagtaattgtttaccctggaaatagactgttattttttaaaaattattgtcagggcttgctttaatgttcttaatgtttttgtatgagatcctccatgtgagatttgaaaagatccactatgcgggtcatctaaccggtcactagacattgattccacacttactacgtcgagcacagttgacactgggaatacatggatggacttatactagccctaaaataactccttttctattagaactttactaggtaaaggtatttgaatgtctgaactccatgtttagaaggagtcattggttttaaggctctgtcctagtacacctgtaagagcatttgcttaaaattgcctggcctttgtatgttatctctgtcacttcatatttgaaaatcacttgctagaatatggcctgatcaatgctgttatgctagtgagaaaatccacaactaaagactatttgctatatattagcattacggttagaagtctggaagcctttggaggctggcaaatctgagttcaggtctagctcttcgagtttactggctgtgtaaccttaggcaatttacttaacctccgtgagtctcagtttccttatctgtcaaatgaggataaaagaacttagagttgttattgagattaaacgggatgattcatgtaaaatggcttagaataacgactggcaaatcttaagcgcttaccacatgttaattgttatcaatgactttctttacctttcacaccattaatatctgaccaacctctagaagtgatgggcctaaagaactcttggagctaaaattctttgtcacctgtaatgccagcgctttgggaggccaaggcaggcagattgcttaagcccaggagttcttgaccagcctgggcaacatggcgaaaccccggctctacaaaaaattagccaagcgtggtggtgtgtgcctatagtcccagctatttaggaggctgaggtgggaggatcacctgagtccaggaggtcgaggctgcagtgaactgtgatcatgccactgcaatccagcctggatgacagagcaagaccctgtcactaaataaataaataaataaataaaataaaacttttgattttgttgtttatatacttaagaaaggaaccagaaccctccccagtagtcctacactttctgtggcacaaagcaggatggagacccccaggagaagctgagtctttatgttactgttctaaaggagagctgtatactgctcttggcccctctgaaagccattttactctgtactttattctttcagtcatcttcctcagagcattttcccctcaattttgttgtcagttccatatcatatttgcttagtctgagaagtgtttacttttataatagtgtcaggcttcaacacctcatgacttccagatgctcaactacccacctaaattgaggtcaaagttgtattccttgt

SEQ ID NO: 315586 - DNA, 4001 bp, Homo sapiens
ggcctcagtgttggagcttgcttcctgagcagccctgaaaccttcatacttacactctgagcatactccataaacacagaaggtggctgccccactcccaactacacagaattaggggtctgagttcatgaggttttaatgtacctcaaaagtattactcatgtctttttctagaaccctaagggtccaattcttagatgtcctagagctctggcattataagacggagcagggccaggcatggtggctcacacctgtaatcccagcactttgggaggctgagacaggcggatcacctgaggtcaggagttcaagaccagcctggccaacatggtgaaaccccgtctctactaaaaatacaaaaattagctgggcatggtggtgggtgcctgtaatcccagctacttggaaggctgaagcaggagaactgcttgaacccaggaggtggaagttgcagtcagccgtgagcagagactgtgccattgcactccagcctgggcaacaagaatgaaattctgtctcaaaaaaaaaaaaaaagatggagcagaactgtggaacttgaagatgattatgatgatatgatgatagtataataggtaatatttatcaaacatctatatgtcaggcactgtgcctgcctttaaaagtagtaattctaaactcatatagccttgtagatggctatggttcgtctcatctcacagatgtagaaactgaggctcagagaagctaagatccctgctcactcagctactaaataatgaagccaagattcaaaccaagttctatctgactccagagcttttgaattatgccaaactcttaataattatgataattataatgatatacaaattattttccattatggaaattacaatacctgagttttcttgaccaaagtgcaagcgctgacagagtttacagcaaatcaccacagggttagtgttggggattctaaattctccctgtatttcagcagggcttgtctgaacccgactcagctccacagcttgcgtcctgattaggataggcggacaaaaagccaaatgagagtgttgcatgttacctggaaaccatacaccccaggggcaaggacatcgtgcttttttcagacgaattgtgagcagactgcttttcccacatctgggaataaaaacacaaggaagaaatgactcactgtcaaccaggagcagtggctctcgcctgtaatcccagcactttgggaggccaaggagggcagatcgcctgaggtcaggagttcaaaatcagcctggccaacatggcgaaatcctgtctctactaaaaatacaaaaattagctgggcgtggtggctcatgcctgtagtcccagctactcgggaggctgaggcaggagaatcacttcaacctgggaagcagaggttgcagtgagccgagatcgcaccattgcactccagcctgggcgacagagtgagacttcgtctcaaaaaaaaagagagagaagaaatgactcactgtcattaggaaaactgaagctgtttaatcacctttagatatattgacagggttttgggaaacttcccattcctagaccaatattatgaataagggacccaaaagaatatttgtgctaacattcaaacttgcttcattgttaagagttggtttctgcctgggacaatcccacacccatctagaatatagaaaacccatctaccacccttgctttgcacactcccagtgacaagttgttcaccacctcacaagacagccatcccactgtgaaacaatccctggagactttatggttcttctaaaaccggcccaccaataatctgtcaaaaataactccctcaaaattggccaaacaccttattttttaacataaactgacagctagacaacaacaacaacatcaccactttactgtctcttctgcttcctcaagaatgcagtcaagaggagaacttgagggagccaagtttccaaggtggctgccaggcaatcatttacaaacctgccctggctcccaagctaacttcagcagtgcccactgggggagctcaggcgtgtcattaatgctaattgttgtggctgccaaggaaaccttcacacagtttgcaaacaggctatgcacacacagtatgcaagggagctccagagacctcaacagagatgacagggacctgggagctctcctgaagtactgccactgcagagcttagccttattctcagattccatggtgttctccttttccactcttccctgaccctcatgggggctgcagcgactcctagaaccttcaagcagcgagacaaaggtcccctcaaccgggcacagcgctctccttacacctggcctcctattcccagcaactttaaggagatatttttaagtggccatggttttatcaaaagcctattaagtttttgccacaaacggattttatttaaaataaaaataggggtaggtatttgactgatgtctcttgggagtgttttagagaagaggaatgaatactgacatgtcctatcttcccagatgcagaattgtaaaacaaacaaacataattgcttttcacatgtaaaagaaaactggcttagaacatactagcgttttctttgccatgaaggagttcaccttcagtgactaagccagaactactagagctgccaggcctagggacaggagacattgccagtgcttagccaggctggccaggactaaccatctctgcaaggagtccacaagaagcctcagggcagcctttccctgctcctatcaatttgagttgagcaaaaaacctttgaccaaatatcagctccatggcacaacccacagttatggtgcccacatgaactcaggtttctgttcccaacctgaagcatacaacttcatgaggtattttatcaagttagatagtatcaaaaaatattcccagatgagggaggtgtctgaccaagacagtcagaaggccccttatcagccactagactggaggatcagccttccctaagcaggattgttctcactggccagtcctcacatccgggagggggaggagaggtgctaggggctgcaactgagaagggagagatcacccaccctatctgcagatgagggtgtgagaagccaagtcagaacaccccatacttcccaggcctctctccaaagtcctgttagaaatcgaattccaggagaccaggcaggggcagcctaggccctgggcccctaggaagtgctccgtgaactaggccctgcccaggcagcctcggaccccctcctctgccctgcctcctgatccctgtcctgcactgagcaggtcttcggtggactttatgcgcagccacctcaggatgaaaataccacgtctgcctcctgctgaggtccagcccaggaaaggaagaaggggaacgaaagatgccaatgcgattgcttttaaatcacctcattactaaaagaatcctcctttacctacggcactcagatcatcaagccctcccaaatcacttttcttttttcaaaaagtaaaaacccaaggccgtcttcccagtgaagccgagtcttggggcatcccgtcattcgtcccccgcgcacgggtccttccctccctgggcgccgcagttcggagcaggccgagggggccgggctgcagggccgcgccgggccagaagggcgcgccctgggcagcgcggacgcacgcagccggctcctcccgcgccccgctgcaccccggcagggagttcgcccccgctaatgtttaacctcccgaatcgctgatccctcggactgcagccaagctacccacccgccccgctcccgggacgaattcctggcatagttttcccgcgcggcccgctcaccgtggggtctcctggagccggggacggcgggaagacgtctcgaggtggcggctcccatactcgccccacgtcccgcctccagacttgctccaccgccccagacagcccagagatggttcccggaatgctcaccgcccgccgttcccgggatgct

SEQ ID NO: 315587 - DNA, 4001 bp, Homo sapiens
aagggagctccagagacctcaacagagatgacagggacctgggagctctcctgaagtactgccactgcagagcttagccttattctcagattccatggtgttctccttttccactcttccctgaccctcatgggggctgcagcgactcctagaaccttcaagcagcgagacaaaggtcccctcaaccgggcacagcgctctccttacacctggcctcctattcccagcaactttaaggagatatttttaagtggccatggttttatcaaaagcctattaagtttttgccacaaacggattttatttaaaataaaaataggggtaggtatttgactgatgtctcttgggagtgttttagagaagaggaatgaatactgacatgtcctatcttcccagatgcagaattgtaaaacaaacaaacataattgcttttcacatgtaaaagaaaactggcttagaacatactagcgttttctttgccatgaaggagttcaccttcagtgactaagccagaactactagagctgccaggcctagggacaggagacattgccagtgcttagccaggctggccaggactaaccatctctgcaaggagtccacaagaagcctcagggcagcctttccctgctcctatcaatttgagttgagcaaaaaacctttgaccaaatatcagctccatggcacaacccacagttatggtgcccacatgaactcaggtttctgttcccaacctgaagcatacaacttcatgaggtattttatcaagttagatagtatcaaaaaatattcccagatgagggaggtgtctgaccaagacagtcagaaggccccttatcagccactagactggaggatcagccttccctaagcaggattgttctcactggccagtcctcacatccgggagggggaggagaggtgctaggggctgcaactgagaagggagagatcacccaccctatctgcagatgagggtgtgagaagccaagtcagaacaccccatacttcccaggcctctctccaaagtcctgttagaaatcgaattccaggagaccaggcaggggcagcctaggccctgggcccctaggaagtgctccgtgaactaggccctgcccaggcagcctcggaccccctcctctgccctgcctcctgatccctgtcctgcactgagcaggtcttcggtggactttatgcgcagccacctcaggatgaaaataccacgtctgcctcctgctgaggtccagcccaggaaaggaagaaggggaacgaaagatgccaatgcgattgcttttaaatcacctcattactaaaagaatcctcctttacctacggcactcagatcatcaagccctcccaaatcacttttcttttttcaaaaagtaaaaacccaaggccgtcttcccagtgaagccgagtcttggggcatcccgtcattcgtcccccgcgcacgggtccttccctccctgggcgccgcagttcggagcaggccgagggggccgggctgcagggccgcgccgggccagaagggcgcgccctgggcagcgcggacgcacgcagccggctcctcccgcgccccgctgcaccccggcagggagttcgcccccgctaatgtttaacctcccgaatcgctgatccctcggactgcagccaagctacccacccgccccgctcccgggacgaattcctggcatagttttcccgcgcggcccgctcaccgtggggtctcctggagccggggacggcgggaagacgtctcgaggtggcggctcccatactcgccccacgtcccgcctccagacttgctccaccgccccagacagcccagagatggttcccggaatgctcaccgcccgccgttcccgggatgcttccccagccccacgcagtccgggcgctctctgcggcggaggcagagcctgcccggcccactccagtgccgccaacctgcgggaccgcggacagagagctcctcggtgcgtcggtcagctcgtggcttggggtctctggtgcctccagctcctactacagccgccccgccccacctcaagaagaggtggagcctctcccggcccctctcggacgagctatttttaggtctgtaacggatgggggaaggcgggaatgccacgtttaatccgttagtaaaatccaggatccaagtgaatggcttcctggccttgctgagaggctggacttgccccggtttccccacaccctgcctccggtacaatcgatagcctgctgtgcaggggcggccgcaccccccgggcagatagccctgcccaccctcctaaagggaccgtcctggtttcttcctgaccggatcccaagctaggagagttctttgggtgtgccccaggtctgatcagacagacagcagccaccttccctccgcagcccccacccaccaccccctaccctcccaacctgctggtttgccctggggatgccaacttggaaacccaggactgaaaaacttattttttctcctgatattagtccctgatctcttcccatagtagtagttgctttgctgagattccgttttgtgggcaccgtaactgtgagttgtgccatagagctgatatttggtcaaaatgtttgttgctcaactcaaattgataggagcagggaaaggctgccctgaggcttcttgtggactccttgcagagatggttagtcctggccagcctggctaagcactggcaatgtctcctgtccctaggcccggcaactctagtagttctggcttagtcactgaaggtgaactccttcatggcaaagaaaacgctagtatgttctaagccagttttctttcacatgtgaaaagcagttatgtttgttttacaattctgcatctgggaagataggacatgtcagtattcattcctcttctctagagcactcacaaggggcatcagtcaaatacctacccctatttttattttaaataaaatccttttgtggcaaaaacttaataggcatttgataaaaccatggccacttaaaaatatctccttaaagttgctgggaataggaggccaggtgtaaggagagctctgcgcctggtggagggaacctctgtctcgctgcttgaaggttctaggagtcgctgcagcccccatgagggtcagggaagagtgggaaaaaagctccttttcacacacactctctctctctccactccgcaactcttctccctccctctttctcttttttccatttcaaaggctttcgtcccaccacaatctcaatctgccaagctctacattttgaggcagccaaagcaaatgtgtatgggaacaagcgttgtcaaggacttgcagggaaactggaactcctgtgcattgctggtgggaatgtaaaatggtaccattactgtggatacagaatggtagttcctcaaaaaattaaacaagaattgccaaaagatccaacaattccatttctgggtatataccccaaagaactgaaagcagggattcaaacagatatttgtatactcatgttcataatagcattattcacaatagccaaaaagtggaaacaattcaaatgtctatcgacagattaatggataagcaaaatgtggtatatccatacaatgtaatattaactttaaaagggaaggaaattctgacacatgaatgaaccttgaaaactgtcttagtctattcaggctgctataacaaaataccattgagtgggtagcatataaacaatagaagtttttttcttacagttctggaggctgggaagtccaaaatcaagacattggcagattcggtgcctggtgagggcctgtttcctggttgataggctgtcatcttctcactgcaccctcacttagtagaagggggctggctagctctctggggtttctttcataagggcactagtcccaattatgaggactctaccttcatgacctaaccaccccccaaaggccccacctcccaataccgtcaccttgggggtcaggatttcaaccccatttt

SEQ ID NO: 315588 - DNA, 4001 bp, Homo sapiens
tccaacaaagatggcactgatagcacgcagctttgcgcattaccctgggcctctgaatggggacgatgctgacacatcatcacagatgaaaagtccaacactatcaaactctgatcacttcatttgccaatgaggcactgactgtaacactgagaacttaattatgccagatgacagctgacactttacattaattcattttttaaccatctccaagaccgtataggacctcatctctactcctctcctcctcgttctttctacactagccacatggcatccttgtttctggcatacagtatcccactttagggtctttctttgccatttcctctatctaaaaaccttttcccatagaatatggctccctttctcaactccttgaagcatttccccaaatgttgctttcttaatgaggtcaccttcccatttcccttatcaattaccaacattattctagagtaataacgtctatttttctctttatatcattttccttacttatttattgtgtttattatttggttccctaccaaaatgtaagttgcatgccagtagtatttttgtttttttcactgagtctattgtgtctagaaaagtgcttagcacattgtagattctcaatgaactacttattgaatgaacagtcctatgaaccaggtatctcccttggccagattttacctaatgaagattctgcagcagtgagaacttgcctagagtcacatcgtcaaaggtggagctagaatctgtaagcaacctggctctctactctttaccactgctgcatgttactgcatggtgcctctcatttatgtggtgaatttcaaaagtactattttgtatgtttcccttactagacagttccctcgcagcaggggatactacttcatctctgttccctgactggcagtttctaacccatgttacacgctctataattgtttacggaatgaatgaaagcataaatgaacacacaagctacccaaagatttttacatgaatgtcccaactggttaaatcatttttatctttcagatttaaacttttataaaaaacaaaaccaaaacaccaaacctgtcttcaaaaatctagtaattcaaaaaaattcttttgaagtgaaaaaacatgatttctgataaacgatttaattaaatggaaatgtaccctattcttacaatttctacatcctggtttttaaagctttattcgacgttaggaaatattaagcaaaaagctccaaaaccagtaactgactcgcttcattacatacacatgcaataatattaagctatctccgatttaaaaaacgcaaataatagtgccattttcgtagacatcgagaattataaaacaatcaatcatgccagagagaaacagacaccttcacttacaaaaactgacgctaacgagtaacaccctccggagcaatacctggcccagggtcagcaggaggtagtcttctcgaataaatgtgacaaatactttggtcagggcatgactaatttgccacataatgccaataggttgactctgagaaactaccatccccgggcagaaggggcgggtgtaggagagatttaaaaacgaggcccctcccaggccgcctcaaaatctagggcccaagattcttctcctcagagctcctcaccgtgtctagactaggggcaagcgaccatttctcaggtagaggatgacgcacaaacgaaaaactggccatccaacatgaaggacgaggaagcgcacgaaatcagagcgcacagctgagtgaggaatcccccttctcctaaccgattcctctcccgagaaatcgcgagatttctcgccttcacgggatctcaggccgaaacctcgcggcctctcagacgagggtgggttagcgggggcagctcccaacccccgtcctggacccacaaatcacctcgacccctggcccaccccggccgtcaccgagaacggtcccctagggtgcctagggacttccggagcccgaccggatccggaagcttctgagagcgagggggtggggccgaaaatcaaaaaaagcgcggcgaaagctaaaggccggcgcacgctgggcggtggtggtccctaagccgggccgcggccggtgcaatggactccactgcctgcttgaagtccttgctcctgactgtcagtcagtacaaagccgtgaagtcagaggcgaacgccactcagcttttgcggcacttggaggtgagaggctctggggtagaggacagatggggcttcccctagcaattcttatttcacagtgaggccgaggagtggcggccccagcctgggaaagaaaggacagtccttcgatccctctgttgtcttttcgtactggtaaaggctagtgagtgtcggggttccgctggccgcagcgagaggcaagagcgctcactgaaggctctaggaaaagcgggagtggggcaaaaggttgggaagttcaggttgtttcgagtaggtaacggaaaaagctcggaactttatcttttcctttgcttctagttttggtttttctacgaaaccaagccctcaatacacaactattctcagtgacggaaagtcatgattaaaacttggttttgcccttcggtaatctataattgaatttgttgcttactgctcttacttgaactcgggttgaactcaaacttgaaaaacattatttcaacattaagaagcacttccccttcctagtaagcgtaatcctttttctttaccaaaatacattgcttacagttttttaatcttagaatgctgaattgcctttttttctattctagtgatatgtgtccagacgattccgtttgttttaggatcttaatcttctgctttcatttgttttgcatttacggaattcaaactaacattgacctcagtttaatttttttaaagctcaattaaggcttattttaactctctgtgtcacagctttcctctgttaaggtagaattgaacataattttaaaatatattgtattatattaaccctatgataaaagactaatgtgccaaaaatttgtaaaatattacaggaaaaaaatgatttccagtagtagagcaacagcagctgttagtgaagctgctgttgtattaaatgtgtctgtcttatcttgagcttcactggtgctcctcttttccctacttcaagtgcccatctcctaagtacatttgttttctctttttcattctttattttaagaagtgcctgcaaacctaataattaaggtgttagctgttaaatgcttaaggctttgcttctgaattagcataggctccagaagccgcagaataagcagggcagtccgtttaatttaaaaatcgggagttaagcattttgtatgctattctgaagcattacctttctttgaataaacaggaaggttgtgcactgaaagagatttaaggcacaggggcttacacctgtaatcccagcactttgggaggccgaggcgagcggatcacctgaggtcgggagtttgagaccagcctgaccaacatgcgaaaccccgtctctactaaaaatacaaaaattacctgggcgtggcgtctctctgttgtcccagctactcgggaggctgaggctggagaatcgcttgaactcgggaggctgaggttgcataagtagagatcgctccactgcactccaacatgggtgacagagtgagactccgtctcaaaaacaaaacaaaaaaaaagagagacttaaacaaaatatgggatggggtctttactgtattcctaaactttcaaggggtttacataaaactcttctaccgttgttgcaaaggtatgaagagcactggcttcaggttactactaaaaaggactttttgtaattaagagataaaatacatacagagcataaagtgcattaatcttaagtgaagagtttgatagtttttaatatataggtaccatagctaccatattggtagctaacatataggtagagtagctaccacctgtatcatgatacagaacatttc

SEQ ID NO: 315589 - DNA, 4001 bp, Homo sapiens
gagaggaaaattgtctcatcatccataataagttgcttttttagggttgtgaggatcaaaagtaacagcatatgaaacagattctgtgactgtaaactctatatgaaatatgaaaggccacagcatcatcaaaagctgatttcattccgcatagaaactgtcaaaattaggatttgccatactcaagttccatagctgttttttgtttttttttttttttaatagtgatggggtctcactatgctgcccaggctggtctcaaactcctgggctcaagctatctgtcgacctcggcctcccaaagtactgggattatagtgtcagccaccactctcagccagttccacagctttaacaaagacacttcgtagatgttcatagcagacaactgaactgtatctccgcaagttatcctgctcgtgtttctaaactgcagttagaatacaacataatagccatcttaattcacattcacacctgcctcaaactgcaggacaggtgcacacatgaactatatgatttaaattccacattgcccttcaccaaaagaaaacatcaacttagtaaactcttcaggaaatgatgttcttatcttattcccatctcttctctctgaaagagctggatctgctgtcagtaggaagcatagcaatggcatggcaagtgactacacaaagatgggatttcattatctaaaacgccctcttcacatgtgttgagtcacatctattaggtcctctgacaaaaacaagtcttaacaacagcgttagcaccacggaaaccagaagttcatgaatcacggagggatgctctgtcagccaattcctaactgccaaaccttcacccaggacatagggtggaagtgcactctctcaacagcgtctataattatgtagaaaaaggtccggcataatgactatttggacattccttacgcctgctctcttctgcttccaaacgtagaccaatctttaacctatcccaggctcacgaactctgatttgactctttacccacaaggaacttggtctggaggaaaagcccgggtggtataggtgacctcaaaagacatccaagtcaaatgaagcacagaaaggagatggaagaagactctgatgaggcgcagagaggatgccaattctttggctgtagaggggacaaagcacagtatttgggagtccaggaccaagtcggaggagaaaagcagggaagagaatgggttctaaggcagtggatgaggctcataacaaacaagaagcgtcttttaaatgtggagaaccctgatgggagcatcggaaaggaggggaggggtttcgagggagaagtggacccggataagaggggggaggtttgccttgggggagggaggtttgccttaggggcgaggttgggggcggggagggatggaaatggaaagaggccaaagacctttggaactagtgtttgagactgtgaggtagaagaatagtagggagtgacgaagatttgggagaaataatctgggtaaaagaagggacaaatcgatgtcccaaaggatttggggttcgagagaaagtaactgacgctggcagggggttccctggaatctgaagggccgagggaagaaaggaaggagtcaaggttgatatgtggcggctggagcggccgaagggaaccgtggggagcgctgacttacaacgaatagtgtggaaggaggcccgcggccgcttctcgaagctctccccgagcctcaggcaatgttcctcgcggtccagcagcgggtttgcggtcccattcatggccccgcacctgcctcgcacccagatcggcgctctcccggtgcagccgcgatccgagcttctggcgctggcgtctgggaggactgtgcttccgggccaccgctctggaagacaaggagagccgagccggcacccacccgggtccagaagcaagttctctcctctgcgtgggggtgagagaggaatctgaggaggcaaggccgtgggacttccggcgtcgggtaggaacttccgggttcctagcggaagtggcgggggcggtgccatggcaaaagaactcccggataatccgaattcgtggtcctcagaattggtttagggttgtttcgcggttcttcccgtattctgcctccgaggcccagtggggctggctgtggggtgagtgcgcctggccctagccctgcaggtgaatttaggaactgatgacggtgagccctgagcgtggctgactaaattaacgcgggtcggctagccatcatggacgccctcctcagggtctaggggcccatgcagcctagtctatcctgagggtcctgagatggatcctcgggacctcagccacgcgtcattgggtctctttctccactttgcccggtgatggcggtgcgagggtctcagtccctgcaaagtgacgctccctctggttcctatgacagcctcttgtgagtgtgatcaggaaatgagcccacccaggcttagcttcatttcccccgaaaaaacggaggtccgacccttgggaaacgatgacctcacttgtatctgacaattgaccacccgcttccagctaaggccattgtggtttttaagtcacccctttcgcgggcaccgaaaattgaggaatattttcttcgcaaggtttcccagtcagttcttgagagcgtcctttttcgtaaactaaatcgatttattgtaatagttgactcatctggtttgaataaaagtatggtgcatgagatagtctggccactgaaatgaatgtaagcccactgaaggtagggactgtgtgtttgtcttctttgtgacctctcatatagcgggaaggatttttttttgtacagtctgcatctcataaacatttggtgaattgaacctggcgtcttgaactgtaaccactaaccagaatctaattcttttctctgcgaagccccctgtgctgtttgaggcgtgaaactcacctcaggaaatgtatctgatccattagcgtggattcatattatttggtgatggagaatcttcagctgtgttaagtgttaccgtcagtttcagagatggcttctttgcaaaggaaagggctgcaggcaaggattctcacctctgaagaagaggagaaactgaaaagagaccaaactttggtgtctgattttaaacagcagaaattggaacaagaggctcagaaaaattgggatcttttttacaaaagaaatagcactaatttcttcaaagacagacactggaccaccagagagtttgaggagctaagatcatgtagagaggtaagctaatattacgccttatctgagctgttcttcatttaaaatgtgaagagggtgccatggctcatgcctgtaatcccagtacttggggaggccaaggcaggcggatcacgaagtcaagagatcgagaccatcctggccaacatgatgaaaccccgtctttactaaaaatacaaaaattagctgggtgtggtggtgctcgcctgtagtcccagctacttggaaggctgaggcaggagaatcgcttgaacccgggaggcggagatagcagtgagccgagattgtgccactgcactccagcctggtgacagaacgagactctgtctcaaaagaaaaaaaaatgtgaagaggtgtgctgtattgcattcctagggagagtgcgaagtagagaatttaagaagcctatcaaaatgctttgcgttttaggagagaaatatactgtttggtcttaacaccaaagttttagcagtttctggtttggttaacatataggagagagaactttagtgggtgttttctatttctttaagctgatctgatagttgtaaacattatatattaaattcaagagccaggtctggtggctattgccagctactccagaggctgaggcaggcggcttgtgcctgtgaatagtcaacatgaattagccaagcctaggcagcatagtgagaccctatgttctgaattttaaaattttaaacattaaaaattttaaaaacaaaaatat

SEQ ID NO: 315590 - DNA, 4001 bp, Homo sapiens
tcaacaacaacaataaaagaaaataaggactgaaaacttttctaatagttctgtcttccacaggactaagtgtgtattcaaacatgtatgtttgtttatttattattgtcattattgttgttttgcttatttttgtttattttcattctggtagctggatcatctgatcctctgactttcaagatactggcattttcagaacctttataaatgaaaggctgtgaaggacctgcaagattattttcaaaggcaattttttattcatttaaattgggatttgtgccctacataagagaatatatacccaaatcatatagaaatatattcttaagcaaatttttataatcttaagcccttgtaacttgaaaaattaatattaagactattgcatacctgagaaggaagagaaaaggagagagtagatactatttgagaaaaaggcatggaaaaaccagataaagacgcatatcacacttccggaaaatgggactgaagagagagaaactgcagagccagcacagcaccatctcatcgtggggagctctggatgagaaagtatatgataaagaagaataaacaagggacactgttgaagagtttctgttcacaaatatctcacccatttattctaccaattggatgttaattttgctttaaaaaaacccttttagtaaatatattcttgcagggttaaaaccagtggttcttcatacctttactttgagtaactataactaaattgtctacaacttaaataaacttttgggagaatgtatgctttaattagttgttttgattgaaccatggaacatttcagagtaaaaaccataaaggtctctaaacaacccgagaacagaatgactgagaaaggcggaatgatgagatattaaggaagggcaaggctggggaaaggaagtgaaaaaatacttacagttttaccacagaaaaatgagaagttataattcagtgatcttgaagtttccttcccgctctacaattctatgacagttgttatgcaaaaaacgaatgtcttacacataaaaacttatatgctatattttccttcctggaatctatatcatccaactgctaaagcaaaagagctcctttttctactccaacaacataaaagagaataatttattaaaactagttccagaggacataaagaaaaccaaagggtagaaatcatagggaggtaagcatcttccaaataaagaaattaataacacaccctcgaatactttgataatcagtatttgataactgagtgaaatctggggtccaaagagatatacagatcattgggatggttgagaatttctccctttgcaaagaacacaccaaataagaaccctcatctgccagaggtgagaaaaagtgatgaaaagagagaatattgccccaccagcctcaaggcattcaagttccccggcattcggtccttagtcccttcccatttgtcaccttattattttcctgtccacccctgcatcatccacctgtcacgtctgtctccacagtcacctctacagacttttttcacactttcccttcctgtctgctggtctcaacgctctctgtccagggtttacccacatttgctctactccgattccttccaccgaccccctaagactccgagcaggttagaggatcgcgctgcctcccccctccccgccccgtagtctccaacagtgtaaggggtactgtgggaacaaaacccagaggggtttgtgcctcttcacccccatcccgggaggctccccctctatccccggatggtcctcactcacagcgcacagtgtggaaggcgcagcgcggctgcttctcgaaactctcccctaacttgagaacccgctcgcgacggtctaggtgtgagaatcccgctgcgctattcataattactctcctgctttgactttaactccgccaccagcgctcactatctgccacctcagcctgaagcagctgcacttgatcccgccagccaagtcacccagactccaccccgcgctcgacgcgcaccgccccaccggagcgtctcacgttctgattggcttattagcaaagggcgctccgccccttgactccgaggctcctagtcccgcctccaggccccttcccgcgtcgcgacgcacgctgccccggaaggccgcggcgctgtagtgcggcgtgggagccccaggttctttagtggaagaacgcgaagcgaggatgaggtaacttatctgaggtggtggctggggagggagagggccccagggcgcctaccaggaggccaggaccccaggctcctggacgaagtcagccggcttgtaagagctcttaacgggagaatcggcctgccctcacgcccactctgtagagatctggtgtggaaactgaggcctggggaggtgcagtgtccaggcacagggcctagtgtcttatccaaggcctggtagcgcgaaagccgggtctagaatctggagtaaaggagcccagaggccccagaatctcggtccttagacttgaagcgacgctgttacctcagtaatcgttttctgacctttttgtaccagaggaagtttcttgtggtcctaggactggagaaggggatgtgtagtggggaggagaaagaggattcggagatagcaactgcagacatttaggatcagccgcaacaggatcgcactgaatttccttttcatttattttcctcacagtgatccgtggaggcagtaacaggcgcggcgagggagaagtgattcccgaagaatcaaggctgggccggacccggtggcctggcaacagggtagtagccttaaaatagataaataattgtctttttgtgtcaaatttcatgaatttaatgtaaagatgggagaagtgttgaattataggagaaacactcgagaaagtttacagatggtttccataacaggtggtttttcagggtaattacgcaatccaactgcactccctcaccttctgccttaggcacatttgtcaattgattttggggtaggtggttatgtctccttcaacctgtctgtgtaaatcctaccctttgaaggtgtgccgaagctgtttcatatcgtagttaaatgctttaaggcagatggtggctctagtttgaacccctgctttatacttaacagtgtgactttgtgccagctaattacattctccagagtttaagtatgctcattgttcaaattgggaaaaaaataatagtatctgttccttagagttgttggaatgattaaatgagttaatacatgaaagcaattagaacaattcctggagcatgataagaggtctccaaatggttatttaaggcccagctctacacttatactacattttaagaccatcttggtggctgccttctcttctaaatagaatcattctaggaggtaggaattgctattttgtttacagcaagaaaaatggttcagagaagcccagtcctctgactttatggcctgtattcttatctgtgtcatctatttagcatttaacatatatctgatattcttaagtatatttttttgtatctgtgtgtgtgtacacatgtacataaacatacttttctttcccaaccagaacaatagcagagagtatgtcttgtgtagaatctttgcatcccctgcatctaccatactgctctgcacatatttgttgatgacaataatgatttagtgatgttttattacggtagccaggagggcacaaactgttttgagcctattttacgttagagaggcttccaactataaatctgagctttctctattgtaacaagagaaaaacagaaagtcaagaaattgaggctcagaatgcctgaggtttgtgcatttactcatactttcaacctgtatttagcaaatcctagtacgtgccaggtactagtctagccactgggaatacagttgtgaaccaaagatataagaaggcagccagcaaagatggtcttaaaatgtagtatgatggtagaactgggctttaataataac

SEQ ID NO: 315591 - DNA, 4001 bp, Homo sapiens
aaatacacttgtggatgacttaatttttttttagatggagtctggctctgtcacccaaggtggaatggagtgcagtggtgcaatctcagctcactgcaacctccacttcccaggttcaagcaattcttatgcctcagcctcccaagtagctgggatgacagacgtgtgatgccatgcgcagctattttttttatttttagtagagacggggttttgccatgttggccaggctagcctcaaactcatgacctcaagtgatcggcccacctcggcctcccaaagtgctgggattacaggcgttaagccaccacacctggacttttttttttttttttttttttaaataatgagaattagttcatgttaggagtgcatggatctatgattccacccaacactcccccctcaagatcttacggggtagatgccatttgaagcaaagggagtgtgatggttgatcctggtataacatcaggagctttaaatcccaaaaatgtggggttgctcatcttggcccagtagtttgccgctgttgctaagtttgggaacattcgtggtgacagctccccaataatggggtggcaaagtacacccccaaactcaaaatatttccccaatgcctttttaaccattgttttttttctcctcaaagactgggatctcagacacaatggcccgtagagcaatggagccatccatgcactgatctagaaacattctcacagcattaataggttgtcatctgtgctttcttggcaactaacttgacttgcgtagcttgtgtagaggggattcaaagtctccaaatagaagtgtgaacattaattctccaacccatggtcttgagctgatccaacctatggctgattctgcattgcagctgattagcagatcagcactctcaccatgtgaaagtcttccaatagatgccatcattgccttgaatcgtctctgaacttggagactgctggtgcaaatcttatcacttgatccagccgcaatgcctatcaaaaggtcacagcagtggcggagaactgatgacttctcaagggcaataaagttaggcatatctttgaatctgctagcataaggagtacccctttcctcgttctcattcccaaccacagtattagacctcttgctcacaccaacactcagtaatgcctggtgtaacccatcaaatatgaaacacaagaatactaaacttggggtcacagggtggaaatgagatttatgtgctgggtctagcatagacttggctgcttttttaatgtccttaatatccccaatgctgggttggggttccaatgcatccagtggatactgtctgtttttcccagatagctcaaatcttccttgaaggtcagggagcccactcctgtccattgcgtcatctcctgggctgctgggctgtgagtcctttcttagatgagacattgtggaaaattggttccgacttaattctttaattttgttaagaatcataggtctaaaagatcttttgtaagatctgtcacagacccaaacaaaaagactgtgagaattaacataagcatacaatttaagaaaataacccattattagtcgctatgacttgactctgcacttctttaccatttttccaaaatacctcacgttcatgagcaaaacaaaacatattttgcttcataaaagaaatttttatcatgtatacattttaatagtttttctgtcaagaaatatagtatgggattattttagtatcttatttagcaacataactatattcttgggaacattctaaaaacaaattgactgggctgggtgtggtggttcacatctgtaatctcagcactttggaaggccaaggcgggaggatcactagagtttaaggctgcagtgagctatgatcactcatcaccgcactccagcctgggtaacagagtagtctatgaaagcagagccagattaaccttaaaccaatggttctcagcaggggacaacctcccctccctgcctttcacatctccaagagacatttggcaatgtctaaagatatttggagaggggaacactactggcataagtgggtagaggtcaaggacagtgctaaacctcttataatccccaggacacccactcacaacagaattatctggtacaaaatgtccatagttccaaggttgagaaattgtatccaaatttaattcttactttgctatatctaaatcttgacaactggaaatattttccatcataaagagaaaagccatcaagtagttattccaaacatgggaattatgccctagagacaccctggaaaggcatctagaatggcatctcagggcaatgagtgccaccacagtatgtaaatccaacaatattaaaattacagtaaatcaccaatctctttaatccaaatctctttaatggaaaaaacatatagataatgttattagtaatattctactttggggactgaatggtaggttcacaagtatgttatcacacttaattacatattaaataaattcagtctattttaagaataatatattagaagcaataaaatgattaaatatagtaaataatatactagaaatagaaaaaatatacttactctgaagaaggataaacacagctaacaaccatcacattctgcaataacaaaaatcagtgatttagtatgaagaaaagtactacaacataaagtttcatcatttttgtttctaaaatcactctggtgggttaaattcccattgattctaattttgctagtaaaggaaaatggttaaaaatgaaaactggtgaaacagcaaaaactaaaacaataacaaaggaccaaaagagaatatcctactcagccactaattttttttttcctatacttattttttaccctaatctagttattctagacccgtaacatcatacactatacgtagtagagtaactaagctcagatggaatcaacaaagatgttgagagattgaagtacttaagacatatgtaattgattttccttacaaagcaacacccaatccacggcttgttgtgttgcatcatatatcccacagaaagagactcaaaccttttttgtaatatatttatgatcttcccagtaaaaataactttactaatattcagtgttcactgaaagtttagtatgagtcacagtaagtgttttgcatttaatccccctcccagccctattattaaccacattttacagaggagaaaactaactggcccaaggtcacacaactatgaaacactgcaaccctgatttaaaggcagggcacctggtatgactactgtaacatattgctactttatctgaaaatctccaaaatgtaattattacaactcctggagctgaaaagtaagtactgatgagccatctcagtttcctggcctttggggatattattcaattgagtgtacagaggatcaacaaaatatattaatccagtatggccacaaaaactactgtaaatcactatgtaatggtttttgattcctgttcccagggtaaaataaagtggatttgaaccagatccttaaatgaacaggggagtgtttccggaccaaccatcaactgaaaattagaactcattagtccaatcttggttctcacagggcttccttcatttttcactcaagacaagtcaatttcttacttttcattcccttaaacaccttgaatctttgttcttcacaccatttccttttttttttttttttctgagacagagtctcactttgttgcccaggctggagtgcaatggtgccatctcagctctctgcaacctccgtctcccaggttctagcaattctcctgcctcagcctcctgggtagctaggattacaggcgtgcaccaccacgcccggctagtttttgtattttttgcagagacagggtttcaccatgttggccagcctggtctcgaactcctgaccgtgatccacccacctcagcctcccaaagtgctggaattacaggcatgagccaccacacccag

SEQ ID NO: 315592 - DNA, 4001 bp, Homo sapiens
cctcaatgcgctccacctgtaggcaagataggtagaagcgctgtgtcttctgctcagcttcactgctggagttgaaggtggtgttttctgtggggcagaacacaggatccaggtggcaattacgttaactgctgagggggagtccctggcccttgctcggtttctctccttgccttgtcaatgagcagtcctgctaacgcagacccaggaagagtgtctgaaacagcaagccgtggcttcctctccctgtccatggagacccaaggatatctaagcagtacaggctccctggtgtctaccacaccacgacagtgctccaaacagagtgcagagaagcggccctccattgtacccagagttctgcccccatcaaacccatctgcacttctcaatagtcccctgctctctgcctccccaccctctggagtgttcacagaaccatccacttcctcattcatggacactgcctatttgctaagtgccaggccctgtgctgggcacaaggcacataggtggcccaaggcctccctaacagccccactcaccaagcaggtgcttcagtatggcctggttttggtcccagaggctgttgaaggtgttccagcgagaacgcccatcgggcagggggttcctccgaatccagcccccacaggagaactggtaaaagtcctcacaggggctcacccctcggtccagggactccaggatttttccagccactcgaatgcaggcctctgtaaggcaggtgctgtgggatgggtctgtggtagggaacatggccggagggtaggagactgtcagtctgtctgtctggaagaggcaaactctgcaagggccatgacagcaggaaggttgggaagagaaagcaaagccgggggcttttctgcagggaaggcttggttcccacaagtgaaaatcttagaggcccttaggcctccagaacccctagttatgaatactgacgaagagtgtgggcccacctacctctgtggtactggacccctagggccacaaggcagcccagaagcagtgcagccagcagtagagaggcacctgctaagaccagctccagctgcgtgcgtgagcctaacagctgtcttgtccccttctggaatcccacctggggaacacagggggacagagagtgactgagatgcagggcagggatccaagattaccagagggtgaagccacaggcagttttcagagccacagggttaactctgggcccgggggcaatgaggccagccagtgagttgagccttgagtctgttttgtgcaacgtcacggcttagcatcgcctcaccatagtcctagagcagaggccagagatggagcggaggtgggggcaggtgaccctccagaacagcccagagctcctgggtgtgccaggcgtcatgccagggctggggcctggtgagaaaggggaagcccccttgcccacctccatggcgtccggggaggccccgccctctacgggggtctcgggtgcgtcttcatcccgaagcgtggcccgtttgtactccaccatctgccagacagtcggggttgccaaccgaggtcaggcagagagggctatttgcccacgaccctgccccagtgctccctgcctcgcggacccctccgccctgctaagagggcccttcccttcccacctgccctgctctcgggcccggggtctctctatcacccctccaccaggcccgggaggcagccttacctccgcgagccgggcaccgcctgcccctccgcggccgacccctctgcctcgtccccctccacccagtcccctcccgtggagcccggggcccccactcacgttgctgccagctcccagctcctgcagcgcgacgttcatggtggagtcgggccaggcggtgattcagggctcccggcagctggcccgctcccgggccgcggccccggtcccctgcccggccccgccgtcaccagccatcacggccgccgcgcagcacccccgctcggccgcggccgcccccccccccgcccgagtccaccgccccacgcggagccccgcccggggtggggggagggtgggggagagggaggagcgcgccgaggctctccgcaggctccagctgccctccagcaacaccggagacccctccacgcttcatggtccgccccccatctcagcagcaccctccttcaagccacccataatttactttcctaggaaaagtaatgaaattcaaccaggcccagacgttgctaatactccttggcctacttcccccaaatttcaggctctctccatcccctttaagcactttagagaaattatgccctcctgaggaacgtcttcccccagtagtccacacagcccctcttcagccggcaaatacatagcacacaggcagttcactcacattcagggtgtgcacgtggtacctacctatgtgcagagaacgcatagacgccaaggcgccaaggacacgggcaggcacgacgcccagcacacagtccacacacacacgagatgcccacagaatgtacacacactgcatactcacacacagtgtacacacgcacaacacacccagagccaacacacacgcacactgtgtttctgtatgtacacacaccaagtgcagggggagcatacactccacacacacacagcctacactgactctactcttccatggcgcttcaagaccacacttctactctccaagataactgctgtcatcagatcgtctcataaagggagggttacagatggtgacaaattggcagggaaaaaaacagccatgcacagatatttaaagaaaagacgtgctaacacttctaacttggggaaagcaaaccgttttatttgggagatttacaaggagaaaaaaaactaacaccaagcaatatttaactgaaaagcaatagtgtggcacccatgcatctgccatctgccttccatattgtcattccttaatcaggcctggtgttattgcagtctgttgcactgaaaagtgcctagtgttttacaattcaaaaaaaaaaaaaaaaggaaaagagagtgcgcttcatcttcctctccccatcctccacccccactgagaaagtacaagaatttgacctgagaaggcttgagtgggtagcaaacacataatccatttctttctttctctctttctttctttctctctctctctttctttctctctctctcttctttcctttctttctttcttttctttcctttctctctttctttctttctttctttctttctttctttctttctttctttctttctttctttctttctttctttcatctttctctcaagaagggtgtcagccgggtgcagtggctcacgcctgtaattccagcactttgggaggccgaggcgggtggatcacgaggtcaggagttcgagaccagcctggccaacatggtgaaaccccgtctctaccaaaaatacaaaaattaaccaggcatggtggcgggcgcctataatcccagctacttgggaggctgagatgagaatcgcttgaacccaggggggtggaggttgcaatgagctgagatcatgccactgcactccagcctgggcaacaaagagcaaaacttcatctcaaaaaaaataaataaataaaataagagaagggtgtctcactttgttgctcaggctggagtgcagtggcatggtcataactcactgcagcctcaaattcctaggctcaagcaatcctcccacctgagcctccctagtagctgggactacagacacgtgccactgtgcctggctaatttttaaattttttttatagaaacggggtctcaccatcttgcccaggctggtcttgaactccaggccttaagcaattctcccacctcagcatcccagtgtgctgggattatggcgtaagtcaccatgcctggcccataatccatttattgacactcacctcagttctcagacaacttgctgcagtggatctaatgcagaatgttcttgcggctgagaaagagtagatgat

SEQ ID NO: 315593 - DNA, 4001 bp, Homo sapiens
ccatcacagctcactgcagcctggatctcctggctcaaacgatcctcctgcctcagcctcttgagtaactcggactatgggcacaggccaccatgcccagctaagttttaattttttttttttttgagacagggtcttactctgtcacccaggctggagtggagtggtgcaatctcagctcactgcaacctccacctcctgggctcaagtgattctcctgcctcagcctcccaagtacctgggattacaggcacgtgccaccacacctggctgatttttgtatttttagtagagacggggtttcaccatgttggccaggcttgtcttgaactcctgacctcaaatgatccacccgccttggtctcccaaagtgttgtgattacaagcataagccactgctctggcctaaattttttgtagagatgggatctcactatgttgcccaggctggtcttgagctcctgcgatcaagtgatccttccaccttggcctcccaaagtgctgggattatgagcatgaatcatgaggccagcccagagtccaagttcttttctttttttttttttttttttgagacagagttttgctcttcttgcacaggctggagtgcaatggcatgatcttggctcaccacaacctccgcctccctggttcaagcgattttcctgcctcagcctcccaagtagttgggattataggcatgcgccaccacacccgactaattttttgtatttttagtagagatggggtttctccatgttggtcaggctgatctcgaactcccgacctcaggtgatccgcccgccttggcctcccaaagtgctgggattaatggcgtgagccaccgcgcccagccaagttattaaccactaaattatacttttttttctatccctagtaatgttctatttctcaaactgagtggaatagacacacacattagatttgttatttataccttacatatatattacatataccttttttatttattaaagacttcacttaaacatacaaaggcttttacaaagagcaaagtaaaaacgacaattggaagaaaatctgttgctcattcaaactttactagcgcctccaaggctgacactaggagagaacctcaagaggtcagccgaacaccccagagccctacctttcctccagcacgtctccctttggggaatcgtatcaccctgggcggcaatctcccctccacccctagagggtgctgttctcactctctaaggcataggaccaagtttcagacaggactctctctaggtgactctggctcccagtgcccaggggcaaaaagaaaagcgctgggcattattctcgaggtgcctgcgcgtgccgcctccgatgtgaactcgcagtaccatttctagaactgaatctaaagctcagaacgggttcatgacttgtcctaagttttacaagtcaattagcgctaggacttgatctcggtcctctgagcaatccggtccccaaggctgcctgcctcccgagggtccggacagggtcttgggtacccccaacgctcaaactctgagggactgtctttctccagagggccccgggaccaacaatctcttactcctgttagccttgactaaatacagccgggactctgaaggagctggatctcgcgtcccaacgcaggcgtcctccaagagggatagacaggcgggaggaaagcggaccaggccaagcccatgcggcgccggtcctgccagctctacctggcggggccgcgccgggattacccacctagcacaaggatacggtcctcgggccgcagctccggctctaggagggcacggaaggaggagaagtccccgaaccaatcgtagggggcagaatcggctgcgccttggtagcgctgatcccagtactcgacttcgcggtacccgcagttccgctccggtaactccggaggcgccctacctgcccctggagaggccatgctctcaaccgccgggcagccagagccgccggcccttcagccaatacggaaggcaggatgcagaaggcggggcgctggtgtctccgcccaccacctgcagttgctcaacacaaacacgtggaacttccgtcctttactaagcgctcttcgaagaatcctccggctgggaaaactatcgtccagaccctgaatcctccggctgtactgccaagtcatttcctagggccgcactcaaggtgtcagactcacgtgggctcatcactgcgtcctctcatattttcaatatgaatgacttttatcaggaaatctgaaaattagtgaaaggttcatttttctcagcatccggaaggctcgaagggcaggcaggaggggcgcgaacaggggctttgccctcctggagagacagcatgaacacagatgttcccagcgcaggcgaaggagaatgctggcttcagcggttgtgggggaggtaggcaggaatgttgcttttctggacattcgttctaaattagcgcctgtgtacccagggctgggtataaactgaggagtaagacattgtccctgctcctatggagcgtggagtgcatcagaggagacaaatgcagaaaaattacattttagtggagtaaatgaagactggctactcggatcggcgcttagcctggtgggacgccaggcacgggaagcggaacctaagtgtcgaaggttcgggtttccgggggtggtgggcccacacaagcggcgcaccgttaagatggcggctgggctgcggaaacgcggccggtccggttccgcggcccaggcagagggactctgcaagcaatggctgcagcgcgcctggcaagagcggcgcctgctgctgcgggagccgcgctacacgctgctggtggccgcctgcctctgcctggcggaggtgggcatcaccttctgggtcattcacagggtggcatgtgagtgcgccgagggggaggggaggggagggagggagacctgaacccgcgacccaaactggatctcagacctggaactccaaaccagactctgtatccactcactcgtcaattgcgaacccatccatatcccttacctgagcgccaagcctgctctacagaaaaccggatcttaatctgcccgcatggcagaggtggataccctagagattggccttctgcactgaacttacagcctgcaaaccagcttagaagtcagatttgagccaaaattgttgtactgctgctgctgctgcttttctctgtggctttggacacctcaggtctcctcctggatctcagctttttccatgtgttcagttctgtgatctttgaacgtcccttctcaatgatggcatcttgtgaccacttgagtccattaggcattattggctactcctttccaggctgaaactatactctaggcttaaggcacttggctttcttgctaaagactcttaattcaacaaatatttatttagtgcttattatatgcctagcattatgctggttaccagagagaggtacagtggtgaataagagatgcatttctgccgggcgcggtggctcacgcctgtaatcccagcactttgggaggccgaggcgggcggatcacgaggtcaggagatcgaggccatcctggctaacacggtgaaaccccgtctctactgaaaaaaaaaaaaaaaaaagaatttagccgggcatggtggcgggcgcctgtagtcccagctactcgggaggctgaggcaggagaatggcgtgaacccgggaggcagagctttcagtgagccgagatcacgccactgcactccagcctgggcgacagagcaagactccgtctcaaaaaaaaaaaaagaaaaaggatgcatttctaactcgggcctggacagtaagttagcaggcaattataatgcatcataatcatggtagtagtaacacaggataccataaagggcataggaagtcacttaaaccaggttggaggagtcagcaaaggcttcatagagccacccttggaaggtaggaattagctatttaaggaaagaaga

SEQ ID NO: 315594 - DNA, 4001 bp, Homo sapiens
tccatgtcaatcattattctaaggctctccaaaggagcggtccaatagttgtaacagccttaatttagaatcaatgataaattctatccagccctattattttaagtcttctacactcaaccatttccaatgaaaaggcattaaagtggctttcattcaaagtccccttaaaagaatgtttaaaaaaaaaaaaaagtcaggagatgagctaacctgctttaaggactggaagaggaaaatcaaaaataccatttgaaaggccggacgcggtggctcacacttgtaatcctagcactttgggaggccaaggcgggcggatcacgaggtcaggagttcgagaccagcctggccaacacaatgaaaccccgtctctactaaaaatacaaaaattagctgggcttggtggcaggcacctgtaatcccagctactcaggaggctgaggcaggagaatcgcttgaacccgggaggcagaggttgcagtgagccgagatcgtgccactgcactccagtctaggtaacaagaggtagactccgtctaaaaaaaaaaaaaaaacttcttgaaaatatttacatttttctcctatgcctccctctttaagagggagcacagcaaatgatcaaaagcagatgattaataaaagggagggagcatagcagatgatcgaaagcagatgattaataattaaaattgcccctgatgatactgtatatgatcaatttattgccaaaacagcttcaaaatgtatagagaaaaagagatgcactacggtaacttgatgacataactaacatccaacagtcagattagaaatggaaatatattaatcactttttttcaaattactgtattccagaagcctttaaaataagcacaataggatcagtgttcataaacctacacagcttctcacccaagaacagacccaaggagcttctaactaaacacactataacacatgcccccttttatcccagagataaaatttgccatgtaaacaaacattcaagtttccttttacttaaatactttttaggcaatcatcttccaaggtgaaggactaaaatgcaatccaagatataatggtggtgttattaacaataacattactattaacaactgacatttacttaacgcttaatacgtggcagacattgtcctaaaccttttaatctctgcagtaatcctaagaggcaggtactattattattttcaatgtatggatgaagaaacgtaggaacagagaggttaagcaacttcccctaagtcaaactgttagtaaggggtaaaagaggtattcaaagcccggctaaatccagaggctgcgcctttaaccactaagccggacacatctgtgccgggtggctggggaggacgaggggcggatggcctggatttatcttgcaaaaacgaaaaattaaacttcccgcaaagaagccaggatgaatcctagaataaaaccacggcgcactctgagataagcccccaaaggctgcaagtgccggcccccaaagccacagggctgcgcggcttgccaaaatccctttcccaactccctcccttcacccacactcttctgtccaaaagagccaacaggtgagggcgaagatgcccagcaatactgggggcttcggtctcccactccgcgtcagggcccggctgctgggggtggggtgcggcgagggagttcccggatccgggaagcctgagctggggcgctccggaattcgcggtcactaggggcggggacgtcgaccgcaggcaaaagagcccttggctctggagccgctcgcccacttgcacctctctcactcacacagagtccttaccactctcaaaaaagccctaggagttccacctcttcaaacgccgactcctctcacaaataccgccattcctcgccggcggccgccacaaccgattcaaaaactaagctgctctctctaagagccatgccgattggcgcgtgatgtcaacctctttcccataggcaggagtctccagaggggcggtgattggtcgacgctctccaagtcccggcaggcgccgcttgattggttgtgcgtgtgtttcaaataagcccaacgactcgggcgtcgggacgccaggagtttgcagagaagtgcccggatgtggccaggaggtggcggtggtggctcctgaggtcttaaaggagtagcaggtgtttctgtgactaccgcatatttactcagtaaacatcctacttcctgaggaaagtttgggtggattctcctcggccccacccagcttttttttttttttaaacgataccaaatcttttaagcttaaatcagtgccgccagagataaatgtttccctgctgcttgctgtgagctgtaggattttcctatcgggatgctttctgctttaggaatgtatttaaatttgagttaagggattttgactttgatggttgtattggcgtgtggcagggccaaggaccggtcctagaactcggactccccaggtggacttcaaatcagcagccgcttatttaaatgctattatttaaagcactgcgctcccatctagggagtatcgcgggttagaatcaattcttagaaattagaaaaattctcggatttttttaaagataagcttgaatttgataaaaatatgccacgagattctagaatttttggagccaaattgcttcgtctttgcccccctccgcccactaagaacttgtactttcccctaaagtctagtcaagaatgtatcaagtttttcctgtgattagcgttgctattatgaaaataatttctttattttctaaatatgataccatataacacaatctcttaagaaaaatacacccccaccaggtgggttttccatagttcccacctgaaggctaatataaatagaagaagaaaggggaatcagatgccagaacctaaataccaataagaagaggcaaacgtgtactttgggatggaacacttgtgagcatctcaagcaggttgtggggacttaacaattttttctaattttgtcaggcaatcttagaatgcctgaaaagtttataatgctgtccacaaaatgaatgaagcaatctggtaattattggtttccctgcttgtcagtatttaagtctgaccttcattaaaatgctgtgataactgttacggcagaaaaaaagaaaaacagtaattgaaatttccatttggaatgtgcttgcgtatttggaagtcgggtgtgcccagcattccaaaaacgttcatcactgaaaacatattaagctattgtgggaagcagccctacttcctttgtgcaccgctttctgctcaacagactttccaaagctaatgattaactgtgtatggtatcattgccatgaattttaagcttccctaacaaaagctgtacttgatttcttttaagggatgtgtggcagttagattaacaaataaacgggtaatacaacctttttcactctcttaggtcttcatttactcagcaaatatttactaattttaagacagccattgtgcttgttggggttataaagatgaataaggcatagaaaactgcctgtctggaccacacaatctggtgagggaaattagcagataaacagataattacagtataagggagagaagaaagagaatgaacatactgatactttactatgcactttataccttatttaatccttaaaacaacccacaagtaggtatcatagtcccatgataccatgaaactgtaggaaaggtttaagtaacttacccagtgtctcctaataaatattttagcccgcattagaacccagaaataatagatgagtgtaaataaagtctagtatagatctgtctgcaggctcaaagaaagcaatgtggagaggagtatttcagataatcgtgtgcataggtgatcatatgccacttaattgcacctagcagagggctggtgtctggtaaagtaaaacatgatccctcatcttcaggtattttcaaaaagctagtactgcaaaggcaa

SEQ ID NO: 315595 - DNA, 4001 bp, Homo sapiens
gagcggagatcgcgccactgcactccagcctgggcgacaaagcgagactccgtctcaaaaaacaaacaaaaaatctggaaaggccaaatacttttttttcaaaatttaatattttttctcaaaaaaattgagatagaaaatacacttatacgtataaacgctatggttaagcaagaaaaactcatcggtttcctagaattttgaaaaggctcagtcctttgaatttagcttgggatgtccccttgcttcggtagaaatcatgctctcaaactgcaatttaaaacataaatgtgtaaataaccacaccattttaaaaacccaactccgtttagtctataggcttccttatcagaacctaaggactggactccactgctttcctccaggtgaaggaaaatgcttgccccagacggtgccaagacactgagcaaaccaactcctccactcccatccaggggaggggagtcaactatttggactaacagggtctatggcaatgcacattccttccctacaggtaagaggtccttagctgggtgtactgccctcttggactttgatgtcaacagtggtgacccttggagctcagcctttgcaaacaaggctggtgaacagggaagactgcctgaccttcccggacaaccacgccaccagaggcgggggatttatagacagatcgtacagggcgatgacgttgacagtcaatctggcatccagtgaatttcacctcaagtatctggaccccaaaagtgggccacatagcttccctccccaccacctaactatcctcagcctaagaagcagcccctgtgaaggagaggctgtaaccccgttctgcctcaaactcaatggacggctttggagaagtcaactataggctttttacatagaaaagacgtgggtgtggcaatgtgatagaggtgggggtgcgaggtaaaggcttgttctgaggctgcgtttacacggggggcatgatggagatttcatttagagtttatgctcatccggaggaaggggtcggatggaagtggaaagccctccaagccagcccttggcactgccactgtcccttctggtcctggacctcagtatcctcacgcgtaagacactgagctggacagcagttctgaagtttggagattccgggagaatcaggagaggaaggccaccggcccaccccgcaccctcaagctcgggggtcttcacagggactcacacgggacagggcgcgggagcgctgcccgggaccctaacggccctggcgccctcgggggccccggaggacagagggctgcaccccggcgcggagggcggaaggaagcgcgtgggcgcgcggccccgggcggcgggggctactcacgggtccccgcggtcgggcccacggccgcggcagtggatggggttgagctcgtcctgggggaaggcgtgagccatgtagttgtcgtagccaaagacgaacatgccccgtgccaggtcgcgcatctgggcacgcagctgcggagggaaggcgccgctgtagcgcttctcgtactcgtccgggccgcggccccggccgcccagcacgtagccccagttggctgggccgcacatccccggcccaggacgccgcggagccttgcgcgggctctgcgctgccccggtccccggcggctgcagccacgacggcccggatacccccccaggccggcccacgggccccgaggtgggcgacgcggggccgtcggggctcctcagacgctggaagccgaagctgagcggaaagcgctggtagaagcccatgctgggccccagcccgaagacgagccacaatactccatggaggccaagccggaggagcaccagccccaggacgagcgctcgccattgcatggtcgcgcgggcgccgcgggcattattttaaagcgcgggggcctccccgccgaccaccgcaccccgcgctcgccccgtagcccggctcgcttcccctttaaggaactcccccgtgacgcaccaggaactagcccatcgtccccaacccccaggctctccggcgggccggccaggccccacggtcgcccgcccagtggcccgggattggcccggcctgggcccggcctcgcggggcgcggcccaggactccctcccacgcagtaggccgccaggacgtccgcgacgccccgaggccccgcccctcacccgggccccgccccaactcccaagccccgcccccctgggcggtccgtagcccgatgggctggcgtggcgagcaggagccgcgccggcccgcgagggaacttccagccaatgggagagcggcacggcagcgcccgccggacgctggacacagacgtgaccccagaccgcctggccttgggtggatcgggtctctgggcagagcgtgtgtccggcagagctaggaccggaaaaagccactctaggtctaggttaggagtgatgacagttaaaagatatataaggaaaagaaggaaaggatcgtttctgtataaaacgagctatttttgcatatcgagcgcataagttttataacttaggtgtctgtttatggagagggtgggatactaccttttagctcaaggagtgcacaaaacggtatcatgaattctgctcttttgattcaaacacccaactttgaagaatcgctcatggtgcttgtaaaacacgtatccccagatccctccctagacctatcgaacaactccaacggtctcgggaatgtgcgtgtaagtactcttggacagttcttagaaactggaagtttcaggaaatacaaagttatgttatattgcttttgtctcggaaataggatttttttaaaaggggggggcgggttgggggtgggaatgaaggctcccaccaccaccaaattatttaccagatatatctaaacatgtcttctcctgtccctcccatcctaccatctctcctgtgcacccgcaattagtgacctaacctttgaggtgtggggtagattcccagttaaataactttacccctctgtatctacttcctataattaagaagattgcaaatgttagctctaaagggctatggctttcacataaagattcaatggtttaggcgcttatttattttgcttgctgcatttggagttggctgtaagttttgccctccctaagtttagaccctatgcctgtttcatcagggtttctgaaaagcttgggaagcaagacctgactagacccccaaatctgatattggctgaatggccgaccaatggagtgcataagaaggtaagttgtcatgtggcactctcatcacattttcagggtagaggactttctgaaatacagaggaggtgtaaggggaactaagaaaacacttgattacagcacatggtagctggcacataggaaggtccttactgttggctgagccttgttctttcccaacattgagacatcgagagcagcccaagcagcaaaaagattacgaagacagcttgagccagggtctttagactacacagcttctgctttttcccctctgtgaaggatgcctagggactgtgctggcagcccagctccagcccttgatcctgaacttctgccttcctggaacttgcaaactgaatgtgaatattcagttgcatgttgcatgtttccttccggggctactttattgcaaattttaacttaaatttgacctggttaactgcaggccacattgaggacagcttctgtcttgatgttagagaaaaactcttataaaaataaatcttttaataaccagagaaaaccatccaactcctgaaagatgcttttcatagtaaaactgatggttttcaaaacactttgacatgtgtgcttatttaatcttcatagaaaactgtaaagcttattccacaagccataatggaagaaatcaggttgggggctcaattctcagagcctgttggctctaggcagaaagggagttactacactttagggcaatttgcacttcaaatagctggcccttgagcagacaggtccctctgctct

SEQ ID NO: 315596 - DNA, 4001 bp, Homo sapiens
ttaagtggagttaaatgggtctggaaaagtaatccacaaaggtataataatggtcttttcagccaggcacagtggctcacacctgtaatcccagcactttgggaggccgaggcatggggatcacgaggtcgagatcaagaccatcctggccaatatggtgaaaccccatgtctactaaaaatataaaaattagccaggtgtggtgatgtgcacctgtagtcccagctacttgggaggctgaggcaggagaatcgcttgaaccggggagaaagaggttgcagtgagccaagattgcaccactgcactccagcctggtaacagagcgagactccatctcagaaaaaaacaaaaaaacaaaaaaacaaaaaacgggtcttttcatttgcagagataggaggggtacagaatttaggacagaggagtgggtaagggaatgtttgtcttatttgtgatgttctatttcttcacaagtagcatgtattcatgtattacatgtataattaaaaattaatggtacctctttgtggggcattttggcagtacccaccacgaccgaaaacacacatgccccttgccccagccagttattatctattatcctacatatatgcgaacataccaaagagttctgttctagaatattcactgcaaaatggtttgtaaatactggaaacagcataaacgtccatcattaaaagatttgttcagaaaatgttggtacaggccggacgtggtggctcacgcctgtaatcccaggactttgggaggccagggcgggcgggtcatgaagtcaggagtttgagaccagcctgaccaacatggtgaaacccgtctctactgaaaatacaaaaaaattagccgggcgtggtggcgcgcgcctgtaatcccagctactcaggagactgaggcaggacaatcgcttgaacccaggaggcggaagttgcagtgagccgagatcgtgccactgcactccaggctgggcgacagaacaagactctgtctcaaaaagaaaaaaaaaaaaagaaaaagaaaatgttggtacaagggtgcagttgaattctatgtgagctttaaaaagaatgatgtagctttgtgtacagatatggggcactctccagacacaatgttgagtgaaatcgtgtctaaaaggatgagggaaagagggatttatacatacacacagatatgcttgtattgacgtggagcctttctgaaatgatatacaaaaactggtagcagcggttggctctaggaacgggaatcagaccaaatgacaggtgaatgaagacagcctttgtatgtataccctttttgtagcttgtgagttttcttattttgagttttctttacttgaccatgtattataaacacatttggtagggattttttgatttttttttttttttttttttaaggaaggcgccttgcagctcggttctgctggatgggaaaagctgaatctcaaagcctccgctcacttgctgcggagccctaggcaagtcacgtccgcctcttggggcgtcaggagccccaccaatgaggtggggcgatttcccgtcccggcaaaggctcgagcgaattcggacacggggcccggtcgctccgcccgcgtccctgagcccggctcccgccccggcccgcgctcaccgccgatgatggtccggatgagggaggcgtgcccggggcagtcgaccagcgtgacctgaagcagtggctcgccgggctcgggctcggcctcgggcgctgcctggaactcgggcaaagacgaccgcaggcgcgcgggcagcggcaccgagaagcacgagaagcccagatcgagcgtgatgccgcgctcgcggctctgcggctgcttgtcaaaggcggcggtggaggctgtggtgcttagcgcccgcgccagcgccgtcttgccgctgtcgatgtggcccagcacgcccacgttcacgttcacccgccgccctgccatgccgccgccgccgcctcggacacccgcccggcccgcccctcacctccctcggtagtcgccgcggtccggcccgttaagttgcccccccgtaaccggcgcgctgtgcacacccgttccggcccggaagcttccgccctcctgaggctcacgggcacagccgagcgccgtgctccgagtgggtggtctaggaactggaggtcaccgtaggcagggtttctctctcacgtggctcctcctgcctgaagcctctaggagcccgagatggagggatccttctgagaagtgaagccatttggactttctgggtgagtggagacttggagaacttttctatagctatcaagaggattgtaaaatgcaccaatcagcgctctgtaaaacgcaccaatcagtgctctgtaacatgcaccaatcagcaggatcctaaaagaagccaatcacagggaggattgaaaaaagggcgctctgataggacaaaaacggaacatgggggggcgaaggggggcggggggggcggggtgggcggggggaagacgggggcggggggggcgggaagacgggggcgggggggagggcggggggacggcggggggcgggggagggcggggggacgtgggggagggggcaaataagggaataaaagctggccacccccgccagcagcagcaaccctctcaggtgccctttcgcattgcagaagctttttgctcttcacaataaatcttgctgctgctcactctttgggactgtgccatctttaagagctttaacactcactgcgaaggtccgcggctccattcttgaagtcagcgagactaggaacccactggaagaaaccaactccggacacacttccaatcattcatacatttcagcaagatcttaccaagtgcctggtgggttccgctgggctacagtgcccgctaatattacattcagggggtgagggctaagtcaaacaatacagcctgaaccagaccatttcagagagcgagaagtctcctagggaaaataaaagctgagataaaaaggagcaggagagggaggatggacagctacctaactgtgggtcagggaagacatctaggagttgctgtttgagttgaaactccagtgttgagaaggagccaaccatgggaaaagatggtttgaagatggaagaggacaacattatctctgactcagaaattctcaccctgagagtctgtagcctgggcttaggagaggccacaaacctctaaattgaacgcacaatgtgttgtgatgtgctcttgctagacagagggtcgacaactctcactagattctgaagtgtctagaaccacaaaaaaggttgtcagccatagtcaccaaccagaggtaacaaacctaagtgtctgctctggccaggtggtgggtaaatcaaagaagagaagttaaaagagtctaagatgacagggagtggtggggacctgggagacctggagagcccttttcctgtgcaaagagggaagccactgctcagtctcagccagtgataccaggcaggaatgctagcccaacattgcctcctccttccatttttctggagaagagagtgtttttgtaacactgtggcggtggagcacaaagttcacaggatcttacctttgccctctgtgatgagccagaccatgtgcggatgtattcatgcttgcagtaactgcctccttcgttccaccactctccactaggaacagagtccatgtcatagactgaattgtgtccctctcaaattcatatgtggacaccctgacccccagtgtgatagtatttggagatgggacgtttgggaggttagatgagatcatgagagcgggcccttgtgatgggattagggtccttacaagaagagaacagaatctttgtttccgttttcccaccttgcaaataggaaactgtaaaaatacgcctcccattaaaaaaaatctagtagtaaaagcagtaaacgtatttaaaagggagggttagtaaataggtaataagagctttagaggctttatgtacctctgagaaatat

SEQ ID NO: 315597 - DNA, 4001 bp, Homo sapiens
cggcgcccggccggggatctttttttattatttatttttaattgagacagggtcttgctctgttccccaagctggagtacagtggctcaatcatagctcactgcagccttgaactcctgggctcaaatgatcctcccagctcagcctcctgagtagctgggactacaggtgcatgccattaagcctagctaaccttttttttttttttttttttgagatggtgtcttgctctgtcacccaggctggagtgcaatggcatgatcttggctcactgcaagctccacctccctggttcatgccattctcctgcctcagcctcctgagtagctgtgactacaggcgcctgccaccatgcccggctaattttttgtatttttagtagagacggggtttcattgtgttagccaggatggtcttgatctcctgacctcgtgatccacccacctcagcctcctaaagtgctgggattacaggcgtgagccaccccaccaggcctggctaactttaaaaaacaattttgtagagatgggatctcactatgttgcccaggctattctcaaactcctgggctcaagcaatcctcctgcctcagcttcccatagtgctgggattacaggcgtgagatactgtgcccagctactgacaaggatcttaaactcaaccaaccaagactggatttgtctttgtgccccttcccccactaactgggtcctctgagtacgttctcttatctctgtggaagacatctccatctaccaggtcccccagctgccaacttgagaaccatctttatttgcctcttctgtgtttcctgaccaaccagcccccaagtcccgtagttccctctagcctgggccttctccctcacctcccagcatctttagcttgggcatttgaccagagccctgacctgtgtgcctgggaaaggtggccagcctctccagctctccctgtttctccactgggcattaatgtgttcagtgctggagaagcggcatggagaagaccttcagtcttcaagctttatagcccccagctctcatctccccacaccaacattctgagtctgccaactcagtctcaggtcttttctgactgctcccaatccagtcctgccactcccagtggcctctccatctcctggcttgcagtatcttttatgatcttgtcccttctgacctctctcacctcatttccagagacaccagacctcttgggtcatgctgtttccttgcccgaaatgcttttccttccccttttggcttggagaactcctttttatcctttaagctccagtgtaaagatcttttccaaaagcttggaactgttcctccccatcccataccctcagcacaccttttactcctgggtgtcatccctgggcccggcatttaccccttcttattctgtaattatccatttatctctgtcctttacccgtgaagctgcattgctttgccaagaacttggtccccagcacattactgccaaaaccttgaagactgacgtcttctccatgcctctcctccagtactgaatacattaatgtcctgcagagaaacagggcgagctggagggctcccgtcacatgggtcgggcctctggttcctccaactaggctcagatagaaatctcagaaatgtacatgacctgcccccgactccatggcaacccttcacccagagggggtcggcacaatatctgtggctgagtttttgccctcaccccactttcacgcgtccttagggcgctgagcgctccctgcagacgcttcttcccggggcttaccgagcagcgacaagaacagactgtggtacgcttcatagtcgtcgtccatggtcgtggtgctgggagggggtgctgaagggcgtgtgtgaatgtgtgtcgatgtgggcttgcttgcgtaggggtaccggggtatcagataaaccgtaactccaagtcgtgcgaaaggcgctcagctcagactgcagaagcaacctgttgccgtggctacggacgccccgcgccaattggctgagcgctgtcacgtgttaagagcgagcccgccctgccgagcgcctgctggccccacctcgttttcgtccaattctgggaggggcagcgagcaaatccacgccccgcccagttctgggcttggtgaaaggcgggatttctttgttcggcccagtagtccctgaatccagtgtagaaagtctccggttttcccgtgaaatgtgggatcttccgcaggtctccatatctctaggcctcagttttctcataggaaaaataggccctgcctcctccagagggttaggaagaaccaaagtgagctgtggccagatagaggtgttgggtatgttctgccccgcttatggcagggtgccatggtttggagttacagaacctgaggaccagagaataataataaacccttgaaatgtgcatcaactgataagcaaaatgaggtatatccataggatggccataagaaggaatgaagtacatgctacaatatggataaaccttcaaaacagtatgctaagcaagaagctagacacaaaaggccacgtgctgtatgattccatttatgtgaaatgttcagcatagacgaacccacagacacggaaagtagatgaatggttgctaggggatggggtgagtaattgaagtgactgctaacaggtggagagattctttttggagtggaaaaaagaaatggaaacttctggaattagtgatgatggctgcacactgtaaatgtactaaaccactgaactgtacactttaaaatggttaaatggtggcttttagctcaatttttaaaaagttaaagagaaacacctaagcccttattcctttgctgagacaagctatctttgtgacgcttgcaaacagattgttgccatgggccacattcacacagcactcttgcaagccaggtaccattttagcactacatgtctgaacttcataattaccatcattgtgtgaggtagacaccactatcccatttttaaaagacaagttaacaggtacagaggtcaggcaacctcacctgcaagaaacaggaaaagccaggcctagagcctgagcaacctggctgtgtcctgagctcccctggtgcagagctcgcctcctgcattcacacgggcccacactccccatggagatgctgggggaaggtatgtgaccaccagccctaccacaaagccacacctgatgccctgagcttggtgagctcgccccaccctccaggcccagctgggcccaaggtttcagaggcccctctccaccctctttgggtgtcttgtccctactccttaccgcttttgttcccttccattattaggtgcccttctttctctctgtgagggtctgtacagaacttgtttatctttgtgcccctccccaccacagggctttacactttgtgaatgctacttggatgtttgttaaatgaaaatgtgatggtaaactataaagtgggtttgccttggggagagggaggtgtggccagttttcctgttctctggtcaaaatctatccttctaaaaactgacactcactaaagtggaaacaaccaactacctctgcatcacactgcagcctgattcggttcacactgccctacaacaaaggcagtttcctgaacaactgatttatttttcatttattcaatcaatttaattttcaaattataccttaaaatggtagttggtaattaagacatagtaactagttttttcccttggtttctttctaatagtaaatgctttggtatttgaactgtaacaatacttgtaataaaaatggcattaagacttattttttttaagacagggtcttgctgtgtcatccaggctgaagtgcagtggtgtgatcatagctcactgcagcctcaatctcctgggctcaagggattctcccacctcagccttctgagtagctgggaccacaagtgtatgtcaccatgcccaattaatttttaaaattttttgtagagacggggtctcatt

SEQ ID NO: 315598 - DNA, 4001 bp, Homo sapiens
aagctcctttaaccctcgccacatccccagggaggcccaagctctgattcctcctcatcccccaccccccaacgttttttcactgaaggaaactgagacacgacgcctgtattctgttccctctatagtaccaacctcgcgactcttctcggcctactgtattggcggcgttcagcctgccgggtggcggttcctcatctcctagactccccccagtggcatttccagccctccccgtgcctgctcactagaggcttttgagggtggtttctatctgtctttactggtgtgttcccagagcctaaaacaaacctggcacatagtaggtgctcaataaataccaagcatgagagatgccggaagaccgttcaggcgcatcccatggctcccagtacgttacttgggattccacatcagaggagtagtttcccgcctccaccctggcttccatgcacactgacactgaaaaccacaccttgccacttccctgcactctgcagtgtcctgagctaaggcggggtcatataatgtcagtttcttcctggcctgttgtcgcctggggtaggggctgttcctttcctcctctgacccctgcggcccagcactgcccttggtgctcggctggcacagtgcttaagtgtttgtcgacggctcccagatgctaaggctgggtccctatctcaccccatggtttcttctcaatagcccagagcgggtctggttcccgcaggcacttggtggcccgtgagtgcctgatccacagtgtgagccacattgtctgtttctcacttgtctctgtttctcccacagggagccccataagtctttgctgattgacagaaggagctgtcagtctaccccaggaggcagggatatccctaaaggtgaggacagggccttcttcacacttctgtctcctaaacctcccagaagcctggcaggaaggagagagaaagatgcttgttgaaagggaatatgtgagactacccagacaggtgcaattcctaggttaaaggggcaagacgcgatgatgtggcggtggagcagaaaagtggggtatggttgtttgagtgtgattggggttttcaggaatggaataggtggtaagaatagggttggggactggagtggaatggggaggaacaggggcaagatgcaagtgtgctgatgcggagtgggatggtgtggggctgccctctgtctccccttcctctgactctgtcctgtcgggctccgcagccagccagcttttagttcgagccctctcccgggcgttaccaccctcccttcgtggccggcgcgcacctgcagtgctaggcagcgcgcatcactgctctgcagcgcggcgcgcaggtcctccaccaactcgcgcaagctgctattctcctcctccagccgcgcaacgcgctcacagtcaggaccgctgtcggggccaggcgcgcagggcgggcggcggcggcggcgcggacggcgcaggcggatctgcgtctcgatgtgctcgctgagagcgccgcggggcagccggggccccgcacgggtgccgaagtagccacagaggcgcgcgtggaactggcggaaggtgagctccggcggctcggcgcgcagcgccaggcgcgcctcttcatcggtatctgagtccccgtccgtggccaactcagcggccgcatccccgggggtcacatctctggagttcccgtcacctgctgcctgcccggccgtggtggccccctccgcgcgcagccccagcacagcgcagagcgctcggaagtcggcgcggggcagacggccggcgccgcggcagtccaggtggtggaagacctcctgcaggtactggtccaggccggtggccagcaccacgatctcgttctccacgccgcggtccagcccgtagtggtgcgccagggcgctcagcagccactgcgtgcgccgcgcaggtcgccggtacgggtcacctcccgcgccctccatgccggcctccgcgcccgtgctgaccggctccatcgctgcgccgcgcgcctcgctcctccggtccctcctccggtcccttcgccccgccacttccaggggcggccccagagtttctcgaaaggaggggcttagcggtcgcggtctggttggagcggcgccggggaccgtgtccagcagctgcgctggcctcacagtgcgtctggtttaccccagttgctttggaggggcctggggtagggggtccaggaacccccgggaccccggcagcgccaccagtgcccggtcggcgtctgggtctggcttctccgcgtgactcccacgctctcctctcctcactcacggggcgttcctggcgtctgcgcttttcctcccactcccggccgtccactctcaactccctcctccctccgccccgcccgcctggcgcggagagttcgctccgagacctgggcgaggggttggcgcgggatccgaagcccaggagggccttgggggtggcggcctcgtccggttgctggggatgtgcccccacacccaagcgtcactcttccccctcttcccggaaggcctttcgagggttgcctggcaagcctgctctcgccgccctgtagccgtaggtgcggaaaagcctcccctccgcttcaattcagctactgggtttccgaacccacttcttgtgccaccatagaccgtgcaaagagccccaagtagtaactgggaaagagagggaaacaggcttggagaggcaaggggtctaggttaggggcaccccgctggtgagaagcccatctgagacgagccctgtgctaactgctctctcccgatccctgttgggggtggggataggactctcgggaaagtggtgtctcccggccctgccacctttgtgcctgccggtgctgacttggcaatgggatccgagttccatctcttgagctggggttaggttaacaggtcgatgattggctgatgtttttttctggtgttttagaacacatttctggaagatgaagaaaaacctgcttctctggtgagtgctagactgtgttccctttctttttcacgagaggggtgcagtgatattgtgatattgtccacctgttacctgcaccgggaacggttatccagccacggtacccagccatgttggagcaagaggcagactcttcagctgttcctagctatgacagagacagaatcttgccttgtggataactctgtgagtttaaatgtaaaatcttgccgtttgaaaagcgatagcattctgtctcctctgccacagtatcccagaatcagcacgttgtccatttggcaaattcgtacttgttcttgaaggctttgcccagagtacatatctgctgggaaggagttagaggcttctccccaagcattttggacatattcttttaggtttgtttttaattataaaagtaatggcaatttgacaaagtttttacatcacgtccacttcttggcttctaccttcgaaagccactgtgcacaggatgttcactgcatcattgtttattacagtgagaaactggagacaacctggtgtccatcaaatcagctaggactcagcaaacgaggatgagcggacacagcaagccacaagctgattatgcacaacactgatgcttacataacaagaacaaaaacacacaaaacaatactaagtattttctactaggacatgtgtatgtgagtgcacagaagaagatggagggattcataagtggattcagtggttctttctgcagatgggagacactgcagtatttcccttttgttaagatgttctcatgtgtttctttttcttggccggtcgcggtggctcacgcctgtaatcccaccactttgggaggccgaggcgggtggattgcctgaggtcaagagttcgagaacagcctggacaacatagtgaaccacccccatctctactaaaaataccaaaagttagctgggcgtggtggcaggcgcctgtaatcccagttacttgggaggctgaggcagatgaatcgcttgaacctggg

SEQ ID NO: 315599 - DNA, 4001 bp, Homo sapiens
cagaactttggaatgttgttctaactacctacttgtcattcagtatctcccccttccagtccatcataactactgatatcagaattatctttctaaaaggcaaattttatttatttttacccttattaagatccaccattgatactgtatccatatgttttatccctatattctgggcctttagatgtcttctacatatttcttcttcatcttcatctctcaacaccctgctggctgaatacaactgtttatgcctctcgaacataggaagctttggttgtgctctatacctttttatgcccaaaatgctctaacctcattctttcttcagacaaatactgacacctttcgatgttagctcaaatattactttccctattaagcttttcccatctcttctaaacagaattgtgcaatctttacactgagctctgtattcagagtgtacttctatgaaggaagaatcatgtgtgtttttataaatttagataactgtatactattcctttagttatctgtctccattactggagtgagcctaaacctagaggtagggaccatgtacttttcaatttagtttgtcctgtacctggcacaatggctaccacaagtctttgctgaaagaacaaataactcacagactaaacaatgaatggaaaaagaaacacttttcttttccattcatagtatgaatattagggcacagcatgtatcttcatgtatttcaatatgtgagaggcttgaggaaaatgaaatgaaggttaaaggagaaaagagaaatcagaacaaaccaccggtgtgcagagaaaacaaagctgacatctaggaagggaggcagagaatcagaaatctaagtaacatctgcaaagattccagtggggcaagaaatataggaatctcataaaatccttgtgatttgtctcttcaaaccaaaacaaattttatcactttatcatctcaataaagacatggctatacacagtttagttcctatggaaagtggaaaaaaacttacacttggccagcaaggggtccgatcaaaaaacttcccagagtatatgggtctgatgcgatctggaggttccactcctgattcaatgtttccagcctcctttctctgttcatgttgttgggcaaactggcattggggaggttctatcaccaagcccatttggggctctgtattcttagtctcatctggcccctcggcttgggttagtccaatgtccacctccacaggaagcttaatctctgtgttgggtttcattaaaacacaggtagactctttttccatttcctgtcttggttccataacgaaagcaggctttcccactaattcctctaccccttcagggccactagccaaaggagctctcctgctccctgcagcctgtgaacttccacacaccctgcccaaaggaggctgtattatccgttcatgggtatatcctgcaagaagactctcattttctaaccccattcttcctggcaacagagaaggttttgttccctgtgaagctgagacactgtcgactcctaaactacccctctgcatgacagtcctagaaatattctgtctttctaatcccatttcaagccccttgctcaatggaaattttgtttctggtggtgccatccttccctcacacttattactaaccacagggctctccccgcatcgggaatcttcttttcctaatcctactctgatccccaactccatgggaaattttgttcccatgatgaccctcttgtctcctaaatcatcctttccttcgtggggatgtccaatctccatgttcatggacgatttctccccattctcatttctccaagagcgctcatctctaaggggaaagctgtacctggctacaaagacgcctccaatcccttgcggaacccctctctcaggaaagagcacaacctcactcggactccctgtccattgcttcctgcctgcctcttaacacctagccgagttcacagaggaaaagatggagtctgtttatcaggttacctgggaaacaggggcggggcttggcgctcaagtcctgcttggacagatccctgcccatctctcattcttctctctctctctctcaatctctctctctctcccctcttctctctcctctgtctctctctctcccctcttctctctcctctgtttctctctgcccccccttctctctcctctctctccctctcctctcctttgccctctccctctctctccctctctgtgtgtctctctctcttgcctttcctctctcctttctccctctctcccctccctccccctcttcccctctatccctgcttcctctctctttttctttgctagatttggagggcgagaaaatttgagtgatgtggctttcggcgcatcaaatgttcaccaacttctctggtttcccaagcaacacagtcgttttagaatggtttcaacaattggcttcttcctggccattggcctcttaatgttggtgatgatgaacaaataaactttctggtgatgaacactttttttaggtccttccttgtccaagtacctccgccctgcatgtagttattttagtgctaaaaaatgactttaaattctagaaatattatatttgacaactgtggcataaagacatcttaaagtccttgagaacacttacactttaacaactaggctttaaatcacatttaaagtaattttttttttttttgagatggagtctccctttgtcgcccaggctggagtgcagtggcacaatctgggctcactgcaaactccgcctcctgggtccaagcgattctcctgcctcagccttccgggtagctgggattacaggcatgcgccaccatgctaggctaatttttgtatcttgagtagaaacggggtttcaccatgttggccaggctggtctcaaacacctgacctcaagtgatccaccgcctcggccttccaaagtgtcggattacaggcgtgagccactgctcctggcctaaactaaatattttaaagtttgagatatgctacacaataaggcatattgtattttaaagataatgtggcaaactaaaacttcattgtttttaagtaggagatttttttttaaattgaggtttcacctttcagattttaatgaaagtatatttggtaaatatttgtcatgttctacacatataggatatgaaacccctagcttggaatttgaactgaattaggctgggcacagtggctcacacctttaatcccagcactttgggaggccgaggcaggcagatcacttgaggtcaggagtttgagaccagcctggccaacatcgcgaaaccctgtctctactaaaaatataaaaattagctgggcatggtgtccagcgcctgtaatcccagctactcaggaggctgaggcaagagaatcatttaaacccggaggcagaggttgcagtgagccttgatggtgccacgacactcaagcctgaacaacagagtgagattccatttaaaaataaaaaaccaaaaatggccgggcgcagtggctcatgcctgtaatcccggcactttgggaggtagaggcgggtggatcacgaggtcaggagttcgagaccatcctggccaacatggtgaaaccccgtttctacttaaaatacaaaaattagctgggcctgatggcaggcgcctgtagtcccagctacttgggaggctgaggtagaagaatcgcttgaacctgggaggcggaggttgcagtaagccgagatcacaccactgcactccagcctggcgacagagtgagactccatctcaaaaaaaaaaaaaaaaaaaaagcaaaacagaatttgaaaagaatttacaggattccagaactctacaaaaaccccttaaaatccaaaaatatttttttaaaagtgtgtaggggtctggacatagtcactcacctgtaatctcaacacttcgggaagccaaggcagaagaattgcttaacgccaagaattcaattagcccagcgtggt

SEQ ID NO: 315600 - DNA, 4001 bp, Homo sapiens
aatattaaaagcaattgtcagaggctgggcacgtggctcatgcctgtaatcccagcactttgggaggccgaggcaggtggatcacgaggtcaggagattgagaccatcctggccaacatggtgaaaccccgtctctactaaaatacaaaaaattagctgggcgtggtggcacgcacctgtagtcccagctactcgggaggctgaggcaggggaatcacttgaacccgggaggcagaggttgcagtgagctgagatcacgccactgcactccagcctggcgacagagcaagactccgtctcaaaacaagcaaatgagcttaaaaaaaaaagaaaaaaaaaaaacagttgtcagaaaatattcctagtcatgggtattagagtatggaacttttccccctaaggtcctaatatctagcaattctaatcagtatatagaccagtccaaaattgacatgtaatcatattacttacatttttctttgtcaaaaccaatataacagatattttgctttttattctgggaatggcaagttagtagacatgtcatccttatgtgattttagtcctgcattttttgacattattaaatgcaataattcataatgaattaatattaatactaatgataaatcaaatccaatgacagtaggatttttaaattctattaaaattagcaggtcttctcatttcagtctctttgcttcagcagcatgttataagaattttgaccaaagacctttctctctatgctttatatattcttgataaattataatttccactaatcttattccctgtggataggtaattctttttcaaggctgacatataattatttttttaagagatgtagaaggaccaaaccaaataatcattacttttcaaaaaggcaacattgatctcactttttaatgtttaaagtgcaccacacaaggcaaatactccccagtgagaaaaagaagataaggtgcaatttttcagaaaatgctattgcataggcttagtctgatgtgagtcttccttggaagcaccaaagtcctgaggtttaaacaaatcaggagaaataattttgcgtttccgggccagggcaaaattctgctttaatcactgagctggcattagtgggacttttaacattaaaaaaaaaaaaaaaaaaagtcccactaatgccagtgattgccctattcctaaagcctttagccaaacattgtaaggacagcctggactcaaagaaggggagtgaggctggatcaaagtccaacatcaaactaagttaagacctttggattagaaagtcggcctgcacactgggacctgttgtggggtggggggaggggggagggatagcattaggagatatacctaatattaaatgacgagttaatgggtgcagcacaccaacatggcacatgtatacatatgtaactaacctgcacgttgtgcacatgtaccctaaaacttaaagtataattaaaaaaaaaaaagaaaaataaaaagtcggcctgcaaagccaaagttgcaagtaagcaggagggctccgcatgaaggacaggtcgaggccaactccctaagtgttgatctgtctcagcctcagcctcagtttccttatcagtaaaacggggacgagagttccctgcgaagattaaccaagctaatctaggttaaaaaaaaaaaaaaagaaaagaaaaagaaagaaagaaaagaaaaaaaaagttcctggcatgtaccagttgctcaactcttgagtgtccttctcggtttaaaccgacgggggagagtcaaagcctccggagccagagggcggctaaggcccgcacggtccccgggctggaggcgaccgagcccgttacctgatcgcgttgaccggcgggtttcggaggcggattagcgccaaggcgttgtgcagccgcgtatactcggccatgtttcctctatcaccgagggcacctctgcctctcgccgtcaggcaaaccacttttccgggcgcgcccggcctcctccagaggagggacgccggctgggccaatgcgagccggggcgccgcctcccgccgcgcctcttcccacccagccctcctctcccgagaccccacccggcgctctacagacgcttgtcgctttccctttattaactcccatgctgctcccaccagaaggtacagcaaggagaatgatggaaaacagctgtaattgccggcaagtcgaagtttgtaaccccttggcccataggggctggctactgaggacaagttctgagttcgctgagacgggcaagctgtcctcatcgcggtattcatcttcatgatctttctgaacagggacagatacctggggccctccctgacagttatgtgatattgatacacatctggaacacataaaatacacattgttcatttcacctaaatgagtagggtactaatgaaacagcctttgcaaaaattctaacagtgagaaaattatggcagtcaaagagatctgatttaaccaaccccatcttgcctttagctgcccttaattattcctgagcttaggccaagttaactttgggagacatttggtttatagtttaaatgataatagcccttccccaaaactcaactgcctttgtaaagctaaccgagagaccaccaggctaggaggacagaggagtgtgaattctctctgctaaggtgtaaacatagaccattgccagccattattccggaagccaccagatagacaacttccccatttactcctgcaggtaacattactattgtagaacctaagtttggccttttgagatattttttcacgtttgcctgacactgatggctccacctggaccagtcaacagctcctgtggccccacccacaagcaactcagtacaagaggatagcttcaacccctatgatttcatctccaacccaaccagtcagcattttccataccctagcccctgcccaccaaaccacctttgaaaaacccctaacctactagccttcgatgagattgatttgagtaataactccatgtcccatgtggcgtggccagcctcacatcaattaaactctttccttactgcaatgctgtggtcttcctgaattgattttgtttgtgcagcaggcaggaagaacccatccagtgattactctaacatcaaccaaatacttatataacattgttactagaggagggtctggactgcaagttgtccaggttcttggcgttttgaacaaagaattggacgaaacacacaaagcaagggaaaaacaaagcaacagaagcgaatatttattgaaaacgaaaagacactccacacggtgggagtgggcccaagaaagaggcccaagggaccttgttacagaattttctggggtttcaataccctctagaggtttcccattggttactgggtgtacgccctatgtaaatgaagaggacgaagtgaagttacgaagtcatttactcagtgtacaccctatgtaaatgaagagaatatttcctgtcatagctgaagtgtttccatttgatttagttctagaaagtctttaggttccctgccttcaggccctatactcctgcctcaacatctttttttttttttaatttttattttttgagacggagtctggctctgtcgaccaggctggaatgcagtggcgcgatctcagctcactgcaagtccgcctcccgggttcacaccattctcctgcctcagcctcccgagtagctgggactacaagcgcccgccaccacgcctggctaattctttgtatttttggtagagatggcgtttcaccgtgttagccaggatggtcttgatctcctgaccctgtgatccacccgcctcggcctcccaaagtgctgggattacaggcgtgagccaccgcacccagcccacaacatcatttttatttgtcttacaatcacatgcaactagcgaaactgttatgggtggacggtgtccaggttcttggcgttttgaccaaagaattgaaaatgcaaaacaaagcaag

SEQ ID NO: 315601 - DNA, 4001 bp, Homo sapiens
aatttccttcattcgtatgattttttacttagtagaaaacaaatcatgttgcctttaaatacaattttaaaagcaatctcaaggttacacataaagcacccaatcactcacctccaagagaaactggcagatgttttttctttggtcaccttgaagctgaataacctctccgtattcaggatgttcaatcacagtaccattacaggcaaatttctggaaaagtgcataaatatacaacaaaatttagtcaactactatgaggttttatttcaccgtatgaacagaattagccatttcagtaagctagatcatatttagagaaacagattttgtctcctataatccacaatccttccaaattaatttgtaaaccaggaaatgattttatgtgtaacatcaagaactaaatatttcacatttaaatttatttaaaagcaacgcgaatcttcttttaaaatgagagaccacactgggagaataactaaatatttacatgttaattacaaaaatgagaacaactttcttggtctagttattttcatccacgccgatataaaggtgtgaatcataatccagttcagaggtgtgcatcagtaactctaatcctttcttcctaatccctttacctttttgaaagctttcacaagtttctttttgtcataatcatctgcaatgccctgaacagtagtcagtgtctttctgccgttccgttgctggattcttatatgaatgtaatcctcagtccctgccgggagtaagtcgtcacccttagttgcatcagcaaaggggtctgcgaatggataaaaaaaaaaaaaaaatccaaagtagaaaaatattttttaagaagtactttccagaaatacattatactaccaatccagacagtcatcaatgaaggttctagtgcctttgctgtttttgccggtaggaatggagatgggggtggagtattaataaaacccccaagatactctcacaaaaagagaaacatttgaacagctatgtccattgtagaaaaacgctgttatagataaataatgttatcgttcaatatggtcctctaatgagaaaaagatttagaaaaccttaatattgtagccgctataaaaatgtgcgtcatctcgattacattctgatgaaaacataaacattcgaatacgcccaccttaatcatttaaccgtaactgtgccttgccaaaaaaaaagtagattacatatatatcaagaggcgtaatttaacaaattgctacgcaagcagagaagactgaaccactggccagtgacagatcagaggcttgcatccgcatctttccctaagtgcccccaggagctgccagagaacgggcgccgatccctggtttccctggcccggcataccctttgcaagtagcagggccgatctaggagtccacgaaataggatcgccaaggtttcaaggggcagaagcggaggcgagagccgggtcaaggacggggcagggggtggcgcagggcccgcggccggggctccgagaggagggctcggagtccggcgctgtcctcggggaaggggtcgccaggggccccgtcgccattttctgggcgccgagacaaagccccactaggggtgcgggaagggcagaaagggggcccctaggggcggtggccaggcgggcaaaaggccgagatgcgcgccgggcaagggagggaggcggcggcgacgggatcttaccgaaagattggaggttctggatagtggacatgcgatactagtgtgaggccggtgaggggataaaattcctgcggggcccgcccggatcaccttgtcaggaggctgtagtggcgagaaaacggaaataaataagaaaacgcttcgccctggggttgggattaggctggagtggcggcggcggaagccgggaggaggcaggaagaggcgaaggaggaggcggaggaagaggcgagggcgcgagagaagaggcggcgctgcggcttctcgcacaaaatggccgatggagactatttagccgcgcccgcggcccctcccacgtgaccgtcccgcgccgagcatcctgggacttgtagttttctggaggcagcagagcccggaaagcctgaggccgggggcggccgagaccgcaattcccgtcacggagtgcgtcctctagcgcggggcggaagacccgcgaagtgttcaagcggccgcagagcggcccagagttcgcaggtctggggctctcttcccagagagctcgtaggggaggacagtcaagggactcaagcgtctctcttgactccccttctctcgctgtgcagtggcggcgccgaggggtcgacgctcagggctaatctctatgagtcaccctcgaggccccgggtaatgtaagtaaaatcggggtgcaggaacaaaacaagtccccttgctccggctttcaactcattggcccccgctcagcaactacctgcattgaaattccaaccccagttgcaggagcggtgttagtctcaaccaatactggagatgggagcctctctttccaggattggacggacctccgattccctagcacggtggatctcagactaaagcgtgtgtctctggagggcttgagaaaacactgatagaccccagagtttctgtttcaggaagtctagggtgtgacctgaaaatctgcaattctcataagctccttggtgatgctgatcctgcctgctggtctgggatcaggcttgagaatcactgcccagcttaatcctgggcctggcatcgagtgggggccaggtgtgtatgaacagaagataccagaaaatcagcttgtcagctcattttgtgtgcctcagaaggcccaacagagaattcaggaaagatgccaggtataagctgaaggtgagctcagcaaataggttaattgatggagtcatgtaccagaccgtaatatcttcctatcaggtcacgcacagaaaaataaacccgagactttgggaattggctcactcaggcaggtgtgttcaattgtcaaacttggttggctttctggaagcaaagagatagactaaaatttagggattcttaacttttttgtgtgtgccatggcaatcctgtgaagctgctgaatcccttctcagaataatgagaagttaagttttaagttcacaaagtacataggattacaaaggaaaccaattatattgaaatttaaaaaatacattaataacgtgtatttctttattaatacactaataagatctagcaagattaggtctaatactataatttcaaaaagctgataaatgtaagagatattttgtgatgtccgtaacatcagaaatttaatatgaaagtatgtgtaacttctgttggtgcgaagtgacaggtccttctatcactatgatgttgcctttattcataatggaaagaaatggtaaattttgcttagaggttaatgaaaatgcagatataatctttccccatccaattttagggatctccacccctgcagttttatccatgagccaaggatctgcagaccgcaggttaagaatacctggatttgacaatcttttgtaattaacaatgatgataagtgccatttatttagtacttactgtttgcctgttacaaagcttatatataacattattaatcttcatagctattttataaggtaagcattactctatgcaccaggtgtggaaatgaaggcttttgtaggttaatgcctgaaaaaaaaatcaaattcttaactctcagaaatctaaccacatttgtggtcttccagctctggttcaaatggaaaacactcttcgtatcccaaattgaggtgtaaagtttagagctggctccaaaacaaggagcatcaaaatatctaaataagtgtgctttaaagtaattttattagttcaattttgtgccctatgttaatactctaacactctaatttctaaataatttgtaatctagataatgcatctctatttgtttcctttctttcttagtagatgtacatgagtattttatattac

SEQ ID NO: 315602 - DNA, 4001 bp, Homo sapiens
acaacatttaagctcttacaaagtccctgattttaagcactgtaagacaattgtcatccttggttaatttactataaagtggctatccttcattaatttaaaaggatagtctaaacagacaaatctaatctagatctcttgtatgcacagttcaaaatagggtttgcgctcttatgaggctctaatgcccccactgatctgacaggaggggaagctcaagtggtaatgcttgcccagtaccagtccggcccagggggttggggacccctgatttagagtatctattgtctaccaggcactgcactagtactgagaagacagatatgaataagaccctgtcgctgacattgaaggactcacagtctagcaggggagaaaggcaagtgaatgtctaattatcctacttagtaagtgaaataaaatttcaaatatatttcaggtacaaaaatagcccaggaagtgactgactctatctgggtagagtgacgaaaggcttcacagagcaatgatatctaaaatgaattttaatttcaacagatgaaaaagagtttgccaaatcaacaagaggcataggatagtactagactgaagaaacaggttgttcaaagggactcagaagcagttcagtattgatggagcaccaaataagatgggatggcaaggaaataaatgagtctcaagagcaattcaaagattataaatggttacataactatgctacataggatggaatctaccctgtaagcagagaggaactacctactgtaggcatttttaaaggaggggttatttatcagattttagaatgtaattttttcattagagttcaaataagcatttagtattaaaaattgtgaataacaagctacctttacaaacctaaaaaaaaatttattatgtaactttgccttttaaacagtctttgcctggtatattatctagaagattatactcggcgtttgataaatgatgactaaactgcagaagacagactgagcatcagtgggcatggcgcttaataacaaagattttaaaatgtaaaaatagaaatgtagactggcaaaaagtgcaaaaatgttttaaggttcctttcgcgggggggaagggagggaatagcctccctccttaaatgcagacaacctttctcttaatgactttttccttctatatagttatcagaacttaaccaaaaccttcttttccttcccgactctcttttccttacgtaatactcatatgcagactcttagccacaccctagtaaagcaacttccccagcattttccaatctaagtttattatctcctccaacactacagtctttagcttcaaaatttcaagagtcctctaatgttctatttctaatatgctcataaccatttcaaaatcaaatgttgctagaatatctctatcatgctcactgctacaccctctcccaaccacaccttcatcatttgaaacctgcattacagctccactctccctattcagtcctacaaacctcattaaggcaggaaggccagaatctggaattacttaagtccaggtgtatttaaagtgcgtgatcattctagaggactaactcatgtttgtctttgttcttattgtagacctaaatgacttcacaagggcccgtgtaacaccagtattgcagacccatgtgtcacaaattcaactagcacattgtttttctcccccttcttctatttctgtagaagatgaatccgcaggcaagaatgatggatgggtgaaagggagggggaatacgaaagcccagaggcggagacttcacttccgattgccacgctatatcaagaaagccaacagtctggcctttccgcaagccacaagaaaaggcagatcagactccccggctcctcgggtagttctcaaaggcaaagacaaaaataagaaactagtctgaagaaagagagtccctcgcttcttcagaactcacctgtcaagagcggcgtggacggcgccatgttgtcccggaaagagaaaccgctcgggtgagagttcaccagggccgaacccggcccctacacgtctcctcatgcgtggagacagcgaattggtgtttccggagccatcagcctcggggccaattcacttccggttacggagtgacgcggaaaaggcgcccaaacgcgcacgcgcaaatctagggcgacgcttgacagagcttgggagggtgcgcctgctttcgccctccttctccagcgggaggggcgcgcacttccgcggggcggagtccgtctagtgctgacgttggcagccgaacccaaagtagatcgaggcggcgggctgcacattcccgttgttgcgttgcgtttccttcctctttcactccgcgctcacggcggcggccaaagcggcggcgacggcggcgcgagaacgacccggcggccagttctcttcctcctgcgcacctgccccgctcggtcagtcagtcggcggccggcgcccggcttgtgctcagacctcgcgcttgcggcgcccaggcccagcggccgtagctagcgtctggcctgagaacctcggcgctccggcggcgcgggcaccacgagccgagcctcgcagcggctccagaggaggcaggcgagtgagcgagtccgaggggtggccggggcaggtggtggcgccgcgaagatggtcgccaagcaaaggatccgtatggccaacgagaagcacagcaagaacatcacccagcgcggcaacgtcgccaagacctcggtaaggaaagagcgggcgcccctctgcgttccgcagccggagctgagtccgggtccctggggccgcgtcgcgttttctcccggatccggccgaccgtgggctggtgccgtggaggggtaggggcccgagtctgcgaaccgccagactgtgggggctcgggaacggaaggggagacctgtgaggtgagggggccggcgaccggcgtgcaggcgtgggagcctggggtccgagtggtttctctgcatctgaaatggtggattttcgcttttgcagagaaatgcccccgaagagaaggcgtctgtaggaccctggttattggctctcttcatttttgttgtctgtggttctggtaagtggcttgggggctcccatcaggtagagtcttgggttgaaaggatttgggatgacgtggtgaccggtcagtagtgagtcctacctgcgtagttctcaacccacctgccgaggactccacataattctgtttcgtctgaaccaaattacttgttccacatatgcacagagggtggtgctccagaaacttctcccagcttaatttgtactcacaggagatcaaaaaggaggtcaggtcttggtaatgatccagttggaataaatgttaagaccggacaaaacctaacgaaatgagaatttagaatgttttgtaactccattatcagtctttgcaaagaaaattataaatatgtactatagatgttagaacttgatttaacatataccagaatctaatgtcttaatgtcaaaattgagtatattttataaaataaagcttgtgcaaagaattgattcactatagaggaaattacctgattggcattttaatgtgtgagtcaaatgtttttaggttaataaaagaaacgtttgatacatggtttaaaaaaaaagtgtcggggtagcctgctgtcccctaagagtaacagacacttgcctttgcaaatagattacaaaaaaaaggtctttcctctcttcatttatcattttaatatgcaagctgttaatattgaagtagatgtttgttttccacattctaaaattactgagatttctgtttaacgtttcactttgcctttcttcttcacttaccaattggaagctttcctgataaatggatgagagccaagcagtttatataacctgaagatgattgaatttcagctttgtgagaatgaggaaacatgcatgtgttacaggccaggccttaaaaggatgcttataaaccaaaataattctatgctggaaaaacctgt

SEQ ID NO: 315603 - DNA, 4001 bp, Homo sapiens
actgaagccattaaataaaagcaaagtccactggcaccaaactttataatgagattcagaaaaaacccaagtttattctttaatctttgtcacagaaaacccaagacagacagatacaaagtttcagctgctcacctcctgataagtgtagaaaatacccttagaacttacaatgacatctaagtagacacatttttcccctctcacatttccccttagttacattcatcctgaaaaaactggaaaaagatggcgaaacatggaaagaaaagttgcagggccttacagtaaatgttctttgatttgagcagctttccagcaacaaaagacaaatgtttcctgtacacctgtggcagtcaggaattccagagtgtagtcaattaatgccacattggccaggggcaagaggacctgaaggatacaagatgaaaaaaaacttgaggtctcgaatccctttgggtaccccactgcaacaattttcactcctctattcgtatttccaaacagtgtaattttgctgtatctttccaattcaaagataaacaggttcctgcctttgatgttcatgccatgctctaagcctgagtctgagacattgcaatttggggatggtaagtacagaatctatgtgccttgtatcagacacagagctgtgacagaatggcagttcactgctggcaaaggataatactggaaatcaatcatatttccataaatttaagcattgctaaggccttcttccccataagatttccttccttgatccctttctaagtgtcagaggttagccatctcccgtcacttgtcaaaaatgaacagccattaggctttttcgagggaattagagaggattttccttaaatccaatgcagttccctctttctgaactgactgctgaacgacccagctgagtccaataccccattgtctagacaactcgggggctgatggcaatcaaccactaaacccattttgtcctttcgacagatagcaccggctatcattagaacctggaaggaaaaaaaaaatacactgcctgagatctagcccgctctttttaaggcatattaccgccctttcagaggcaaaaggtcgtttcttttcacctaagcaaccgtcatcggcaaggttaaaagcggcgcagcctcttctaggggcactgaatccccgcgtgaaggcttctctcaagcgctgtttctacatttagctctcttcattcctttcaaacccgaggtggacagcattacgaatgcccaaatctgccggccactaacttggtcagcagtcatcagggtttagacagtccctctgcatccggttttaggataacagcatagacgcaggtccttcaagggcatgctgttgtagttagccgaaatgagaacttgctccagccctgccacccttcctgccctctggctgctcgcgtgcgcggcgctcacccgaggctggtccttggagatggggaagaagcggcgatcgaagctatcggccaccagaactgcttgtaggggcggcggcggttcctcctccgcccctctggctcccccgccaccgctgcctcccggccccgcgccgctgcgcttgttagcccgactaaccaccacaccaggcggcgccactacaggggccgccatcttcttctctcacggtcaccacttccgcaaggaagctgccaccgcacgcagtaggggacaaaaaggatccagcacttgaaatgcgatggactaattaacgaagggaaggagacgaggagggagcagtgcgcatgcgtcttccccgggagcccacaggggtctgaggttgatcccggaggcgcgaggagtcggtacgggtcacggttgtcccggcccctgaggcgcagggtaggagtggggtcccatagatgtcagactcggtctgcaagtatcgtcggccttcatttgtaggtgaacaagccgagattcttgtggcgtgataggacttgtggtcgccacgaaggggccagctccatcgggaatctgtaatcgcccagcagtttccccgccccgcgcatgtgaaatatgtagccctccgtattcattctagaaacttctgggaacccagcgccttggggagatagaaccgagccagatgttcccccgctgcgaggaactcagaacctgcataaatagagaaggtggcaggcatatagtagggagaccagtaattccattgagcgctgattttgggccaggcacgatacaagcattatctctgcaaaacatcttattcattcgttcagcaaacgtttcttgaactctcagaaggatgaaggaagtttacccagctagtaagtggaagaactggtattggaacccgatctgtctgactgcagagttccacaatcttgctgccaagttatgtggggataacaatgactattttatgtcatctattcattcttccagcctatcagcctcctgtgtcttaagcagagtggagacgggggtggatccaggcgcaccagtaagttgtactggagttaagcagtaagctttctgggcagaggaaagtgcgggcgtaaaggtccaaggcttgaaaaggcgcagcagcacctttttctctttggggaaagaagcggtggctgcggggaataaaccaactctgtagaggggcggggccgtgggaaagcggtggaacggggcaggaaggctgggcgtcatttgggaggcaaggaacttttctgtaaggcatagcgccctttctgcacgggacctgtccaggttccacgccacaggcttctgcagttcctgcaaactgttcccatcccgccccgcgttgcacgtcgggatttggagttcgcgatgctgagagctgtttccacgtggcgattccgacttgacccgtcgtgctccggcgcccgcctagggggaccgaggagtttgtcatttcttgcctcgttagggtgcggaacgaaaaccatttgatttatcctagaaaaggaaaggctgaagccaactaagtaaaagttttccattaaatgaatgcacgttgtagaaaaggaatgttcaactgccctacaaatccagaggtagaaatgggggaggggagaaggaattaaataggacacacacacacacacacaaacacacacacacacacactcttgggggggtgtttgggtatggaaagtaggtccgattgcagaatttattttaaatgattcccgcaaccttgggaagttgggaagtggtgaatccgctgccgaaaggcatttgtgcttatggtaaatccaggtcttaaaattctgtagactggtagctatatggatatgattttaatagacgagtttcaggaagactctctcaaactgttttttgttgttgttgtttaaaaacttacttgaaatatattggaaaccacatatacataatctctcacacacactacataaagaagtaaaaattcctttccctacttctttcatcctatccaatttgtagagtcataaccattcttaataatttgatgggtattcatttcttccctaaatttatatgtctagaactagagctagagtgtatgcctacatacacacacacacacacccatacatatatattcaaacataatatatgtatatccacatgtattcaaacacagaattatgtttagataattatggttatatgctggtatgccagagccagactgcctggcttcggttccaggccctagttggatagctttgggctactcagcctctttatgcctggacttcttcatctttgaaatgggataataataatacttatcccataaagttattgtgagaattaaatgaaataatatatgaaaagcccttagaacaggcattgacacattgtgaaggtaatgtattagctattttgatgattatgcattttgtctgcaacttgatttttatttaacatatgtgggaaagtagacaaacatagccattttcaatgattccataatattccatagcacgagtataccattgtttatcgaaccatttc

SEQ ID NO: 315604 - DNA, 4001 bp, Homo sapiens
cagctagggcaaatgatttttttcccccagagggtattgtgccttatataatcctgacctcaataaagcctacagctttattaggaaggtttacttcaaagccaatatagcagtgagctttgaaaacatagcatgcaacagatgcatcacgaactacggagacagtcaaatggtaacatgtcactgcagttttcatgttgcacaactgcattcaaacttaaaaaatggggacagatctagtacatccaagagagcgcttcggattctcaatctattagtatacaaccctacaaaccatacctgcatacccagttcttttaaaactttcaacaaaaactccctgcatgcatggacaattaaaaggagggatctggtaggaccaatttatactaagttttaaattcttcacagttgtgaaacctgaaacctatgcaacacgcaagcagtttttttgaactacactatcaatacctgttgagccagttctctggtgggggccaatactagtgcttgggtctccttgaactcaatctccaactgttgcaggatggaaatagcaaatgtggctgtcttgccagtacctgactgagcttgagcaatcacatcataccctaaaaaaagtaggatacacatttaccgatcccacatcaaattgtcacttctacttcacaccatgtattccatttggaacattatgcccaaataatcaagtgatcagcaatgagtattctcttcatttcaggtcagtcccgaaagatgattgccatcatttcactttaaggaatacaaacaggtgctagtcccccagaggttactttcccttttatggttcatgtctatgtagaacaatttcctaaaaatgccagtttcttttacctttaatacagggaataatagctctctgctgaatagcggaaggcttctcaaaaccgtaagcatagatgccacgaaggagagactcctttaaattcatatcatcaaagttatcaacaatctcattccagttgctctgtaagttagaaaaaataatgcacgcataaatgagatgaacacactcacctttccaaagcttcaagatccacaaccgtttcttacctcgatgacaccatcggggtccattccctctgggccgccatgttctctgctgacaagaatactgcagtcagacaccccttccaggccacctcaactgcaccttaagcgcatagccctttgcaacccgtctcagcacgttagcctcccctgcacaagctaaagcagcagcctcagggcgaatatccacactgtgcgccttccctaaaggttggggcctgcggatgcccggaaaggcagccccccaggcccgagcgcatggcgatcccgtttcaactgcggagcgtctcgcgagagctcggagcgccgaactccgcccccaacaatgcgcaagccgggtgattgacgcgggcggagcggcctggcgagggcgatgccaacggttcaccggcaccggtcctgtcccgtcgcctccgcgccgtggccgagtggagaccgctgcctccaacccttccccaagtaaagcctaggaccctcccccaactcgtgtggatgaccgaaaataaagcttcgggtcctggttacagtgtaccgaactcggactgcgccacggctttttactccatgtttcccgtgctctacactgggaaggaaagcagccgaagtttcgtaatgtcttagagaggaaaaacgccctttagccactgctttcgcaccaccgtcctatctccccacaatccgggccctacccatcatggaagcttctggaagggcacaggagtgctgtaccctaagaaaacgtccattaatttagagtttttgcctccgtgccatccactatcatctcccctggcgccctatgaccttcactacagaccgcgaccgccaacagactgcatacctgttataatccgcggagccaccagacatgatccgaaaaaccactcagcgcccgactgaaaagacagcggcgcccaaccacccgttttttataggctcgtggccggaacccgtttcttgcggaggaattttctcgccgtgcttcggtcagctacaaaattgtgatcctggggtcgttacctcggataaaatcctaagcaagttggtagaaaaacccaaatgtggtaatttctcgatattacagggtcgctggaaatcctagggcccggggttgggttgggactctttacctcgcggcggaagaatatagctgcggagttagttaaacctcgctttccccgcccgccctgctcctacggggtttccgcgtccctgacgcagaggcgggccgggggagccgcgccggagccggaggcggaaaccggagatgctgttcgtcgggcggccggggcttcccgcgggtgacaggtcccggctcgcggctcgctgccggcactcaggtgcgggaggggaactcggttattccgcttgctcccaccgctgtttaattccacaatgaagacctgcctggcatttagcccgaccgttaacatccattcagatcttggaaacgtaaaattcctgctagggaaaatgtcggccacccagcgagtcccgggaagtccggtttaccggtacattttgcagcgcgagaaggaaaaatggagtgtcatttgcagatgtctctggagtggccaattctattctcatatcatttccggtctctcgctttctttttaagagtgttactgattttaacctaacaggtgtgaggaatgcctgaaaaaaatcataaacttttgcaaatggatagaaactaagcagtaattttccttggaacgcacgaatttaaatggacgctttggcagatacagctctgtgccgctttgggactacatcggttttgattccgtctatattggtcattttttaaaggctgtagactttgccgatatatagtgaaatgttgatttattgaaattcagagcaataatatccttgctgcgtaaactgcacgggtctttaagctccagacgttttcaattagccccatctcaggtctctcgacaaaaacaaaaaacaatatatgtagtcatttaactttaaaatacaaccctacccatggtgcaaaatatcatcgagactatcagggtaacattttctcatatttcagaaggccaacttaaagaatcattactgggaaagctgactcaattttctatattatagaagatattcggttctaaatactacttttttaatacaaaaattatttatttatttgaaaattcttatcgtgccaggaactaggacaaagattaagaataccaagatggcaaagtgggccaggccctcagtccagtggtactgctcctcattcatccctctgtaatgttcgaaatccagatttgaggtgatgccagatattttctgagaatgatggtcgtcagacatccttgttgtctcatccaaaatctactaaaaatatcctgagatctaagaaattgaaaaaatactaaatcgaaaaagtgaccaaccgtttggtttcacttgagccttagggtgaaaacaattgatcatagggtgataccaatcaacaattaacacttaatcgttggttgttttctttaggattagcactacactagatggtgtaggattttcaagtctcttaagaggaaataaaggctaaactctatggtataggtttacaagtgctaagtaagtttcaaggtaagaaaacttcaaatacagtcaaaatccacacccacactgcctgtaaccttacagtgtattcctaataaatgcagtgattaccacatttgcgtgtgcttactaaatagtaaataacatttgtaactaataaatgaattaaagatcaaaacgtatactttaacaaagttttgcatatcaacacagagcgtgctcttttaaatttaagtgattctgcttacctggaatctgaaataagatagccttctcagtgaactataaatgcttctttgtcaacctttagtgtttgaaatcat

SEQ ID NO: 315605 - DNA, 4001 bp, Homo sapiens
gctccccttctcaaaagatttcaagggctcctgactgcctgcagactaaagtttcgacttcttagcctgatcattaaggccctctatgatcttgcactatcctgaaaatgcccatcaaggtgcctgccttgcatgtaatcagtaggcaacaaataattttctgcacagaagaaaaaacaaatgagtgtgggtgagaaacaatgcgttgcttaattctggctttaccatgctaagcactggggatgcagtggtaccaaaaaccaggcatgatcccttgccttcaaagagcttagagcctagttagaagagcatgatttttaaaaagaaatgaaagtatataatgacaaattataagtgctaagaaggaaatgactagagggcagggatacagagtaaaacagacgggttagaaggaggccctacggagagggagcctgttgtggggctggtccaggcagaggtaccagcacatgcaaggtcctgcgagacaaatgcggtgtgtctgagaatcataacaggggctgccctttcaggcttacccagaaaatagatatcctgggaggaaggtggcatagggttcaccttccaagtcacttaaagatgaaatgctgcatttcttttccctgatataggtccttcaccgggatcacggatgagttagcgagcaggggatgctgcggagtcgctgtgagtccagcactggaaatcagaccaagcgaaatttgaatcccagctccgctacttcccggctctcaactcccttgacctccaagcctctgcttcctgaggtataaagtgggattaaggatggcaacaacttcgtgattactgttgagggagataatgcttgccaagctccccagcacactgccacccacatcagtgcgcacctgagtatcagcggttttaggattacgatgactattactatcgtaaattactcccagctttcgggcagaaggctcattccagatattcctgtcccctctgaggcctcccgaccctgccagcccaggcaacctcccccgcgcacggccaccgtgaccccagcgcgggcgccgccgccggacccccgttacctggggccaaacgcgacttgtcgccaccttgcgtcctgggccctgcctccctcccggccgcctcccgaccccgcggctgctgcggaggcgcccccagcccagccgggcccaggcggtgcgggatgcctcggcggggctggcggcggcggccgcgctgcgcgctccggcggaggggagggggctccgcggcggcggcggcggcggcggcagcggcggcagcggcggcggcgggcccggcggggggcagagccaagaggcgcggcggcagcagcggaggagtaggaggagacggaggaggatgcggggggctgcggacggtggcgaggccctgtccgcagtgaagcccgcggcgcctagggcgcagggagtggccgcctcctcctgcgcgcaccattcctgagatggcggcggcggcacagcggcggctcggggagcccaggaggggccggccgggagcgggctgagccccgcaggacggggagctcgcccagggccggcggagcggcggagctcgggccgggcggcctgcgggagcggcgaggcaggggacggccccggggcggagcgcacggcctggtgaggccgcgatggcgaacgcgagcgagccgggtggcagcggcggcggcgaggcggccgccctgggcctcaagctggccacgctcagcctgctgctgtgcgtgagcctagcgggcaacgtgctgttcgcgctgctgatcgtgcgggagcgcagcctgcaccgcgccccgtactacctgctgctcgacctgtgcctggccgacgggctgcgcgcgctcgcctgcctcccggccgtcatgctggcggcgcggcgtgcggcggccgcggcgggggcgccgccgggcgcgctgggctgcaagctgctcgccttcctggccgcgctcttctgcttccacgccgccttcctgctgctgggcgtgggcgtcacccgctacctggccatcgcgcaccaccgcttctatgcagagcgcctggccggctggccgtgcgccgccatgctggtgtgcgccgcctgggcgctggcgctggccgcggccttcccgccagtgctggacggcggtggcgacgacgaggacgcgccgtgcgccctggagcagcggcccgacggcgcccccggcgcgctgggcttcctgctgctgctggccgtggtggtgggcgccacgcacctcgtctacctccgcctgctcttcttcatccacgaccgccgcaagatgcggcccgcgcgcctggtgcccgccgtcagccacgactggaccttccacggcccgggcgccaccggccaggcggccgccaactggacggcgggcttcggccgcgggcccacgccgcccgcgcttgtgggcatccggcccgcagggccgggccgcggcgcgcgccgcctcctcgtgctggaagaattcaagacggagaagaggctgtgcaagatgttctacgccgtcacgctgctcttcctgctcctctgggggccctacgtcgtggccagctacctgcgggtcctggtgcggcccggcgccgtcccccaggcctacctgacggcctccgtgtggctgaccttcgcgcaggccggcatcaaccccgtcgtgtgcttcctcttcaacagggagctgagggactgcttcagggcccagttcccctgctgccagagcccccggaccacccaggcgacccatccctgcgacctgaaaggcattggtttatgagggaggccccgccacatagacccccaacccagcctttccctttggctcggacggtgacgttgtatcttttccttctggcccctgtttaattttctaagctgccttcaaaatgactcgaagtggacagacacttggattgtactgactcctttgggggtggggtgggtgaggagtaggatgctcagcccactccagctccgcacattcgtcctcctaactcgactttcttcctgacaataggccctgcagtctttttgtagcggtactgacgtcttttattccatgtgtggttcctttttttctttttctataaaggctgtactaattttcttcatgcaacgtttcctaaagaccatggccagttttctacagaagctatttttgacaacctcaagtggcattacattttgcagtgaagtagaggaacctagggggacttcttcacaagttagatttcttgaggatcttctgttggaagcaggagaaagtggggggtggggggaagttgtccgaaatgccctctgaattgccggctgcagggtccttgtgctgcgctggttctttgaaagtctcagtgttgatattgaacttaaagagcagagatggagatcagtagcaaggcagtcatttttttaaagcagtaagtaacaagtaagatttggttcccggtttactttctgctgctaaaaaccacgtcagtgacaactgctctctgtattatagcaatcttgaatggaaacatttctgtcaagttgtaagttttaaaagagtaaagtgttttggttagtaatgatgtggagaaaaatacagtattgcatgtgttcgtgtgtatagattgtggttcgaggattgggagggctctgagaagcagagtactacatcaaaattgttttaagtattttttgccaataaaaaattaattttatggaaatggcttgtgctttgagaagcccagttttattctgtcttatgaaactaatttccactttgaaaattgttcttctgttgtttatggtataaatgaatggaatataatgatatcctccttctaggaaacaaagcatttccttaaaatgtttgctaggttaagctgtgctgttctactgatggttgttttaaattaataatgagaactataatttaaataatatttctttgttagacattataatgttaaactgaaagactaaattctgcaagtactata

SEQ ID NO: 315606 - DNA, 4001 bp, Homo sapiens
ccagactctcctacctctctacacagaacactaacaagtccacaacgtaaaaacaagctgtgaatagtaggtctccctccctcccaagactatcaatcttcattcccagaggaaaccactggcaacagtttccttccagaaaaatgcaagtatgcacatgcaagcatatatctagattcataagttataaatctatatcttttttataaccaaaatggaagcatttaataccaatgctgtaccttcttatttcacttaacattatatccttgaagatttttccatatcaaaacatatagatctactttatcttaagggctgcaaagtaattcattgtaaagaggtaatataatttaattcactagcctccaacatttatgtggtttctagacattttcttatataaataatgctaccataagtatttttatatttatggctttcttcatctacacaagctaatctcagaataagtttggagaagaattgttggctgcatttaaaaatttgatacatattgccaaattgctttgcaaagtggttacatgaatttatatatagctgatatataaataatggttgattctgaaaatttatatttacgaagtgacacatatctgtataaaattccaaggcatgggtagaaaggaagttttgctttctaatgattaaagctagtcaaactgtcaagtttagctccttccttatgtcctttaacaatatcctcagcaaaaaagggctagtcaagaatttttatctgcagtttctgtaaaaggattgtgtaccacatgaaaaaattccctccagaatttagaactaggaacagtctggcagtttttctttactgaatagcaattatatacctttctctctttttgctttggcttccaggctgctcataattacatttggtgctcaatcacagcaccaatattagccaatgaagaagcatcactatttttatatttattcctatttctattttaaagacctaatagcatatatgcaccttacactgaacccctcaaatttattttggaagtaggtggtatatatgaatagataaaatttaaatgaccttaagattaataaaagagattatacaaaatggctaaggagggaacaatggtcacaactttcattcccttcctgtttgaaatatgtaagagacttaattatttttattgctcttcagaatcattcttagaagataataaattggggaaatttccctcatctgggaactggatggcaggaactagaatttcaaggtagaaaggggattcagcgatcatctaagcaaacccatcactttacaaatgaggaaactgaggcccagagaggtgaggtgacttacccgaggccacagctctaggaaatgacagaggcgggactagaacgtgggtagcttgaggtccggaccaacgtgctgtcccactgcatgacacgcaacacagacgacttggggtggcagaagagaggaagagaaggtgaccccacagcccctagcaacaaaaacaacaagaaggacttgaggcactcataaataattaagcaattagctgcagcagctactcccctcccctccagcatccagtcaccaaggcaacttgggcagggtgcctgctggttgcctagtaacagtgtggtctgctcccctgacaagctccctaggcatcaaaggatttgagagccgggaagaaccttagacagggatcacttttccaacaccttcattttccaaatgagaaaagaaaggcccagagaagctgggtaacctgcccaaggtcacacagctattcagacacacagccaggctccattcccagttgctttccattgcactagggctgcctcagggaggctgcagatggaggagagggggaaatcgctctacagttcctagaagaatgagaaagtcagagcgagcaagcaggcaagaaagagacagaaacctgagcactcatatgcaattagcaggagctggtaatcccatcagcccaactttcatcatcaccatggcaacatgggtgaggtgggtgctggttgcctagcaacaagtggtcctctctcttctactcacatctgctccctgggagtcacaggaacagcagaatgatgacgttggaagggaaggcaggggtcctaactcagtctcctcctttacccaatgaggaacctgaggttcagggacactggaagtcacacagccacagagttagctagtgacattccctccattgatggcctctgtctcaacactttgggaagggagccttccactcaataaaggcagaacatgggagggaattggccagtggctcccttgaaaggagggaacacatggtctctaatgtcagaaaacctgggtcaaagctagttctccctaaacctggcaagcttcctaccctctctgtgcctcagtctccacatatgaggactggacatgctaatggtctctatctctcgagttatcgttaggattaaatgagaaaatgtatatgtcaagtccctggtatatagtaaagatacagtaaatgtcaggcgttcattcattccacactcaataaatatttgttgcatatctgctatgcaaatgccactgttctaagctctccaggttcattagcaatacagacaaaagaaattcctctctctgggagcctacattccaatagaatgtgtgtgtgtgtgtgtgtgtgtgtgtgtgtgtgtgtgtgtatttaagtgtttgttgaatgggtggcggaactcattggcaatatgctgtttatgttgctgggctccttctctaacactgagaagtttcctgtttacagggtgtgatactataaatatgcaggcctgtcttttatgtgggaactccgttttcctttaacagcaaaagaaaaaggaaggcaatggccactagatggcagtcttcagtgccggtaggtacagggcacaggaagggactggcctggggcagaggccctcactgaagcttccagcaaaggtgtgttgcagctggtcagtcctagagcaatggcttggaaaggtaggggagacttgacactattctgggatactcacgggtcaggggaggctgcggtgtggttcaagagtgattgcttcagagtgagactgatccctgctctaaccaagatcctgccataggtaaaccctgtgactctgggaagttattaaccttgctgagctccagattcctcatctagggtacagataacaagagcactctcaagggactgctctgagccatgtataagaaaacattgtctataaagcaccttgcaagttgcacatagaaaaagctcaactagtgttatttatctagattccaaaagacctctgaagatcttttaggggccaggccaggcctctcttgttcagagctgctaatggaagagaaaggggcaaaggaaatggcatgtgttaagcatctgcagtgaggacactgaggtccatgtggtcattgagcctggaaaatgtggccttgaggtttggttgtcccactctccacatccatccacctatcagacattgagttctcgtcctgatctgcctgcaatccgtgtgttggtcttccttctttttttctttttctctattattattgttgttgttttttttgagacagagtcttgctctgttgcccaggctggagtggagtggcacaatcttggctcatgcagcctcggcctcccaggctcaagcaatcctcccatctcagcttccccagtagctacaagcacatgccaccatgccctgctaatttttaaattttttgtagagacagggtttcaccatgttgttcaggctggtcttgaactcctggcctcaagtgatcctcccacaacagccttccaaaatgctggaattacagacgtgagccacagtgcctagcctgctcttccttctttattcccactggtgccagccactcccagtcctcactcctgagtcagccaagcatggcctggaggactgcaacagcctcctaa

SEQ ID NO: 315607 - DNA, 4001 bp, Homo sapiens
taaattaatacagccatttctattaaagatctggacactgtggcaataatgtatttcatttgatgatcgacctttagagaacaaaaatgtgtaaatcaatagtatagatatagtttttgtcttcattaaagttactataatcttaagctactagtcttaaaagattgtgttatctgtagtattgacattttagaccagtccttaaaagtgttgttcctacatgtaaactaattttagacctgtttaaaaagaaactctcttgatactgtttccaccagtcagcagtattcacaatttagaccacaggtccaggtttaacaccttgaaaacagataccaggtaacaatagcacagttgcagcacacctatgaaaacagacacgatttcattctgctaaggtctgccaaaagcacgcttgttatgacagtataatgctctcttagcatcccataatgaaagtgaaaatgttttgaaagaacgaaactcactccatctcccccacccccaacttttttgggtctccggcaaagaaaatggcagcaagtgacaattcttatagacgggtgctataagaacccaaaaggaaaaaagaaatgagcttgtcttaaccaaaaaaaaaatgaatatcacttttttaaaacaaaatcttgcagtcattttatgcaaagccttttaaaaccagatttgtgtgtaccaagcaaacttctcagaacactgtcacacatttcttcctaacacttagccagaatagacacggtttcatcaaaatttccaaatgctcttgggacaaccttgaggtgtcatcattgggcacccactgcagggcagacactaagaaggggctttgcattcatccatctattcattcataacaatttctggtgttcttactagggaccaggcacagttctaggtccaaaatgtccaaaaacaaaaatccactgctcttttatccttaactgaggggaggtgttgaggagctggggagacagactgaaagtaaacaaattcatatataataaaatccagctgcattaagcattaggaagaaaaagaaggcagggcaggagaatacaaaacgagggagcaaggtttctattttagatacggtagtcagggggtctttctgaaaagatggcacctgggttgtcccttgagaaagccataattcacccccttcctgacaaggtcagctgctgctcattattgaatctccagcgcatagcaggtgtgtggctccactgtaggtgttcaggaaatacctgcccagtggatgaggaagaactggaagaggagtccacggcagcagcggccggacacggggtgggagcgcccgccgtgcaataatcattgcaccaccgcacacctcccaagggatgggcaacttttccgagcgctgtcacagctgaggtcgtgtcctgagctcccaggcgccccgcggggtaagcaggacagccctctccctgcagcagggacgcggccacccccagctcgcctaccctctcccacggccctgccagcacgccgcgttccgatcggaagggaacaaggggtagaaagtgttgccgaaacttttcgggctgcgctgtcctcccccggcccggaggcgaggacgccgaacagccgcccggcgcggcccgaagctggcttccgacccggcggggcgagtcccggggtgcgcaggcggacgcgcggaggggccgaggtctgtgccacagcggagcggggccggggcgaggggccgcgccgagacaaagcggcggtggcggcaggacccgggtcggggccgtgcgcggcgggccccgcgccccctcacctgtcgagccagaaggtccaggacgagtgcagcgggaccccgcccggctcaggctgcagcgccgacagctgctgcaggccgagcggcggctcgggggcggcggcagcggcggcggcgcgggaccccggcggctcccgggccccggcggggggcgcggcggccgggggcagcgccattttctccgccccgcctgcaaggccggcggacgcgcggaccgcggggcgagcgcggctgagtcacccccggcccccgccccgccccgccccgcgcgccccgccccgccccgggctagccgcccgccgcccgccgcccgccgcccgccgccttcagggcctgggagccgcgcggaggggccgtgggaggcacggccgggccggggccgccgaacaaagacagacccacggagggatggggggccgatcccgctcaggcgcgggcccagcgtgggagactgacggcctggcctggagtggcggccggggacgggctagagggcccacgggggtgagagggaccggggaacggtctgcgggctggctctgcagccatgcaaaagggcagcgggatggagcggcaggctagggacagatggagggatggatgggacaggggatggagccccagacccacgtggtgcgagggaaggagggatggacagacataccagcagtcagaaggatggagtgaaggctggcagatggctggaggagagaaggagggatggagggcagatggaagcacagttgggtgtgacagataaatggagaggggaaccgatggccaaatggataaagagactccagtgcccgcgagtacagaacaaagggcgagaaagaagaacgaacaagagaaccaccgactggggcatgaggttggagcaggtgggctttgcattcctcttggtgagagcatacttcctaactccgctgatttgaaggggccagagcccccatcccaacctctggagctaccatgtgaccacagtgaaggcctcaagcctggcttaacgtgtggctaacttcagagaacatttcccaaaatcagccaaagtatccagatctgccctaaagcaccggcgagtcgggaggaggaaagcgggcacctgtgaacacagagcgctctgcttcctgtacctctgagcacccaggaagtcccttaggcggtgagattcctgagcccaaagtaggaggggccctcctaacacagcatctccccaggtctctgtcactttctttttcaaaagaaaagcaaaggcatgaggcctgtgaacacacatgtcacaaccagcatggacatcctctttacacttgaatttctagatagttcctctctggctttgaacagtgaagggcgtgggatgccatctcctcattgaccttctacctggcctagcatgtgttctgttcatgccttgagcattcgctgggatggaagagctacaaaacaagatgagttcaggggcatcaacagcatcatagcagactgtcatgaatcccagagtagatgccctccctaaaaggtaatcaaggtcacataaagtgacaataataaaaacaagaccgctgctttaaacttaacttctatacaacatacaatgctggaagcaatgacagattttataaaatctgtccaacactaaaacaggggagggtgcttttggttagatgcatttatcttgttgcttaatatctcctttcatttttccaagaagcgtggtatatggcattgtttaaactgctctgagcactttacccgtaataactcatttaatccttacaataagccaatgaggaagatactattaacccattttacagatgaggaacagagataagattaagataaccccaaggtcacagagctagtaagtgggacagctgggatttgaacataggtattcagactccagagtctagactttcaactgccagactctcctacctctctacacagaacactaacaagtccacaacgtaaaaacaagctgtgaatagtaggtctccctccctcccaagactatcaatcttcattcccagaggaaaccactggcaacagtttccttccagaaaaatgcaagtatgcacatgcaagcatatatctagattcataagttataaatctatatcttttttataaccaaaatggaagcatttaataccaatgctgtaccttcttatttcactta

SEQ ID NO: 315608 - DNA, 4001 bp, Homo sapiens
catttcctaccctcccttgctcaagtgctcactctcaattgatagccaatgatatgtttaagtgtttgtttataatgtagggcttctagaaagctcttcctacttagatggctggaatattgctgctcttttcccttttcttctttctgcctggaatgaagaaatgatggctggggcgtcggcagcctactgtgatcatgagggaagggctaaaagattttcagagattcagtccttgagccaataaatcaatgtcagcaactactgacctccaaacttcttctttcacgaggaaaataaactcatgtacacgttttttgctactagtatcaaactgcaattcctaacccatacaccctccaaaatctattttctatcaacatacatttacagatgtgcctggtcagccacttgctgctggccacttaggagtcccaagtcaggtgctcaatagttgattttcttgaaaaatcacttagatttttaaaaaaatatccaaactgtccccaagggccttactattcaaagtaaggtcagcagaccaacagcattagtctcaccccggagcttgttagaaatgcagaacctccggccccattccagaactactaaatcagaatcttcattttaacagggtccccagtgatttctgcacatagtgaagtttgaggctctggactaggtttaccggctctgctctgtcatccctcctcaacactgctgccagaataatgttcctggagcacacctagtcatgtcgctccccttctcaaaagatttcaagggctcctgactgcctgcagactaaagtttcgacttcttagcctgatcattaaggccctctatgatcttgcactatcctgaaaatgcccatcaaggtgcctgccttgcatgtaatcagtaggcaacaaataattttctgcacagaagaaaaaacaaatgagtgtgggtgagaaacaatgcgttgcttaattctggctttaccatgctaagcactggggatgcagtggtaccaaaaaccaggcatgatcccttgccttcaaagagcttagagcctagttagaagagcatgatttttaaaaagaaatgaaagtatataatgacaaattataagtgctaagaaggaaatgactagagggcagggatacagagtaaaacagacgggttagaaggaggccctacggagagggagcctgttgtggggctggtccaggcagaggtaccagcacatgcaaggtcctgcgagacaaatgcggtgtgtctgagaatcataacaggggctgccctttcaggcttacccagaaaatagatatcctgggaggaaggtggcatagggttcaccttccaagtcacttaaagatgaaatgctgcatttcttttccctgatataggtccttcaccgggatcacggatgagttagcgagcaggggatgctgcggagtcgctgtgagtccagcactggaaatcagaccaagcgaaatttgaatcccagctccgctacttcccggctctcaactcccttgacctccaagcctctgcttcctgaggtataaagtgggattaaggatggcaacaacttcgtgattactgttgagggagataatgcttgccaagctccccagcacactgccacccacatcagtgcgcacctgagtatcagcggttttaggattacgatgactattactatcgtaaattactcccagctttcgggcagaaggctcattccagatattcctgtcccctctgaggcctcccgaccctgccagcccaggcaacctcccccgcgcacggccaccgtgaccccagcgcgggcgccgccgccggacccccgttacctggggccaaacgcgacttgtcgccaccttgcgtcctgggccctgcctccctcccggccgcctcccgaccccgcggctgctgcggaggcgcccccagcccagccgggcccaggcggtgcgggatgcctcggcggggctggcggcggcggccgcgctgcgcgctccggcggaggggagggggctccgcggcggcggcggcggcggcggcagcggcggcagcggcggcggcgggcccggcggggggcagagccaagaggcgcggcggcagcagcggaggagtaggaggagacggaggaggatgcggggggctgcggacggtggcgaggccctgtccgcagtgaagcccgcggcgcctagggcgcagggagtggccgcctcctcctgcgcgcaccattcctgagatggcggcggcggcacagcggcggctcggggagcccaggaggggccggccgggagcgggctgagccccgcaggacggggagctcgcccagggccggcggagcggcggagctcgggccgggcggcctgcgggagcggcgaggcaggggacggccccggggcggagcgcacggcctggtgaggccgcgatggcgaacgcgagcgagccgggtggcagcggcggcggcgaggcggccgccctgggcctcaagctggccacgctcagcctgctgctgtgcgtgagcctagcgggcaacgtgctgttcgcgctgctgatcgtgcgggagcgcagcctgcaccgcgccccgtactacctgctgctcgacctgtgcctggccgacgggctgcgcgcgctcgcctgcctcccggccgtcatgctggcggcgcggcgtgcggcggccgcggcgggggcgccgccgggcgcgctgggctgcaagctgctcgccttcctggccgcgctcttctgcttccacgccgccttcctgctgctgggcgtgggcgtcacccgctacctggccatcgcgcaccaccgcttctatgcagagcgcctggccggctggccgtgcgccgccatgctggtgtgcgccgcctgggcgctggcgctggccgcggccttcccgccagtgctggacggcggtggcgacgacgaggacgcgccgtgcgccctggagcagcggcccgacggcgcccccggcgcgctgggcttcctgctgctgctggccgtggtggtgggcgccacgcacctcgtctacctccgcctgctcttcttcatccacgaccgccgcaagatgcggcccgcgcgcctggtgcccgccgtcagccacgactggaccttccacggcccgggcgccaccggccaggcggccgccaactggacggcgggcttcggccgcgggcccacgccgcccgcgcttgtgggcatccggcccgcagggccgggccgcggcgcgcgccgcctcctcgtgctggaagaattcaagacggagaagaggctgtgcaagatgttctacgccgtcacgctgctcttcctgctcctctgggggccctacgtcgtggccagctacctgcgggtcctggtgcggcccggcgccgtcccccaggcctacctgacggcctccgtgtggctgaccttcgcgcaggccggcatcaaccccgtcgtgtgcttcctcttcaacagggagctgagggactgcttcagggcccagttcccctgctgccagagcccccggaccacccaggcgacccatccctgcgacctgaaaggcattggtttatgagggaggccccgccacatagacccccaacccagcctttccctttggctcggacggtgacgttgtatcttttccttctggcccctgtttaattttctaagctgccttcaaaatgactcgaagtggacagacacttggattgtactgactcctttgggggtggggtgggtgaggagtaggatgctcagcccactccagctccgcacattcgtcctcctaactcgactttcttcctgacaataggccctgcagtctttttgtagcggtactgacgtcttttattccatgtgtggttcctttttttctttttctataaaggctgtactaattttcttcatgcaacgtttcctaaagaccatggccagttttctacagaagctatttttgacaacctcaagtggcattacattttgcagtgaagtagaggaacctagggggacttcttcacaag

SEQ ID NO: 315609 - DNA, 4001 bp, Homo sapiens
gagtaaaacagacgggttagaaggaggccctacggagagggagcctgttgtggggctggtccaggcagaggtaccagcacatgcaaggtcctgcgagacaaatgcggtgtgtctgagaatcataacaggggctgccctttcaggcttacccagaaaatagatatcctgggaggaaggtggcatagggttcaccttccaagtcacttaaagatgaaatgctgcatttcttttccctgatataggtccttcaccgggatcacggatgagttagcgagcaggggatgctgcggagtcgctgtgagtccagcactggaaatcagaccaagcgaaatttgaatcccagctccgctacttcccggctctcaactcccttgacctccaagcctctgcttcctgaggtataaagtgggattaaggatggcaacaacttcgtgattactgttgagggagataatgcttgccaagctccccagcacactgccacccacatcagtgcgcacctgagtatcagcggttttaggattacgatgactattactatcgtaaattactcccagctttcgggcagaaggctcattccagatattcctgtcccctctgaggcctcccgaccctgccagcccaggcaacctcccccgcgcacggccaccgtgaccccagcgcgggcgccgccgccggacccccgttacctggggccaaacgcgacttgtcgccaccttgcgtcctgggccctgcctccctcccggccgcctcccgaccccgcggctgctgcggaggcgcccccagcccagccgggcccaggcggtgcgggatgcctcggcggggctggcggcggcggccgcgctgcgcgctccggcggaggggagggggctccgcggcggcggcggcggcggcggcagcggcggcagcggcggcggcgggcccggcggggggcagagccaagaggcgcggcggcagcagcggaggagtaggaggagacggaggaggatgcggggggctgcggacggtggcgaggccctgtccgcagtgaagcccgcggcgcctagggcgcagggagtggccgcctcctcctgcgcgcaccattcctgagatggcggcggcggcacagcggcggctcggggagcccaggaggggccggccgggagcgggctgagccccgcaggacggggagctcgcccagggccggcggagcggcggagctcgggccgggcggcctgcgggagcggcgaggcaggggacggccccggggcggagcgcacggcctggtgaggccgcgatggcgaacgcgagcgagccgggtggcagcggcggcggcgaggcggccgccctgggcctcaagctggccacgctcagcctgctgctgtgcgtgagcctagcgggcaacgtgctgttcgcgctgctgatcgtgcgggagcgcagcctgcaccgcgccccgtactacctgctgctcgacctgtgcctggccgacgggctgcgcgcgctcgcctgcctcccggccgtcatgctggcggcgcggcgtgcggcggccgcggcgggggcgccgccgggcgcgctgggctgcaagctgctcgccttcctggccgcgctcttctgcttccacgccgccttcctgctgctgggcgtgggcgtcacccgctacctggccatcgcgcaccaccgcttctatgcagagcgcctggccggctggccgtgcgccgccatgctggtgtgcgccgcctgggcgctggcgctggccgcggccttcccgccagtgctggacggcggtggcgacgacgaggacgcgccgtgcgccctggagcagcggcccgacggcgcccccggcgcgctgggcttcctgctgctgctggccgtggtggtgggcgccacgcacctcgtctacctccgcctgctcttcttcatccacgaccgccgcaagatgcggcccgcgcgcctggtgcccgccgtcagccacgactggaccttccacggcccgggcgccaccggccaggcggccgccaactggacggcgggcttcggccgcgggcccacgccgcccgcgcttgtgggcatccggcccgcagggccgggccgcggcgcgcgccgcctcctcgtgctggaagaattcaagacggagaagaggctgtgcaagatgttctacgccgtcacgctgctcttcctgctcctctgggggccctacgtcgtggccagctacctgcgggtcctggtgcggcccggcgccgtcccccaggcctacctgacggcctccgtgtggctgaccttcgcgcaggccggcatcaaccccgtcgtgtgcttcctcttcaacagggagctgagggactgcttcagggcccagttcccctgctgccagagcccccggaccacccaggcgacccatccctgcgacctgaaaggcattggtttatgagggaggccccgccacatagacccccaacccagcctttccctttggctcggacggtgacgttgtatcttttccttctggcccctgtttaattttctaagctgccttcaaaatgactcgaagtggacagacacttggattgtactgactcctttgggggtggggtgggtgaggagtaggatgctcagcccactccagctccgcacattcgtcctcctaactcgactttcttcctgacaataggccctgcagtctttttgtagcggtactgacgtcttttattccatgtgtggttcctttttttctttttctataaaggctgtactaattttcttcatgcaacgtttcctaaagaccatggccagttttctacagaagctatttttgacaacctcaagtggcattacattttgcagtgaagtagaggaacctagggggacttcttcacaagttagatttcttgaggatcttctgttggaagcaggagaaagtggggggtggggggaagttgtccgaaatgccctctgaattgccggctgcagggtccttgtgctgcgctggttctttgaaagtctcagtgttgatattgaacttaaagagcagagatggagatcagtagcaaggcagtcatttttttaaagcagtaagtaacaagtaagatttggttcccggtttactttctgctgctaaaaaccacgtcagtgacaactgctctctgtattatagcaatcttgaatggaaacatttctgtcaagttgtaagttttaaaagagtaaagtgttttggttagtaatgatgtggagaaaaatacagtattgcatgtgttcgtgtgtatagattgtggttcgaggattgggagggctctgagaagcagagtactacatcaaaattgttttaagtattttttgccaataaaaaattaattttatggaaatggcttgtgctttgagaagcccagttttattctgtcttatgaaactaatttccactttgaaaattgttcttctgttgtttatggtataaatgaatggaatataatgatatcctccttctaggaaacaaagcatttccttaaaatgtttgctaggttaagctgtgctgttctactgatggttgttttaaattaataatgagaactataatttaaataatatttctttgttagacattataatgttaaactgaaagactaaattctgcaagtactatataatatttttggcttataatgctacatttttattaatgtaccttccgttttgaggatttatatctgtatttctctttgcattatacaaatataccagtattttcattctggagtggttgttttgttgtggtggtggtggtgtttgaggctgtaataatacatgcgtcgaagtatgttacatgcctctaagtatgttatgtaaggataacatgctctatgatccttttagcacgtgttcttcagttacaggtttcatagtttgaccatcagcatatccaagaaaagtggaggcttaatttaaaatgcaagataaaatctgcgaaacttttctttaaagggaagaagcagtagacatatatacggctttaaaactgtttttttatttggatg

SEQ ID NO: 315610 - DNA, 4001 bp, Homo sapiens
gcaaataggaaagcaagagctggcagcagggcccaaagcactgcccccaattctcagaggcactaggatcccagtaatgccaccctcattgacaacatactatccaagggaccagccaccgtgagtaatcaacagggcaaggcgcagagccgcatgaaagaacacagaggattaaggccaggtatggggcctccagtttccatcctagacctaaactggccaaagctttccactgctcccacccaggtcccctactcccctccccacagcccctcacctggcggggctgagaaggcgtgttcatttgtgtcgcttgtggcgtactgaacaccaccggcgctgtctgccccgggggaaacgctggctgaagaggggagaccagagttcagcaagaggggaagcccaggtggggcagaaacccaagctggtgaaataaggggagcagatctgcggcaagagccttaacaatccacataccccctccccgtgacagcccccggggacagcccaggggccctgtctcaatttggcagcaggcggctgcactttgccctgacacagatgggggtaggaagatccagaggctggagactgcctggtctcccccacccccacccctgctaattcctccctaattacctgtgggagtccgggggatggggcgggtggggggcctgtggactgtggagctttgttcatttcatttggtgccacatcagggtccccccagcacctgttgggaaagagtggcgctcaggaagaggaagggacccaagcttaaggcaaatggggcggtgaaagggttgatgcaagggctgggtcccatacggagtcccagagatgccaagagggtgaagcagaaaagatacagcctgtccccaccaacatgctgtcaaacccgcatcacttccaaccaacccctgacctactgaaacagacccctcactcaccccctcgattaagaacaagtccacggtgcggcctacaggttctgggcatccgagggcctggggttgggaggtgagggtatcaacctggctccgcggggccccagaccaaccagaccggaaattccaggtctcgctggcaccaggctcccggatcacgaacggagctagctgcttcggccgtggcgtccccaccccccacccggggacaccgggttcgggcctggcccaggggcacacaggatacgcctgccgccggggaacccgcactgggccagaagctaggcctgccgccgcccaggagtgtaggccaggaagggcgggagtcaggccctaaaaggccaggcgggcggcggccgtcgaggagccggtttcaggcaagtgagggtcggcccggagggcgggcggggccgggggctcctccctgcccgccgccaccgcctccctcccctgcgccctccctgcgcagcgcgggccagtgccaaagaacaacgtgtcacttcccggcggcctggccgcgaaggggggagggggcggcgggccgggagccgtggtgcctgcgcccgtgggctgccgggcctcctcgggtcaggccgaggtggcatttcgcggcgacgaacccggcgccctaccagcccgcggggcccgcatagtccggccctgcgctccccacccccacccagcagccaggcccggccgggccaggcacacgtgggccggggatcgggaccctggcgggccggggccctgggtcgggccgcggggccagggcgccggggcggcggcgcagggtggccggtcccggcccggatggcggcggatgcggggggagggggtgggggggccgggtcgggcccggacatggcggctttaccttcagtctccttcagtccgcgcggccgagccccacgcagccgcacagacgtagtccacaaccatttccggctccccgcacagatcccgctcggcggccaccgcttctccgcaggcgcagccggcgcccccacgtgaccggcgcagggggcggagccgcgccgggcgatctgcgccgccgagcacatgggatttgcccccgccccgtcacgtgacagccacagcccgcccccgtgtcccctcccgaactttgaaactcccagaccgattcccctctgtgtttctctctgttccgcgattctttagttcattcatattttaagcaaccatttattgagtgcatgctaagtacaaggcgaagtgctggttgagggctgagaaactgaaatcaaagtctcggcaaaaaaaaaaaaaaaataagcggggcgcggtggctcacaccttaatcccagtactttgggaggccgaggtgggcggatcacgaggtcaagagatcgagaccatcctggccaacatggtgaaaccccgtctttactaaaaatacaaaaattagccgggcgtggtggcgcacccgtagtcccagctacttgggaggctgaggcaggagaattgtttgagcccgggaggcagaggttgcagtgagcggagattgtgccactgcactctagcctagcctggcgacagggcgagactccatctcaaaaaaaaaaaagaaagaaattaaagactccgtcctgcctaagtaaatcgtgatacaatacgaattatgcaggctttgaaaataatttagattaggtcattgaaaggccaataacaaaggaaattaaaaggatagaaacattctaattaggcaagtagtatgagatttgtagtttaaaaagatcatgggccgggcgcagtggctcacgcctgtaatcccagcactttgggaggccgaggcgggcggatcacggggtcaggagatctagaccatcctggccaacatggtgaaaccccgtctctactaaaatacaaaaaattagctgggcctggtggcgcacgcctgtagtcctagctactcggtaggcagaggcagagaattgcttgaacccgggaggcggaggttgcagtgagccgaaattacgccactgcactctagcctggcgacagggtgagactccatctcaaaaaaaaaaaaaaagaaagaaaaaaagaaattaaagactcagtcctgcctaagtaaatcgtgatacaacacgaattatgcaggctttgaaaagaatttagattaggtccttgaaaggcctataacaaaggaaattaaaaggatagaaacattctaactaggcaagtagtatgagatttgtcgtttaaaaagttagaaacattctaactaggcaagtagtatgagatttgtcgtttaaaaggatcatgggccgggcgcggtggttcacgcctgtaatcccagcactttggaaggccgaggcgggcggatcacggggtcagggcggatcacggggtcaccatcctggccaacatggtgaaacccccatctctactaaaatacaaaaaattagacgggtctggtggcgtgcgcctgtagtcccagccactcaggaggcagaggcagaaaactgcttgaacccgggaggcagagcttgcagtgagccaagattgcgccactgcactctagcctggatgacagtgagactctgtctcaaaaaataaaaataaaaataaaaaataaaggcaggcacggtggctcacgcctgtaattccagcactttgggaggccaaggcaggcagatcacctgaagtcaggagttcgagagcaccctggccaacatggtgaaacctcatctctactataaatagaaaaatcagccagatgtggtggcaagcacctgtagtcccagctagtggagaggctaaggcaggagaatcgcttgaacctgggagttggaggctgcagtgacctgagatcacaactgcattccagcctgggcaacagagtgagactctgtttcaaataaataaataaataaatgaaataaaatataaaaagagcagacactcccacggaggggcaaaagcgtaaggatggaagaataaggacagaagagaagtaatcttaaaactgacagccggtcgggggcggtggctcacgcctgtaatcccagtattttgggaggctgaggcagg

SEQ ID NO: 315611 - DNA, 4001 bp, Homo sapiens
aaaaggagcaaataggaaagcaagagctggcagcagggcccaaagcactgcccccaattctcagaggcactaggatcccagtaatgccaccctcattgacaacatactatccaagggaccagccaccgtgagtaatcaacagggcaaggcgcagagccgcatgaaagaacacagaggattaaggccaggtatggggcctccagtttccatcctagacctaaactggccaaagctttccactgctcccacccaggtcccctactcccctccccacagcccctcacctggcggggctgagaaggcgtgttcatttgtgtcgcttgtggcgtactgaacaccaccggcgctgtctgccccgggggaaacgctggctgaagaggggagaccagagttcagcaagaggggaagcccaggtggggcagaaacccaagctggtgaaataaggggagcagatctgcggcaagagccttaacaatccacataccccctccccgtgacagcccccggggacagcccaggggccctgtctcaatttggcagcaggcggctgcactttgccctgacacagatgggggtaggaagatccagaggctggagactgcctggtctcccccacccccacccctgctaattcctccctaattacctgtgggagtccgggggatggggcgggtggggggcctgtggactgtggagctttgttcatttcatttggtgccacatcagggtccccccagcacctgttgggaaagagtggcgctcaggaagaggaagggacccaagcttaaggcaaatggggcggtgaaagggttgatgcaagggctgggtcccatacggagtcccagagatgccaagagggtgaagcagaaaagatacagcctgtccccaccaacatgctgtcaaacccgcatcacttccaaccaacccctgacctactgaaacagacccctcactcaccccctcgattaagaacaagtccacggtgcggcctacaggttctgggcatccgagggcctggggttgggaggtgagggtatcaacctggctccgcggggccccagaccaaccagaccggaaattccaggtctcgctggcaccaggctcccggatcacgaacggagctagctgcttcggccgtggcgtccccaccccccacccggggacaccgggttcgggcctggcccaggggcacacaggatacgcctgccgccggggaacccgcactgggccagaagctaggcctgccgccgcccaggagtgtaggccaggaagggcgggagtcaggccctaaaaggccaggcgggcggcggccgtcgaggagccggtttcaggcaagtgagggtcggcccggagggcgggcggggccgggggctcctccctgcccgccgccaccgcctccctcccctgcgccctccctgcgcagcgcgggccagtgccaaagaacaacgtgtcacttcccggcggcctggccgcgaaggggggagggggcggcgggccgggagccgtggtgcctgcgcccgtgggctgccgggcctcctcgggtcaggccgaggtggcatttcgcggcgacgaacccggcgccctaccagcccgcggggcccgcatagtccggccctgcgctccccacccccacccagcagccaggcccggccgggccaggcacacgtgggccggggatcgggaccctggcgggccggggccctgggtcgggccgcggggccagggcgccggggcggcggcgcagggtggccggtcccggcccggatggcggcggatgcggggggagggggtgggggggccgggtcgggcccggacatggcggctttaccttcagtctccttcagtccgcgcggccgagccccacgcagccgcacagacgtagtccacaaccatttccggctccccgcacagatcccgctcggcggccaccgcttctccgcaggcgcagccggcgcccccacgtgaccggcgcagggggcggagccgcgccgggcgatctgcgccgccgagcacatgggatttgcccccgccccgtcacgtgacagccacagcccgcccccgtgtcccctcccgaactttgaaactcccagaccgattcccctctgtgtttctctctgttccgcgattctttagttcattcatattttaagcaaccatttattgagtgcatgctaagtacaaggcgaagtgctggttgagggctgagaaactgaaatcaaagtctcggcaaaaaaaaaaaaaaaataagcggggcgcggtggctcacaccttaatcccagtactttgggaggccgaggtgggcggatcacgaggtcaagagatcgagaccatcctggccaacatggtgaaaccccgtctttactaaaaatacaaaaattagccgggcgtggtggcgcacccgtagtcccagctacttgggaggctgaggcaggagaattgtttgagcccgggaggcagaggttgcagtgagcggagattgtgccactgcactctagcctagcctggcgacagggcgagactccatctcaaaaaaaaaaaagaaagaaattaaagactccgtcctgcctaagtaaatcgtgatacaatacgaattatgcaggctttgaaaataatttagattaggtcattgaaaggccaataacaaaggaaattaaaaggatagaaacattctaattaggcaagtagtatgagatttgtagtttaaaaagatcatgggccgggcgcagtggctcacgcctgtaatcccagcactttgggaggccgaggcgggcggatcacggggtcaggagatctagaccatcctggccaacatggtgaaaccccgtctctactaaaatacaaaaaattagctgggcctggtggcgcacgcctgtagtcctagctactcggtaggcagaggcagagaattgcttgaacccgggaggcggaggttgcagtgagccgaaattacgccactgcactctagcctggcgacagggtgagactccatctcaaaaaaaaaaaaaaagaaagaaaaaaagaaattaaagactcagtcctgcctaagtaaatcgtgatacaacacgaattatgcaggctttgaaaagaatttagattaggtccttgaaaggcctataacaaaggaaattaaaaggatagaaacattctaactaggcaagtagtatgagatttgtcgtttaaaaagttagaaacattctaactaggcaagtagtatgagatttgtcgtttaaaaggatcatgggccgggcgcggtggttcacgcctgtaatcccagcactttggaaggccgaggcgggcggatcacggggtcagggcggatcacggggtcaccatcctggccaacatggtgaaacccccatctctactaaaatacaaaaaattagacgggtctggtggcgtgcgcctgtagtcccagccactcaggaggcagaggcagaaaactgcttgaacccgggaggcagagcttgcagtgagccaagattgcgccactgcactctagcctggatgacagtgagactctgtctcaaaaaataaaaataaaaataaaaaataaaggcaggcacggtggctcacgcctgtaattccagcactttgggaggccaaggcaggcagatcacctgaagtcaggagttcgagagcaccctggccaacatggtgaaacctcatctctactataaatagaaaaatcagccagatgtggtggcaagcacctgtagtcccagctagtggagaggctaaggcaggagaatcgcttgaacctgggagttggaggctgcagtgacctgagatcacaactgcattccagcctgggcaacagagtgagactctgtttcaaataaataaataaataaatgaaataaaatataaaaagagcagacactcccacggaggggcaaaagcgtaaggatggaagaataaggacagaagagaagtaatcttaaaactgacagccggtcgggggcggtggctcacgcctgtaatcccagtattttgggaggctg

SEQ ID NO: 315612 - DNA, 4001 bp, Homo sapiens
aggagtacccttaatccctgggaaatagaaagcagccaaagaacagtatttcccctttgcatcaccctttttaggcttaaaagtccttaatctagttcttagattccattgcagggacccagaaacatgtcaaaaatgggcggtcatcaaggagggcaaggaacgatatcccctagcccgccctacctctaccgtccaaccacaccttaccttgagtggctgctgctgcctccaaattctgagacaagttggctggaataggggtactctctggggggagcagttcctctcctcctttctcactctcagcttctcctgcttctcctgcttctccttcttcctcttcttcttcttcttccatttcctcctcctgagctggggaagtagctgaaggagccgtagctggagtagcagaggggatggtggggggcgccattgatgctgtcacctccttggcctgctcctctggctcactgactgggcttaagtccacagctggtggcgagggggctccgttgagcagttcctcaggttgggcagttggagcaatgggcacaggggattcggaggggcaagctgggggaggagcaagctctgggcttgactccacctctggttccagatcttcagatgggaccatgccattaggctcatgaatttccactgtgtgagatgccaaaggggtgggagcctggagaggactggaagaaaactcagattctggaaccggtttgctaagtgtcacttctacttccagtatgggttcggcgagaggagtgggttctggagagaggcgatatggctccccagtttcacgggagatgggggttgattcttctacagacatttgtatagttgtcatagtgtccccaggaatagagaggactgcgagattaggctcagaccccggttccaagactggggatggtgatggggtcggagaaggcgacgaaggctgggattctgaagggctatgctctgggccaggcagccctggccggtcagcaatgattgctccctgtgaccggtcatctgcaccataggaaggaagaatgagcaactaaaggcaagtgcttaactgctgttgttcctccccatcctccagcccaggcattcccaacttaataaccccgcatcatcttctccccacctaagctatacttccactttcatccaaaacccaattcaccctcaaaatcccacaacctgaaatctaagtcatcattctctggtacccagttcaagtcactccaccacctcagcatttaactgttaacattccctttccccataaaagctccgtcccaccggcttacttacctggccggacaatgacagcaacctggggcgtctccccattagcttgaggctccagaccgcctcccgtctgcaggacacaaagggttaccaagtttgcactgaagagtcccacaacccttctttactagagccatttctactttagctctgcctagaaatccaggaaagcagggaaataaatcccttagttgaaagaaaagatccagggacttgggagtccagggcagaacagacatcccagccagggtatcactcgaaaagcagacagtacctggggaggggtgggtgtggaggcagtgcgggccccagacatgatctcctctgtgatatcctttcctccttggtttggatctcgaattcggatctggggaaagaaagctataagatgagtgggaagcaggaagagcccacctctccaccctgccccaatcttaagactctgggccaactccccaccccccagcgggaagcaggtaggtaggtgccagaaaccccttgagttccactttcagcccatctggctgctctcgtagtccctgccccagctcccacccttaagagacccttgatctcacagagcagccctgtacatcacaatgcccctccctccctcatccctaccccaccagcagtccccaagtcagtggctgcacaccctggggcccaggacccccatctagaacccaatcggctcacttgtggctagtgtgcctgatctctgggggcagggcccagatccagtaggtggagccagggtgactcagcggcttccccagctctggcaccctattctgggcaccacgcccagggcttgaggactgagcagaggcggaggccttgagagcttccaggactgggggggcaggggggaatgggggctggggccacagaaaacaaaccatttccaaggcaagccactagaaacccaaaaccaagcatagttcttccaaccccccagcacccaggtctcgcaggaacttcctcgctaggcacttcagtcttcccatgacctgcttctatgctgaaatcttagcatcttacaaagaacctgagccctccacagacaccattctctgcccactctcagctccttcctcctcaagtcactgctctttccggcacaatgtcccagcagcacctgaccttgattctccccttcccagatgtcccggagcccctcactgctactcaccgtcttacgctccctcttgggagcaatctggggtggctggttcatcaaaactggggtgggggccacgccagtgggaaactgctgcaccccttgggctggatagtaggcgccagcttgggggaggggggacggagaagaatggtggtagcgtcagggcccaaccatatactaatgcctgcctgacacctcccaccccaaaacctctcaccacccacagccggccccttgccttgccctgccctgccctcctcccccagggaattaggtgtctgtcaaagctggggaaccagtctgaactgcgtttacaagaattcctaacacacacacacacacaaacacacacacacacacacacacacacacacacacacacacccctcgtaggcaggcactctttcctaccacacaccagtgaccaggaggacttatgtctgtccttccaccgtacaagttactctcgtgtgtgtaccccacccgctatcaacatgtacacacatactctgaacctgaaacagaaccaggtctttggctggtaatgagagaaagagatctgccaaccctgttccatttaacttgagtctagttcctgtctccagccctttacaaaggggcaaagaaacaaagtaacattatgaactaggctcaagatgaagaaaaattaattccttaaagcaaactatctccaaagtgggtgagttcttttttccccttaatttttttttttttttgagatggagtctcactctattgcccaggctggaatacagtggcacaatcttggttcactgcaatctccacatcccgggttcaagcgatcctcctgcctcagcctcccgaatagctgggattacaagagtgcatcaccaggcctaatttttgtatttttagttgagacagggccaggcgtggtggctcacgcctataatctcagcactttgggaggctgaggcaggtggatcacttgaggccaggagttcgagaccagcctggtcaacatgatgaaacaccatctctactaaaaacacaaaaattagctgggtgtggtggcacacgcctgtaatcccagctactcgggaggctgaggcaggagaatcacttgaacccaagaggcggaggctgcagagagccaagactgtgcgactacattccagcctgggtgacagagcgagactccgtctcaaaaagaaaattaaaataataacaataaaatttagtagagacggagcttcactatgttggccaggctggtctcgaacacctgacctcaagtgatccgcctgtcttggcctcccaaagtgctgggactacaggcgtgagccaccgtgctcagcccccctcaaattttaaaatagagacagggtctcactaagtttcccaggctggtctcaaactcctggccttaagcagtcctcctgactcccaaagtgctgggattacaagcaagatccgggcacattctttaatttcatccctaaattccacttgtttt

SEQ ID NO: 315613 - DNA, 4001 bp, Homo sapiens
gcttcttgtacacacacatgccctccaaacctccaaattcagatgtacactttgcatcctgcagagatttactctctcactgccatgcatacacacgtcacctctaccaaactacccctctgcagaggcttcctaacaccgagatgcatcatgcctaagtaaggccctttcgggcaacatatccccagcatgcactgctccaccagcatgtaatgaggagctaaccataacatgcaacagcatcccagtccccagatgcgcgttcttcaagatgtagcccctaacatgcatcactcggcctccaactgagaacctggacaccaaacaagtcactaccctgaagatccccattccctgtgtctagcccctgactagggtggagggtaaggatgagaccagaagactgtccagggttgggaaagggatattacctgcagagacctgaatcctccctgagagcacatggggataggaaagaagagaattacccccaaggtgatggcggggggagggaatgaaggcaataagacaggacaagaatcctcccacttagtaaggaagaagctggggaacagagaaaggcaaggaccagctggagtgtttacctcaccacagtccaaagagaaagcagagagagcaatagagcaatagcagcctccggtaaaaggagcaaataggaaagcaagagctggcagcagggcccaaagcactgcccccaattctcagaggcactaggatcccagtaatgccaccctcattgacaacatactatccaagggaccagccaccgtgagtaatcaacagggcaaggcgcagagccgcatgaaagaacacagaggattaaggccaggtatggggcctccagtttccatcctagacctaaactggccaaagctttccactgctcccacccaggtcccctactcccctccccacagcccctcacctggcggggctgagaaggcgtgttcatttgtgtcgcttgtggcgtactgaacaccaccggcgctgtctgccccgggggaaacgctggctgaagaggggagaccagagttcagcaagaggggaagcccaggtggggcagaaacccaagctggtgaaataaggggagcagatctgcggcaagagccttaacaatccacataccccctccccgtgacagcccccggggacagcccaggggccctgtctcaatttggcagcaggcggctgcactttgccctgacacagatgggggtaggaagatccagaggctggagactgcctggtctcccccacccccacccctgctaattcctccctaattacctgtgggagtccgggggatggggcgggtggggggcctgtggactgtggagctttgttcatttcatttggtgccacatcagggtccccccagcacctgttgggaaagagtggcgctcaggaagaggaagggacccaagcttaaggcaaatggggcggtgaaagggttgatgcaagggctgggtcccatacggagtcccagagatgccaagagggtgaagcagaaaagatacagcctgtccccaccaacatgctgtcaaacccgcatcacttccaaccaacccctgacctactgaaacagacccctcactcaccccctcgattaagaacaagtccacggtgcggcctacaggttctgggcatccgagggcctggggttgggaggtgagggtatcaacctggctccgcggggccccagaccaaccagaccggaaattccaggtctcgctggcaccaggctcccggatcacgaacggagctagctgcttcggccgtggcgtccccaccccccacccggggacaccgggttcgggcctggcccaggggcacacaggatacgcctgccgccggggaacccgcactgggccagaagctaggcctgccgccgcccaggagtgtaggccaggaagggcgggagtcaggccctaaaaggccaggcgggcggcggccgtcgaggagccggtttcaggcaagtgagggtcggcccggagggcgggcggggccgggggctcctccctgcccgccgccaccgcctccctcccctgcgccctccctgcgcagcgcgggccagtgccaaagaacaacgtgtcacttcccggcggcctggccgcgaaggggggagggggcggcgggccgggagccgtggtgcctgcgcccgtgggctgccgggcctcctcgggtcaggccgaggtggcatttcgcggcgacgaacccggcgccctaccagcccgcggggcccgcatagtccggccctgcgctccccacccccacccagcagccaggcccggccgggccaggcacacgtgggccggggatcgggaccctggcgggccggggccctgggtcgggccgcggggccagggcgccggggcggcggcgcagggtggccggtcccggcccggatggcggcggatgcggggggagggggtgggggggccgggtcgggcccggacatggcggctttaccttcagtctccttcagtccgcgcggccgagccccacgcagccgcacagacgtagtccacaaccatttccggctccccgcacagatcccgctcggcggccaccgcttctccgcaggcgcagccggcgcccccacgtgaccggcgcagggggcggagccgcgccgggcgatctgcgccgccgagcacatgggatttgcccccgccccgtcacgtgacagccacagcccgcccccgtgtcccctcccgaactttgaaactcccagaccgattcccctctgtgtttctctctgttccgcgattctttagttcattcatattttaagcaaccatttattgagtgcatgctaagtacaaggcgaagtgctggttgagggctgagaaactgaaatcaaagtctcggcaaaaaaaaaaaaaaaataagcggggcgcggtggctcacaccttaatcccagtactttgggaggccgaggtgggcggatcacgaggtcaagagatcgagaccatcctggccaacatggtgaaaccccgtctttactaaaaatacaaaaattagccgggcgtggtggcgcacccgtagtcccagctacttgggaggctgaggcaggagaattgtttgagcccgggaggcagaggttgcagtgagcggagattgtgccactgcactctagcctagcctggcgacagggcgagactccatctcaaaaaaaaaaaagaaagaaattaaagactccgtcctgcctaagtaaatcgtgatacaatacgaattatgcaggctttgaaaataatttagattaggtcattgaaaggccaataacaaaggaaattaaaaggatagaaacattctaattaggcaagtagtatgagatttgtagtttaaaaagatcatgggccgggcgcagtggctcacgcctgtaatcccagcactttgggaggccgaggcgggcggatcacggggtcaggagatctagaccatcctggccaacatggtgaaaccccgtctctactaaaatacaaaaaattagctgggcctggtggcgcacgcctgtagtcctagctactcggtaggcagaggcagagaattgcttgaacccgggaggcggaggttgcagtgagccgaaattacgccactgcactctagcctggcgacagggtgagactccatctcaaaaaaaaaaaaaaagaaagaaaaaaagaaattaaagactcagtcctgcctaagtaaatcgtgatacaacacgaattatgcaggctttgaaaagaatttagattaggtccttgaaaggcctataacaaaggaaattaaaaggatagaaacattctaactaggcaagtagtatgagatttgtcgtttaaaaagttagaaacattctaactaggcaagtagtatgagatttgtcgtttaaaaggatcatgggccgggcgcggtggttcacgcctgtaatcccagcactttggaaggccgaggcgggcggatcacggggtcagggcggatcacggggtcaccatcctggc

SEQ ID NO: 315614 - DNA, 4001 bp, Homo sapiens
ggagggatgttttaaattagaacaagaaatattttacaacagagagaatagtacttttactaaacattggacttaattgcaatatgcagtcacttggcctgagaacactaataagtatttgactttttaaaaaatgcaagaatgtgaaaaaaatagcaaactagcaataatcctagaaaagtacatgtgttaaacatcactatttctccaatttctaagatagctggtgcctaataattggttagaaaaacctacaaaactactcttgggttttgtcaaattattactgatagtacaaagtatttgcaccttgaagaaacaagcaacattctaaagaaaatcagtgcttacttgataatcatttctcttaatatttggaacatccatgttgtgagtagaaggacaaatatcttcatattttttgcccgtgaaaatatcaattccaacaaggtgaacctaacagaggagaacaggaaacctgtttaatctctgccaagtatatcactcattacacacacaagagcacaataccaatgctgattacaacagattctttttctcctccttccaaggtcatctaattttacttaaaaaaaaatgtagtggtcttacaattaagaggcagtaaacaactaaacagtatcacgacatgtcaagacccaatatagaccagtgattcaattatgagattacacaagaaaaataaagtgtagatttcttagaattgctagaacaggttttctcatctgtaaactaaatagatcttataggtcactaggattcaggaaagtttcagttcccagttaatgaacattgtaagggcccaagaagggaatgctacctttaagtattcaacgtaataactgattacccagtaattgtgggaaggaaaaaatagtgcttattacaaaattttaagtatagaaatctcatgatctgtaacggaatacaaatgatcaaagtcccaacgccgaagccaaagcctgatctgcaagggtacttaccttggcatgaccatgctttccagttttggaagttgacatctccactattttgcatggtcgtcctttgagcaccacgaagccgtttttgcgcaaggccgagcactgcatagggtaagtgctggaagccccggcatctccagtagtgaaatcaatttcgtctgccatggtgggcaggggagatggtagtttttccgtgggaactacacaaaaagtttgtgtttgctttttaacaacgggtatgtaggcagggaaacgtctcatttcggacaagttatgtgccaagcatcatgggcccgttatttctgcatgtaaggaacacccaccctagactagtggccactttctaactctggcctctacaaacttttccagctactgcttggggaggtgggatgagaagtcgcagaggagctcgctgagggtggggacacccgccctgggcgctcctccgtgctggaaacagcaggttgcggcccccatcgccccaccgcagaagccggcgaccttcccccgccgcccagccctcggccgccgccccgaaccctactgcgggggacccagcccaggccgcaggtccccgcgaaggatgcggggtaacagaacctggccagcagcacccggccctctgctagctggcgcgcaccccgccctccacccttcaacgtcgccgccgcggccgcacaggcgccccctgttctgccggcatccagggctcagctcggcccggcccggccccactagggcctgagccccggcgggtcccgcgctcgcctctgttcccccatccattctccttctttctctcggtcagcgctcagttctgggcgccttccccggccctgcctcactctggccccatccccaccagcttttccccaccagcttttccccaggtcttcacctttcagctggcaaagagcgcctttcgtctgcgcacccgcgctggtcccctacagcagcggcgccggcagcggcggtggcggccgcggcagttccaagagacggggcggggccgccacactttccacaccccagcctccccgcccttacccgcccccactcagccctatttccgggataggccccggagcgtcacaggcaccgccctctcgggctaccattggctaccagattcccgaggctccgcccagtcacgtgaagagcgccctggcaaccccacgtgctgcggattagtgcacttccggcgtggagcgcactttcagcagtctggttgccgagggtgagctcgctggcagaggaacttgcgccttccaactcttaggtttgttgcgttcgggtcgcagtcgactttaatgggaaccaagcaaagcacccaatggcccctgccatcaggtgcgtggcagttatcacatgacgatcgtcagaactcgcgaggcgcgcagattcagcgagtgccagtgtggctggctgtgaagcgaactttgggttcgagcttctggttcagcttgcagcctttcttggggttcgaacctcctcctggtccttaaagaagaattcaggtgcagtattttattacccagctcggcaccgcaggtcctgaggaccccccattcaccccttggtgagatttttggcagcgactgccgccggatgcccctgtagagtcagcactgctccctggggtgggaactcccgaagcgtccgccagctaacaagccagcagtgaaatgaattaacccacttctcacaccaaaggctgttgggaagttgtggaggcgaagggtgtctgactcctacggcattgtgggtccagagaggtgttctgccgactcatccattctttcctcctggcattggcattccttagagtttggggtttaaccctggcacattagaacgcttggatggtcttcaaaattgacctagagcttgtagactgccatagaaaggttcttaaaagagatgtgctcccccttcacagtttcatttcgcaacctaccgcagtatcctatcttggggaggtgatctaggaaattatttcccatcccacacccgcatttatgtggtaactttgatttcctattgctgtctcatgaataatcccatatctcacattcctgtatgactctacagtttacacatatctttcaaacaggtccaatttaactttcgcaataagttactgccctctcatgtactgaattcagcctctagctaatatacaaaggagccattacagcagtggctcatgcctgtaatcccagcacgttgggaggctgaggcaggtgggttccctgagctcaggagttcgagatcagcctgggcagcatcgtgaaaccccgtctctaccaaaaatacgaaaacttagctgggcatggtgctgtgcacctgtggtcccagctactagggaggttgaggtgggaggatcacttgagcctgggaggtggagactgcagtgagccgagatccggccactgtactccaacctggctgacagagtgagaccaccccccccacccccaacaccccaaaaagaaagagccagattagaatcttggttcattagctctttctgcttttccttatacctcctaacttttccctattgtttttacaatgatcgctaatagtatttagtatttatataggcaggtagtgtactaaatttttgatgtgcattattcctttgtttgtcactgctgctttctatttttaaccttgttaagttattcatataaagaaaaatttgtcccttttctttttatgagttttgaaaaacatatcttgatcatctgctatgatcaagatatggaatatttccctcattccaaaagttttctagtggctttttgttctcagtttcctccctctacacccagcccctggcaaatattaacagtacttttttaacctgcatttttagttacggaaaaaggagaaaagcaatttgccccagattacaaagctagtaagttggaaaaccaaggttggaacctaggcagtttggttccagagtcactgctctacctaccacca

SEQ ID NO: 315615 - DNA, 4001 bp, Homo sapiens
acagatgtctgataacaaagttcacccaatggccctgcttcagaggcctgatcatggagagctctagaaagacctctaagggtggtctctgcagagcctgactgtcctgctccattcacctctatttctgtcagtgacagggaaggtcaggatcaagtgatatcatgcatgccacctccttgccgtgtgaccttccacaaatgccttaacttctctgggcttcaggttttttcacttacaaaatgtgaaagatcacatcgtcagaccttcagtgttacccctagtgctgtcatttcctggtgcccacttgattactccattctttcacctggccctaggctgactttggaagtgccagtggtaactggcaaggtaatcagagtcatctggacaagaactgcctggcaactaaaatccacaaggatctactgaaagctacaatttggcgctatggggtcataaaaaggctttagacacttagtatcctggttgcctggaggagtttaccatttcattaggaagacaaagattatgaataaaccaggctgggcgtggtggctcacgcctgtaatcccagcactttgggaggcagaggcgggcggatcacctgaggtcaggagttccagaccagcctggccaacatggtgaaaccccgtctctaacaaaaaatacaaaaaaaaatcagccaagtaattagcccggtgtggtagcgcacgcctgcaatcccagctacttgggaggctgaataaggagaatcacttgaacccgggaggtgaggttgcagggagccgagatcgcgccagtgcactccagcccaggcgagggagcgagactccatcaaaaataaataaataaataaataagccaaaagatacactcctgaaagaggttactcctacgttaaaatgtgaaaggtttcaaggtaccccggagtgtgaggagggtggagagaacaggccagcctggggtgcccaagacggacttggtccaagccaatttggctctgtcctgcttctaacagttctattagagatcacaaggaggaagagtaagaagaacagcagcgttcaatacaatgtgccaattgctccggggcgaggtggcggttaggaagctcgcccatgaagacggcggcgaaacgaactcccctctcctctcgggcctattctgcagtctcctctgagcgcctgggaccccccaccccagtgaacatgcacagcgcgccacagttcacgtccgcgaatataacccaaccccactgtcggccatgcttcccaggtactttttttttttttttttgaggtggagtcccgctctgtcgcccaggctggagtgcggtggcgagatctcgggtcactgcaacctccgcctcccgggttcaagcaattctcctgtctcagcctcccgagtagctgagattacaggcatgagccaccacgcccggctaatttttgtatttttcgtagagacgggggtttcaccatcttggccagacttgtctcgaactcttgaccttagatgatgcacccgcctcggcctcccaaactgctgggattacaggggtgagccaccgcgcccggccgcttcccagggacttttaaggacacgcacagccgttgagaatatgcgagatggcccagaagcccactttcggcgggcccaagcctccagtccaatccccgggtcgatcctctgcggactacaactcccaggtaccccgtgccgggtcgtcgcgccattccccggggtcgtgcgcaccgcctcccggatgcagtattccgctgccctgccaggtcccgcccccttccggccagcgggacctcttacctgctccgccctgtcgggggtggtgttaagcaggttattaagttccacgaacattccgagctcctgggactagcgctctggaggagaacccggagtgctgcagagacgacggaggctggagagcaaaacacacccgacagcccggctcgcgcaaggaagcgcgcatgcgcaatgccacttttgcgagccagccacagccaatgaggcgggtgcctcgatgggaccgctgcgcacgcgcgtagacgtccgtcgagtcccaggtggtaggaaacgatgggcttctctgtgcgactgccagcggcctctggcggctcattccgcgcagatctgcgtggcgcccgagccctcccagtgggcccccaaggctccacgcgaccgagtattcttcttcccttggcctcgctctctgcccagccccgggctccttttctccacacgtggctgtcaagcgccttctgtatgccccacactcctgggagcttgggctacatcgatgaacaaaaacaaaggacagggaatttattattattattattattattattattattattattatttaattgagacggagtcttgccctgtcgcccaggctggagtgcagtggcgcgatctcggctcactacagtctccgcctcctgggttcacgccattctcctgcctcagcctcccgagtgtagctgggactacaggcgcccgccaccacgcccggctaattttttgtatttttagtagagacggggtttcaccgtgttagccaggatggtcttgatctcccgacctcgtgatccgccggcctcggcctcccaaagtgctgggattacaggcatgagccaccacgcccggccgacacggaattatatcttgaaaagttgtgtggagaaaagcaaagtgggattagagagtaccaatgggggcaggggtaggttccagaattaaagaggttgtcagggtgggtctcactaagaaagtgtggttgcggctgggcgcggtggctcacacctgtaatgccagcactttgggaggcctagacggagggatcacgaggtcaggagttcgagactagcctggccaatatagtgaaacccccttctctattaaaaatacaaaaaattagcctggcgtggtggggggcgcctgtcatcccagccactcgggaggctgagccagtagaatcgcttgaacctgggaggcagaggttgcagtaagccgagatcacgccattgctctctagcctgggcagcagtgtgagacttcgttaaaaaacagtgtggttgcaacacgccctgtatgcctgtcctcagagcctttatactaactcttccctcttcctggaatgccccttttcccagatattaagctgattttaaaattccccacttccttcaggtctctgctccgatgtcactttattcgtgaggccttccctgagcaccttacttaaatcacaaactgtccctttcccaacacttctttttccttgcttttatttttttccataacatttatatctattataccgtatatagttttgttctagcccaatcagcctcagatcagtggacaaacctgtaattccaccaaagtcaagtttattgacagtcactaaaataattgttatatgatttgggaaagagtcgaattcaggtgaaatttaagtgaaccggtgtttgatatgctcaaagcacagcacagctgtgtgtggagtcctaatctggcgtggactgcaaaggggacccagggtcatttctgtggaaactacaaggttaagatcgatgtggaatgtaatcgttagctgaagctctgcacctgggatggaaatcaaggctgcttctctgtgtcaaagggatgtagatccttcagccaagaatgagatgtttcatgcttattgaaatgtgagaaagagaaaaaaaaattggcctgacactcacagctaggtcttggtgttcctgttgagcataaacaatttcataaaacaccaacatcagactgattgtgacggatcaagacaaaactagaacactccataatcatgttgaacacaaaacatgtacattgtccaagccacaaccaaacatctcatttcccagcaaataagagtaccacttctttaccaatctctttagcctgatacaagttcttttttttttttttttggcctgataccagttgtt

SEQ ID NO: 315616 - DNA, 4001 bp, Homo sapiens
accctgtgtgacgctgtaacgcacctggcactcttctcaacgaacgggtgggatggaacttgttaaagcctctgtttctataaaatgagacaatatgtacctcatagagttgctttgaagttttaaataagttaatgaatgtaagtacttcacatagtacctgatatagagtaaatggttattattcttcttggcataattgggaagaactaactgaaaatgttacagtagtgcttcctaaacttcagtcactctcatgccatgttagaatttttgtccaacgcttgtatcattacatatttaatactttttatatatcaacttttttcccatctatatgattttaaaggaatctttaaattaccagcaaatggaaatccagtattgtcacaaaaaagaaagtaacttaagtacagtagaaacaaaacaacattattaaattttaactagacactgttacctgtgaaaagttcttagcctgaggcttactctctttattaaaacgagaaattaatgtgagagagaggtgctaaagatatagtagcacttacctgagatgatttctgaaagtaatcagaactgactgaaaattgcttgtttttctaagagacaaggtctcgttatgttgcccaggctggtctcccacaatcctcctgcctcagcatcccaagttgctgggagaaaactattactttaatatgaggggctacatgtctagataaccacctataatcatctcaaattcctttatctgtatataaatattgcaacgaggggctggttgccatggctcacacctgtaatcccagcactttgggaggccaaggcaggtggatcacctgaggtcgagttcgagaacagcctggccaagatggtgaaaccctgtctctactaaaaatacaaaaattagtcaggtgtggtggtgcgggcctgtaatcccagctactcggggggctgaggcaagagaatcgcttgaacccgggaggcgtagactgcagtgagctgagatgacgccaccgcactccagcctgggcaacgagagcgaaactccgtctcaaaaataagcaaataaatagataaataaataaatactgcaatgaaatatgtgaggaagttgcctccactctagtggggggaaataattacaattccttacatctctaatggcagttttacagactgcaaagcgctttggtacttggcatctcagctgacagtcccaccaggcccgacgcctggaacagtaatttggtagaatgcagattatcacactcacttgactggatgttacaaagactaaacgctgtaacgcacctggcactcttctcaacggaagggtgggatggaatagttcataggtaaacccaccgagggtcggcgactaacctaaaggattaacagtactgtttttttcaacactcaatacgtcctagatcctgtgctaagggacttacagacatcacctaatttgattcctacctgtctatgaagcaggtactgttatcatccccatttcacagaggacaaaagtgaaacacagaggtaacgggtaaggtcaccctgtcagagggggcgcgacgtgaacctaggcaaattgacacaactcctgcacttttttgcccaaggtcacggcggtgtgaggtaggctggagaagggagggcgctgacctgtcagatacttgttcctgggtgagcttcttgtcgctctgcagcaggatggacacgtagtggcggatcatgcctacgaagaaagtgatgataacgatgggtaggaccacccagaggcggatgttggagtcgagcaacagttctggccctgccatcttcactgaaagctggttcccagtctggaatgggcgagcttctcttctccggggcacagttgcttctcttcggcttcgcctccgggccttctcaagcccctttgcccgtgtaccccagaactctcctgcgactgtgagccgagcttactgccttcagctgggctgcctggtcttccacttccggcgcgaacgttgacgtcacgtcgtggcgcacctcagtggcgtcagagcggcgtcgggcctggcgggaaagtggaaaactatcggcggtggcccaggctcggtggctcactcctggaatcccagcactttgggaggccaaggtggggggatcacgaggtcaggggatcgagaccatcctggctaacaggtgaaaccctgtctctactaaaaatacaaaaaaattagccaggcgtggtggaggcgcctgtagtcgcagctactcgggaggctgaggcaggagaatggcgtgaacccaggaggcggagcctgcagtgagccgagattgctgcactgcactccagcctgggcgacagaggaagactccgtctcaaaaaaaaaaaaaaaaaaagaaagaaaactacaggcggggacggcttctcggtgagtaaatggagcagtggtcgtagtctctcgaggccccgctcccctgcgacctaatctcttaagtccgggccgcggtcggcgttcttctctggggctccgcgccccaagcctcggcttcctcatctgccctgagatgggatagtccccacaggtacctttctgcgtcgttaaaatgaggaaatgagaaaggcttttaccctcacccccttcccgatgaactagtccaggcagtcggcctcatctcacgtctgttgggcttctcgggaagccaaatggtatcgcacgtgttaaaggcgggtgtctggaagccgaaagtcctgactaactgagaatgttgactaatccggatagcattgagaagaggaaatggagctattcaacagattcattgatctatataagctgctataagttacatttactctttctgtgtagtacctcacagaattctgaaattttggatatgacattctacgacattgcatttagctattctcacaactctatttttcaaaatgtccaacgtttaaaattttttcttcctcagtctttcaggagattgtcatggttgagagactggactgtacctacccactatgaatgagcagaacaccatagctaatattaactttctgcaggtaatctctgagcttcgggagaagttggatcctgcagcattgtgttttgccatcactgttgcaggctttccaagtaaagttaaaaagtaaaggacaagcaaggtaaagagctcatggataattgccacccttttcctcacataggatgtcacagttctctgacatcccacagtcagagttggagcttaatacttacaactacaaataatggtactattatgatatttacatctagtattatatcgtttttcaaattacgtatatgtatgtggctatgtatgtgttcatatgttttcttagccattcagatcaatcccaggcagactacagtgcaagtttattagccatcttatacatgaggttgtcatttactccagggtacatggctactaagcaggaattcacatcttgtaagttcttttctggtaggtagaagagtaatttttttcctctctgctacttgtaattcctcaggaaatcaagaaagcagcggtcagaaccgtattattctctttgatgtaataaagtcagctattagatatgagaaaaccatttcagaagcctggattaaggtgggatctttggaactttgattatcaaggaggaaatgagtggcaattagtgacagatgtataactgaggtagattgaaataaaaatctcaaaactcattcaagtggaaatgatagctgatggttgccatatggacacattggctcttagatgagataacagggcatgctgaataaggtgtaacgtgtttcgctgatgtgtcataatatttttgtgactctcctgttttttcaggcaattgaaaacactgcctcagtatctgaacacaaggtaatgttcatgtactatgcattttcagtattgcagacttaaaagtaatgacattggctagcttgccttcccactgtctttctttctcctcc

SEQ ID NO: 315617 - DNA, 4001 bp, Homo sapiens
agtgacgttacaatctgtgttaacatttcaaagtgttttgggggaaaacctaaagatcaaaggaaaacagctcctcaagtgcaatgtccctttacaaaaataaaagttcatatagattgcccttactatcctaaaatcatatccttttggaagacaagaatacccaatttaggggcatgactaaagaatgtctatccatgggggaggagtgtgtgatatgtatgcagtttcctgaccacagctacgtggctggcctcctaagtcttctgtgtttcagcagttttcaagtaaaaagctatgattaccttaagcaaactcttgtccttgcagaaaagcttattacaaagcaaaatggatgagaccaggtcttactcatttaggaaatgcagcctagagctgtgctgtcattagggctggacaaacatggtaattgcaaggtacctacctgagcttggagaagccagagccttctgggcttccacatgagcaactccaaaaagtgctctagaggcaggcggggcaagcttagaagtgtgtgtgtgtgtgtgtgtgtgtgtgtgtgtgtgtgtgtctgtgtgtgtgtgccttccagtgtgagaaaatcctgcacttgtgcctgcagtatcaaccataacaacactgactcacagtgaggggtgggggtgttgtaggcactgtgccagcaacatttggatgggaatacaggaaagatccaagtactgtacaattgatcacaaaatcaacaatacagtattctaaagcaaacgttacacacagctagctaagggaaaccacaagggccaaattaatggattatacaaaccggaaaaaccatttaagtgaaacatgcatgttagtccttgttttgtgtggctttgatgaaaagcattacttttatttgaggaatgccggtgttgaaacccagctgagtactgagtctcaaaccaataaagttaaacaatcatttgcaggggatatggatgaaaaactgtaggccgaagctggggttctcttgcgatttggcaaaaccacgcttgctacctgctgagagatactaacctgcttgctcacatggttggcgggtcagcacagtgaacatcttttctcctagctgcaggtgagagaatacaggatgtcagtaagtccaccgccccggcctcacaagtttaaagaacgagcccaggttaagacaaaacccattttacttcctccaaatcaaaacctcatcccgggaaaggtaagccgaaccccagaacttcagagacagccccaaagctggagcttaaatttcatgtcatctccccaaatgaaaggaaatgaaaaatggatttgctgaaacttcaaactgaaaaggttttccgaaaaaaggtctttttctgcagattgttccacctgtacacacacccaagagagaacaaatcttccccctattattaacattcacaaagctgaggcggggctttttttcagaacatgagcaaggaaggtttttgtgtgttcatggatcgcgagcctggagcctctctaaagccccgggaagggagtctttagctgctggctggaaattgcaaagggatgtcggggccctgggatccagcccccaccaggatctggggtcacctctctggactgcgtctctgcatagccgcaggcatctaagcgcccagcacatctgcggatccatgcaggctgtcggtaaagacgcgcccacccgtcgtgggcatgacagggaccacctcccagccgcccaaggatttggggctaccgtgtttcagtctcttcctctggccctctgaggaaatccgattttgtttctttgcctcccaactctcagtctcacgcagcacccccgactccttcctcggcagctcaggcgccgggtcccctgatcttacctgtgcggagccgattcggagaaggcgactagcgctgccgcagaggcggcccgcggccagcgctaaggaggtgtcagctcagacgccgggaggcggcgccgggtatagcggggcgggggcggggcggcctcggcctgggaccgccccccccgtccgtgtcaaggccaagtacctcttcaccttcttttctgattgctctcaccttcacacccagccctcgatggaaggggaagggagagagagcgcgcctcttgccaaaagaccggccctgcctgcccagagagccttctgtccccctccaggtcgaagccaaacagcacttcacctttcctctttcagttccctccacactcacctgtacctgaagtcggagaggagggagccaggccttgccctgagaacccaccggagcctatgtgggcgagggggaagggaggtgtctattatctgcctccttcttgcatctgtgtcaagaccaagaaccttttgatctgtcttctagttacctccattgtcaccccaaccctaggtggagggaaaatggggacaaggccaggcagggactgggcactctgtgggtgtgcatgaccttatgtggtcccccggtgggtggctcctgtgctccgtctctccacggggtggagtagagtcaaacacctgtaatgttgggagtgaggccagtaggcaggctggcccctaggtcacttgggcctaaagcacaaagtatggcaggcacattccctttcacacttagcagaactgccttggccatgcccagggccattcttgctgtttactgagcaatgctctgccctaccccatttaatatggatgtcataaggccaaaaactcaagacaagtacagcccggaagaggcaaaacagaaaagataacaaaaaggcagcatgtgggctgccgtgatccaaacaccccaggagtctgtctcagtgtacagcagcaggcagcctcccggctcctctgagtgaccccagagacccttggagtgatcccagcaagaggcctaagcaggccctgtttgaccatccctccttatggttcctgcatgtctggaaggaagagctgagtccctggctataccctgccatagcctgctttctcctagaaatccactaattttctgtcctgtgcaggtggggccaaagcccctaagacaagaagtccttaagataggaatgcccctgctttgatacctctgagcccagagaggtgggccccaagcctgagttatgtgtgtgtgcctgtgtgtgtgtgtgtgtgtgtgtgtgtgtgtgtgtgtgtgtgcccgcgcgcaagagcaccatggtcattcacccagagttggatagaggtggaccccattgggggattgggacagggtctgcactgggggtgtcagacattcagtgaatacttgctgaattaaaagacttgttttctttgaaagctgtgggacaatgaaacataaggcatatggctggcagctgggggtccgtctgcacccagggggctgtaagtacacaaacagctgctggcagtgcacccggacctgagctcagttagatagccccagtgggtgaatgactaaccttagcatccccagtgacttcccaggggctgggaaaaggtttccaggcctaatgggccttgaaaggcagttagtgctagtgtataaaaataacagagatcagtccatgccagctttcctctctgcttgcatcaacctacagaccttgtaagtgtgagcatcagcctcctttgagagccctgtagtctccaattctccttttatttttccaagcttttctggaaactctgctccaggcactgtgtcaaactcctttgcagcttccaaagtagacctagtcattcaaaggcatttcctcatccaccttccacatgcaagaacacacacacacacagacacacacacacactcctttgtgagttttcctgattataaaataatacagatttgcccaccagctatcaaaacatattgtaaagccacagtaataaaaacagcctggcttgggcacaggaatatactgagagatctaaagaacaaaaaagataggccacaacagactattggatataggattataa

SEQ ID NO: 315618 - DNA, 4001 bp, Homo sapiens
attttttccctctaacaaaatggggtagaaatttaatctgccaagttaaacttgtcctttggaaggaatgtaacaggttagtctgtatgagtgacgttacaatctgtgttaacatttcaaagtgttttgggggaaaacctaaagatcaaaggaaaacagctcctcaagtgcaatgtccctttacaaaaataaaagttcatatagattgcccttactatcctaaaatcatatccttttggaagacaagaatacccaatttaggggcatgactaaagaatgtctatccatgggggaggagtgtgtgatatgtatgcagtttcctgaccacagctacgtggctggcctcctaagtcttctgtgtttcagcagttttcaagtaaaaagctatgattaccttaagcaaactcttgtccttgcagaaaagcttattacaaagcaaaatggatgagaccaggtcttactcatttaggaaatgcagcctagagctgtgctgtcattagggctggacaaacatggtaattgcaaggtacctacctgagcttggagaagccagagccttctgggcttccacatgagcaactccaaaaagtgctctagaggcaggcggggcaagcttagaagtgtgtgtgtgtgtgtgtgtgtgtgtgtgtgtgtgtgtgtctgtgtgtgtgtgccttccagtgtgagaaaatcctgcacttgtgcctgcagtatcaaccataacaacactgactcacagtgaggggtgggggtgttgtaggcactgtgccagcaacatttggatgggaatacaggaaagatccaagtactgtacaattgatcacaaaatcaacaatacagtattctaaagcaaacgttacacacagctagctaagggaaaccacaagggccaaattaatggattatacaaaccggaaaaaccatttaagtgaaacatgcatgttagtccttgttttgtgtggctttgatgaaaagcattacttttatttgaggaatgccggtgttgaaacccagctgagtactgagtctcaaaccaataaagttaaacaatcatttgcaggggatatggatgaaaaactgtaggccgaagctggggttctcttgcgatttggcaaaaccacgcttgctacctgctgagagatactaacctgcttgctcacatggttggcgggtcagcacagtgaacatcttttctcctagctgcaggtgagagaatacaggatgtcagtaagtccaccgccccggcctcacaagtttaaagaacgagcccaggttaagacaaaacccattttacttcctccaaatcaaaacctcatcccgggaaaggtaagccgaaccccagaacttcagagacagccccaaagctggagcttaaatttcatgtcatctccccaaatgaaaggaaatgaaaaatggatttgctgaaacttcaaactgaaaaggttttccgaaaaaaggtctttttctgcagattgttccacctgtacacacacccaagagagaacaaatcttccccctattattaacattcacaaagctgaggcggggctttttttcagaacatgagcaaggaaggtttttgtgtgttcatggatcgcgagcctggagcctctctaaagccccgggaagggagtctttagctgctggctggaaattgcaaagggatgtcggggccctgggatccagcccccaccaggatctggggtcacctctctggactgcgtctctgcatagccgcaggcatctaagcgcccagcacatctgcggatccatgcaggctgtcggtaaagacgcgcccacccgtcgtgggcatgacagggaccacctcccagccgcccaaggatttggggctaccgtgtttcagtctcttcctctggccctctgaggaaatccgattttgtttctttgcctcccaactctcagtctcacgcagcacccccgactccttcctcggcagctcaggcgccgggtcccctgatcttacctgtgcggagccgattcggagaaggcgactagcgctgccgcagaggcggcccgcggccagcgctaaggaggtgtcagctcagacgccgggaggcggcgccgggtatagcggggcgggggcggggcggcctcggcctgggaccgccccccccgtccgtgtcaaggccaagtacctcttcaccttcttttctgattgctctcaccttcacacccagccctcgatggaaggggaagggagagagagcgcgcctcttgccaaaagaccggccctgcctgcccagagagccttctgtccccctccaggtcgaagccaaacagcacttcacctttcctctttcagttccctccacactcacctgtacctgaagtcggagaggagggagccaggccttgccctgagaacccaccggagcctatgtgggcgagggggaagggaggtgtctattatctgcctccttcttgcatctgtgtcaagaccaagaaccttttgatctgtcttctagttacctccattgtcaccccaaccctaggtggagggaaaatggggacaaggccaggcagggactgggcactctgtgggtgtgcatgaccttatgtggtcccccggtgggtggctcctgtgctccgtctctccacggggtggagtagagtcaaacacctgtaatgttgggagtgaggccagtaggcaggctggcccctaggtcacttgggcctaaagcacaaagtatggcaggcacattccctttcacacttagcagaactgccttggccatgcccagggccattcttgctgtttactgagcaatgctctgccctaccccatttaatatggatgtcataaggccaaaaactcaagacaagtacagcccggaagaggcaaaacagaaaagataacaaaaaggcagcatgtgggctgccgtgatccaaacaccccaggagtctgtctcagtgtacagcagcaggcagcctcccggctcctctgagtgaccccagagacccttggagtgatcccagcaagaggcctaagcaggccctgtttgaccatccctccttatggttcctgcatgtctggaaggaagagctgagtccctggctataccctgccatagcctgctttctcctagaaatccactaattttctgtcctgtgcaggtggggccaaagcccctaagacaagaagtccttaagataggaatgcccctgctttgatacctctgagcccagagaggtgggccccaagcctgagttatgtgtgtgtgcctgtgtgtgtgtgtgtgtgtgtgtgtgtgtgtgtgtgtgtgtgcccgcgcgcaagagcaccatggtcattcacccagagttggatagaggtggaccccattgggggattgggacagggtctgcactgggggtgtcagacattcagtgaatacttgctgaattaaaagacttgttttctttgaaagctgtgggacaatgaaacataaggcatatggctggcagctgggggtccgtctgcacccagggggctgtaagtacacaaacagctgctggcagtgcacccggacctgagctcagttagatagccccagtgggtgaatgactaaccttagcatccccagtgacttcccaggggctgggaaaaggtttccaggcctaatgggccttgaaaggcagttagtgctagtgtataaaaataacagagatcagtccatgccagctttcctctctgcttgcatcaacctacagaccttgtaagtgtgagcatcagcctcctttgagagccctgtagtctccaattctccttttatttttccaagcttttctggaaactctgctccaggcactgtgtcaaactcctttgcagcttccaaagtagacctagtcattcaaaggcatttcctcatccaccttccacatgcaagaacacacacacacacagacacacacacacactcctttgtgagttttcctgattataaaataatacagatttgcccaccagctatcaaaacatattgtaaagccacagtaataaa

SEQ ID NO: 315619 - DNA, 4001 bp, Homo sapiens
ttaatagtaacaatgactctacttgtaataaaaatatatacctcttgaatcttcagaaccactcagaagcttctgtgatgtttcaggtctctaaaacctgtcagaaatgaaacatattaccttaaaaggatgctaaagtaaacctgatcattcagatgatgttgtgaattaaaggaaatattaagaaagaaaataatgtaacgtgataactctcagccagaaggcctggccggtggtgcgctttcttttccttaatgaataccacactgctatactcgagttcacaggcaccacccccaacacagcaactcggaccagattccaatggggaacgggaggaggtggcccactttctacaggcatccactggaactggccaacaggatacttagtggatcaaacattcccagaagcaaacaactttcccattctcacagcagtaatcccactggctgaatcacagggctacccacctagagtggcgagcctgagggttcccaggccttcctattttttgactcgtccttcccggtaataaagtcattgttatgaccaagccctgacctttggttatccaagtccattgtcctccagtgagctctggccatcactaaactcaccgatcagtggagaagtaacgcttaggcgatggaaaaaatctaaagacgcagatcagaaagctggcgtctggcgagggcatgtacccacttgcataaggcggctgggggtggctgctgggcctggcacaaagccttcctggtgtcggtcgtcctgcaaggcccgccgggatgggtggctgcactcctccagcacacggacgctttactggccaggctacttttccttcagctcaaagcagctggaatcactccactccagaaacccttgattcgatttccacaggcctaatgaggaaggaaaaaagggaaacatctgaaagatgatggataggaggcaaaacctggggttgacacagcgggcgaaatggggcaatgtcgcagagagagagagcttggaaaagtttaaagacggcagtgggcaaatggaaagttcaacacgtgagaccccgaatgacacctcaacggctggcccctacttgtgccaaaaagtctctcggcgggtgccaggcagggctcaggaagtgctcggctgccccttgaacgtcagtcccggcagagcccagctgtccgcttgaacgtcagtcccggccaagggctgaggggtcagtggcgagcaccccgccgcggctgagacgccgcgctggggttccggaccccgggcgccgccagggattgcttcggggtcggtgatctcccggggccgcccgccaccgtgcaccgcggcgccccgggtccccagcgcgcctgggaggggccccggggagcggctccgccccggctggaaacctggtcaacgcggctagggcccggggcccgcctgcgctccgggcgctgggaaggggccgggcgcccggggccggggagggccaggatcggcttccgacgcccgcctcccggcccgcagggaatgggaaggcgcgggcggagtgcgtgcgtaggctatagccctccgggaagccgcgccgggagcggctaccacccgggcaagaacagcgcagagcgctgcggcggcgggaaggagagcgggggaaggctccgcagattgcgggggagtcccacctggagccggggcagccgtgaactaccgaggaggaggcggaggagacggcggctgttccagaggagggagtcgtcataaccggctactgccgctcaccggaaacctcgggcgcgggagctgggccagggggcgccaaggagcagctgggacaccttggccagccggcgccgtgggcgggctcgggccccgcagaggcaggaccgggactacacccaggagggccagggcgcggggcccgacgctcggagcggcttcagcccggcgagcggcctcgacccggcgagcgcagcagggaggggctcagagtcgaggaaccatctgcccttcctggcgttctcccgcgaacgttcgcgcgagtccgccagctccctcaccagggccggaaagaccgacggcacgtgccggcgccggacgcccatctccatcgcagcagcccgcgcctccttgagcgagagcgttaaagcgctcagaggatgttaggacggggtgggtagaaaacctgactcttcgtgtcttctgcgttgcactgaggtggatttttacttttgtcttatttcaagcagaagttgccgccctaacttccaaatttggggactgaacatcgttcaccgaatacactttgtgatggtgaggatactttggagtccacacacattttaaaagcagtatagttttacctatccgtaaactcatcaagttcaaatgctactctgtggagtttaatttttatggttttgttaatttactttattactgcttataattatttgaactcccatcccccactgtcttttcctctaagctcccccaggcctagtattccatctacagcacagtagagttgatcattaaatagtgactaaagttgaactgattatatgaaggtgatgacttcaaaataaacatgctcaaatgaatatagtcaccagaagttaaataatatgatcataaggaaacaagtttgtttccaaaggcttacatgctttttacgtaatttttaaaagtaatgttgtttaagaattgttacaagttccattagtgacctgctaaattaggaatcttacctggaatttttttcaaataataacagcaagaacatgtggtgtttaacatgtgccaaacattgttttaaagcactttacagtattaatttattctttttattgaaaagattttgcctctaagggaactgtcaagaggcatgtgaaccggagcaactccatcttaaataggagctgagtaaaatgaggctgaaacctactgggctgcattcccaggccgttaaagcattctaagtcgcagaatgagataggaagtcggcacaagatacaggtcataaagaccttgttgataaaacaggttgcagtaaataagccggctaaatcccaccaaaaccaagatggccatgaaagagacctctggtagtccttactactatactcctatcagcgccatgacagtttacgaatgccatggcaatgtcaggaagttaccctatatggtcttaaaaggggaggcatgaataatccacctgtttagcatatcatcaagaaataaccataaaaatgggcaaccagcagcactcagggctgctttgtctatggagtagccattcttttcttcctttactttctttttttttttcctttactttcttaacaaacttgcttacactttgccctgaattctttcttgctcgagatccaagaaccctctcttggggtctggattgggacccctttcctataacagaattactgctctattattttatactttgcatacttcaccatcccacactaatgacagtaattttttaaaatgcttcctcaagccaggcactgtggctcatgccagtagtcccagctactcaggatgatcgcttgagcccagtgaggttgaggctgcagtgagccatgattgagacactgcactctagcctgggccacagtgagaccctgtctcataaaaaaaaaaaaaaaaagcttcctcagcctacttgctaccatcctatttttgtcacatacaaaaaggttaaaatcagtatgacatgtgcatggtactattttattttattttttttgtagaaacaggttcttgctatgttcccagcacttgtttccaactccgggcctcaagtgatcttccagcctcggcctcctaaagtgctgggtttacagttgtgagccaccacgcctggctatgtggtgctattttaaacacctacatattgaatggtcattcagacttacaggaaaccagatatgataaacctgaacatgagattgagtctctcttactgtaacagccattctcaaata

SEQ ID NO: 315620 - DNA, 4001 bp, Homo sapiens
gaacaatattaggttattcttgttaaaaatatatattaaaactttaggctaaaagtcccctttgagtgcccctctctcagcacccacccctccctttccccagaagtagccagtgttagcagttggatgtatatcagaactttctcgcgcaccgaacccgagccaggtctggctccagggcagatctaaccacctactccgaccgagcttccgaggccggcgctctagccttcatgcccacctcccggagacgccccgtggagaccctggcgcctaaaactgcgggagcccatctactgcgctcaggtggccagctcttgagccttccctatccgtggctccttgccggcatgcaggcatgcacaagcataccgccgagcaggaggatctaacgaatccagcttgtggacatgccctaatttccatttccgcctcctccaggtctgttcaggtgaggatgatgggagggaaaagcggtgtacagccgtaacattggcaccctgcaagagccgccggggcactgacacagagggacaccgcattggagatgcggtgtctacggagatttattgcgcgcggtgaaacactctaagcaccgcgcggaacaactgggttcagctccctcatcccggaccttccccaggaccacacgtcaccctttatccccgaacccaggggcccctccacgctgcgctcacctgccctgtttcgtaatgatcatctcagtttggtggcggtggaatttgagccacagaggccggttgcacaggtagacgtgggcacggaagccagaacctggaacccccaggccccccagtcctccgcaagatcccgccgctgcggctccagggtacggcccgtagagcggagccccctggctgtactgataggtgcccgggccgccgcccccgccgctgctaccgcccgcgccactgcccgcaccggctcctgggccgaactgcgccctcccgggtgggcacacagccgcggggaagccgccggggggcagcatggagccgtaggggtagcgcgccccgttaggagccgggtacacaggtccgtggggcgccccagccgccgcctggtacgggaagagtgagcagggcgcagccagctccgacccctgaggaccgggggactggaggtagtaccgctcggagctcaggctgtccatggagtagcgcgcagtggccgcagccgcggcggcggcggcggcggcggctgcagcggcggagggcagctcctcctccccgcagggggagcccttgcggccgtccgggggccccggcttggccactgccgcagcgctggcaaatgcgtccccggcgtcggtgtcactaagcatggccgcgggggcccctgcgctggcggctgcgggctccccgctcaccgcctcgcaggagagactgccggaaaacttcttggacgctttgtctaagtccaacttctgaggagagggggccgcgctggggaggtggccagcgctcccgccgctgccgcctcgcgcactctccagcgggtagaagtgcgcgccaggcaggttcactgagctcaccaagagctgctcccctaactgcatgctttgcaaagcgcagacggcagctggctgcttcctctcctccggtggccttattataaaggcaggatgggggagccagcgccctcttccgaggggaaggtaacttccccttcctcccgcgccggggctacccacctgccgactcgcgggccgctactgcgcgtactggcgcgccctgaatccagcgtcctttccggaaggaaagcgccgtgagttggaaagcaggaggtggaaactaacccagaagccctctccttttccttcctcgtacctcttgctcctcaggacccccaccctcctcccaggctcacacgctggaagaaggtgacttagatctttgtccccatccacccactagcccgcgcctttctgccctttttcaattgccaaagcatcggtcaagttgaccacttggaaacttatgggctgtcactagctgctttatatatttgcggccagggaggggcttcccggcctcacagcccggagaccctcctattggctggtggaggtgacactaattcaattaggcatttactaattggatcaagtcgcctgtgactttcttttcctttttttttttttttttttttttttttttttgagactgcgtcccgctgtgataatcaatcctggtgtctgtaatttcgccggaatttagggggacaaagtttggggtctccatagcggtgtccacccttggcgcattagtcatctcagccctccgctggaggaatgagatggctggagcagattttagaggccagagagagaaagactcttcaagctgatagcttgcagggaagcgcccgtcccggaggctggggaaactggggcaagttggagacaggcccaaggaagtctctttcctcgtcggaagctgtaacttcaaagcacaccttcctcttgtcgaaggcaaactccctggccttcaacgcacagaaccactttttgtttgttcccatccttttacccagtgggaaaggtttgtagagaggaaactcgcgctaagcttttgggattccggggacggccagagcacattgccatcctggaggacctaagctctcagcttctaaatcagaagcttggacagggtactggggacaggacaagagtgaaactaagcgagctaacaccaacttcatactcacgccaacacaactgctttcggggagacagtcacttttattccccacaatttaaaatcctttctgctcagttttcctgatcccggattccgtcccttcaccaccatcttcagttaggcctgacaccaagaaacaaagcttccctaacagccccacagttaggattccctgcgcctctgctctgcggcaaatacagaaggtagaataattagtgaaataatcagtttgatattgaattaaactccagctgcttgtttcttcgctgcgtttcctcagatagattcaagagcggggccgtcatattttatcgtttcattattacggaagcggggggcacgtttcgttgcggataaggagaagcctgaatattcgctgttaataagcaattacagacgccgccagtaatcgctccgggagcgcattttccggctgagatgtcgggactctgcttccccaaccgaacgcgatcacacgggaaactcttcgcccacaacagatgagatggccaaaggattgctgagtgcgcacacgcaagtgtagaacagtgcgaagctttccaacccagttttccaaccacagcagcaccaacatcggcatgtctggggtctccgagaacgaggtccttaatgcacttagactctccagggcatttatcacggttttttttttcttttttgatgtgtgtgttcgcgcgctcgcgcgctcgcgtgtgtgtggtggtgaaacccaggagtgcgcgaagattttcagggtcaaggcacagccacaggggagggggcaagttgagactagtgggctggggcggtggccttgtaggtcctgggacagagtggccaggagcagatcgccagaaagctggtactgagcgcgttctgccctgcgcttcctgcgttttgtgtcatcagtatagttagtgtttggcacggctgttttgatcactacattgtccatgccttcctcccctgctttagtgttattttgacccaaggaagtctagaacattgattgttcaagtagtatagctctgtgaatacctcatgactgtcaacgtgaagatcccgtgaggggtacgcgagctcaaggaaagaaagaggccgtgcagcttgggcggcttggacgacgtatctatccctgggctagcgggtcctgattactattcgtaggatcctccacattatcctttacctgagttgcaagatatctaaggcaaaagtagggatgagaaatctccctaatgtgagacctaatctcacgttatttggagctagggt

SEQ ID NO: 315621 - DNA, 4001 bp, Homo sapiens
ttaattcagtaatatccatatctacatagttcataaccattctatctggaaaatataatttatcatgacaatgtgggaattttaatactatttttctagttattgtcaatattttaatatctgcaaagaacaaaaatttttaaaacattaagtttaatttattgatatgttacctattatacatgttacccgttatacaaatgaatactcttacctttcattcaggaagaatgattgactcttactttcaaataaacattttaatttggtttgtaaaataaaaagtcatttgtgggtaagataattttcttgatccttatattttagaattttcattttcttatttagaaaaaagattcagaacatttaatgaaaactgccaaattgataaaggcagtcagtaaggaaggagataaattactgctctattagcagtgaaagtaggtcaccgagtatcaggcagttattacatttaataaaaaactttctaagtattttgtttttactcgtgtttttaaaattaaggtacatatacaacagtattggcttgacaatatattttctaaggagtgatgtatataacatgatgtttgcacatcagttgctcggtattgttaacttgcaaaataaattgctaaatgttactgttataagttcaaaatcactaagaggaaattaatgttgtaagtgtggctttacactaatcaattatttagagaagtttgttttacgagttagtgactgtattcacaagaatagatcacaaaaggaatacaggagaaagaaaatgtatgtattaagtacacaatcttatagaacacattggtgtccttaacattaggtttgcactttaacccactgaaaaggaattaatgctcattacaaggataataaataacacaacatcaaggaaatgccatttgctgcatatgaacattctctcttaatctactattcagttatttactatatcttcccaggagctatccactattcattaaatacattctcctatttgtatataagcctttaaacaaagagaatccaacctaagcttattgtaattcttgcaaatattacttacgttaatgtggcatatgctgctctttagaacctgtaccatagagcaaaccattgcctggcgggatacacacaacttcaacacagcccttgcaccataaacacgcacctccgcttcgacaaactctgatttccctttagtccattcataaatgccatgatcccaagtaggaacaacctgtcattacctttaaacatactaaagagtctagagaggaaggctgaattttctttcaaacttctcggagtaccacatggtcataattagaaaataaaatactgccttggctatttggcaattaacataactgggttgcaacgctggaggattttctttctttctttctgctcaaattggcaaacaaggtaattgctcgaaatggtgtcagattaaaaacacattttcaaagtttagaccatctaaaattatctcctgaagtgttttagaagacagttggaaaaaaaaaaggcacatctttccttcactctcagagcaaactgctctattcggaggcaccttcccgacgtgcaaggcttcggtgagaacgtgctttgaagagcgtgagccccgcggggcagagctccgtgcgtcgcggtacctggcttaccttcattggaaggctgcggaatcagttccccgaagctgtcgagaacagagcagctgagaaggaggaggatggagagctgacaatccatgttgctggtgcagagggcagtgagaggagcatatctccatgaagcatgccactgatgtgagggggagcgctctgattgctggagaagttaccatgctccgctcgcaggctgatgtcaagtttgacactggagataaggaggagtctggctgcctttccgcgaaccccgctcggggacttccctgggtcctagtgccgtcttcagcgtgcgctgaagcagagcgggatggcacgcagctggctctgcagcccagagctgctcgggaaggagaccgggtgggagtgggggcgtcgcccatgggacaggaaacacagaagatgtgatgaggccgcggtgctgagaaaaatgctccctcttttgtgttgcatgaaaagtagctgttttattgtttgctatccatgctctgttgcttaattcaccgaagaaatcacagccttgataggagtatcatatggcaatgtgagtgcaaaaggaactgaaatgcgagagaaacgtgtgttttgaaagaatagcagtctttcgttaaaaagtcaatcatgtttgtataattgaaaaaaatgattatagttattcctttactgtgttcaatgtgatcataactctccatgagttctttgtgattcagaaagacactaatacacagcctgaatcagagggtctctgcatttccacacccaatggtatcgtggctttttactagatctggcacagtgattttccgcgcacatagagcatactttgttttttttcaaacagggaagttgaccttcatcatcttacggaagggagcaagtctaaccccagccggaggtctacattcttttctcgttctgtgttgtaaaagtaatacagatcaaacctaaatttcttaataatacatatccccctccctcaccatctcacattaggatctctgggttctgcaagagaaacaatgcataattcacagctcctccattcaactttcaaccactgatagtctaataatattggggtattcttattctttaacattccaaatccaaaagctaaataataatgtcctcgtactttctcacttattttacaccatgactatcaatggtctctgttatttccaatcccattgctgaacaacctattgcaatctagttcagccaaacaattttgtaatttatattttaataaccagcatcacttatctttaaaatatctcccagaaaatggttactcagatatccttccgcccatctatctcttcttatactaaaaagaaaacaagattattatattcctctcacaacttcagaaaataaaggtatgttgataatcttaagatcagtgatcaattttagagctcttgataatgaaacttaaatgaaagtttgaaaagcccttgctaataatgtattcagtccacaaactcaatgtttttagttagagaacacaattttcacttgaatttaagttaatggtgccagataatagtttgatgactggggtggggaattggggtggatagaagcagccaggggaaaagagagatccttctcacttttctgtgtatgccatgttactttgtgtctctaacttctttccacattgtgtcaccagaggctgcgcaatcctcaagtgccaagtctgtcagaattgaaaataatagcagatactgcccagagaacttagacagtggtgactctggtgttttttcaaagttccagcacaacacttacattgttccaaagttagatacacgttttctgaaacttgaaagaaactaaaatcttatttggaattgacaatttgaaaacattttggagaatctgccaatgtgctgacacgcagatccattggcgcccctcatgctatttctcttttcacacttgaaaacttaaaaactgcttgtcactgggaaaaaaggcattcatgtttgcagaaagctacaggagtggcaaaatgagtacaaagcaatacctggcctgaaaatagaatgtaaatgatatagaatctctaaattgtcaactctctagtgaaaagtaaaaggtttccattatgtaggcgccattctggacagatggggaaaagggagtgatgccaataagcagagaagagcaaccatagcaggagtggaaaggatgaggtgggggcagcagatgcagggaagcccttattaagaaagtggtagttgagttgcagcttgaaggatgggtaggagttcactagtaagaaaatgattcagaaggaac

SEQ ID NO: 315622 - DNA, 4001 bp, Homo sapiens
acttactattataaagtacagtatcaatgtctgactttccaattattaaaaattgttttgtcataataaaaaagggtaatcgttacacgttttttaacaatcttctaccttcacagaaatgaagttaactacctattcaatattttatacccacagtctttgaaaataaatgagggatgtagtgtgatggtatataccaccacagcaaaacaggacactgtaactgatatctattatgtgatctatcttcaaagccatgaaggttatgtatggtttccaaattcacctacacatttgtgattgcattctgtcagtttaaaataactgtaataattaggaaaatatgccaaagtaccactgtataaatgagaacaatttaataattatattttattctgattctgaacatttctaagtaaaatggccatatatgttgatgacaaagaagaatgctgtgttgtttatcttctcccttaaccttctcctcacacaaaaagtgaacactttcaagccatctgacctccatttttatacctgcaaattacttcgagactctgaaacatatgccttatgtgttaaatgataactataactgactaccacacataatatttgaagggacatatcggttggtcattacagcacgagtgagagaatatctagccagatacatgctgggaaacttttatggttgtttcatgcttagtctgaaaggacttagaatatgcaggtggtactttttatagatctttatgcacagcagaaatacaaggagatatatttcatgaagattgtatgaatagaaaaagggaaaatgctcaaatattccaagggctttccatcactttttaaccactatttaccttcactttaccactttacccaccgaaacaaagtcctccaagcaatctgtcagtgacttgacttcatgaatagggtattcacaacttggaaattcaccctaaacccttttctactccctgcccgcaagaatatgaaacccctacacagatctggagcatctggtctaggaagaatttcgagtaagtctacttcggtggcctggatggtagatgaagcatggggactgaggctgggcgagggcggcagtcaccggaggggtggggaaagactgataactggtcacggggtacagcgggagcaccctgcctttcaagaaggcatgtgggagaaccacacgttcccctgagaagagcgaccaccaaagagccagaagtctccattaagtctgtgccacggagcctgacttccagtggagacagcgcagcggggagcggtcccacggccgctagcggtgggacccaactgcagctgatgctcacgctaccgtttaaagacatttagaaacacaacggatcctagcctgtggagtcaccgtcccgggcggtgtaaacagggcgctagggtaaggggacatcctcgatcccctcgtgtggcgagccaggagactctgacccctgtacaaagttacctgcaggaggcaaccagtaccctggttctccaagcaccctcctcctcccacccactcccgctcctccgccccgtcccttaccttggttgttggagacgtgactgcagtcgcctggccacgctgtcagcagaggcaagaagaaaccaaattgcaaaagaaattcccggacttcgcagccccccatggttctcctaggctctcttttcctctcccttaaagagaagtggcggcagcgcaggcaggtgttctgggtaggatgggggtccttgtccacgtcttcttcctcctcctcctcttcctcctccacccggcccgcagggggtgtcccggggcgccccctgcgcgaggtcccgggaacagggcacgagggtccaggctgcccagttgcaggtgcagctgcttcggaggaggacgctgcctgcggcgccggggagctcctcgcggctggaggcgaggggaattgcatccaccacagtgtcccgcttgcgcgaggactattcacttgggccggagagagcgcgcgcgcgcaagagcgagctcgggctgtggtttgggggaggggagcgagggggcggggagcgcctcaccgcgaggacgggggcggggacggactgccaggtggggcgggcagttggggcggcccgaggacctctcccgactcaagtgggcacttgcggagccaaaagcaggggaggcgctgcagctgtgaagaggcgtgggggccgcgggaactttcctctggccggtgcgatgaaagccgggcggacgaggtggctcaacggggctgagagtggttcggccgaggcgcgggctgagccctcagcacctggcctgagcggcgtgggcagcagcctgcaccgcggacacctccaactctgccgcgtctgcgccgcactctggccgtggcagcgattttccgggcatctctgaggccgcccttagtcccacaagcacttagccgcccatttcagagcagcggcgccgaccgttttaagaggagtcagttcccgacaccgcctcccacttacttctccacatttccaccgctggagggggtgagtgccgtggacaggcgctcccgtccggggacagctcagcggcggcagtcagcccgaccctcctccgcgcgggtcgcccaaacttgaccagcagagcgagcggctcagcgcagtagccgccttcgcggcttccagttgtagaaaagcaaagcgccgggaggaagcagcagagggggggttacatgaggctggaaagtggcgggtgtacggcgcccgggatcgccgaggtccttgcgtcgccttgcggaggtgacttcgcggtggaggtcacgagcatcgtcgcagccttgacgctgggattcaggggtccccgagcgtccacggcgtggtggcgtcgggccgcgctctcctagcagtccaagggccgagtggcgcgtggccacatccacagcagcgcaggggcgccgtgggctgacggctctccccgcgcgagccgccccctcgcggcacccactccctccccgcgctcgggtctcccggaagccgaggcgcgggccacttggtgggactccgcggcccccgccccagggccggggcaacgcggcgtgctgactgggaggaccctcggcgtccgcggtctccaccacctcgccccgcggcggaggcgggcgcccagggcagggacggagcccggagcgctgcagagcccggccaagcccagccttctcccggcctggcagccgcggctcggatgccgccagttcggcgctagagggggttagtcgacaacaaaaatgcctgcaccgctcgcaggtggaggcggctcatcaggccaggaaccgaaaggagggagggatgctgtcaggctaaacttaacgccttggttaagggcgcgtcaaggaaaccgtatcgcttgggtggggatttccgtgatactttatttgttactagtatttccaacatcatttttctttcttgaagggacttcggctatcacagtcgagggaggttgaaaaccccacttcaaaacccgtcggaatgttttgagaaaatgtggatggtaatggagaaatgtgaacagaggagagaaagtagcggtcttgtaaaggatatacgatattttccaagtgggcagaaagcacaggagggaaatggcacagtgacaagaggtcaggggagcgggagatggagccaagggtcggcgtttgacgcttacagagttctggaagggaaaggacccttctattccatgcattcctgcgctgcgatgtttttgtgccacacaccatagctgaagaagtttcacttaatgccttacagtaaattggaaggaaagaaagaatgagagcaagaaatgtcccatgtcaaaaattctgctgcgtggagagaaatggtgaaatacaagcgatttggagaatgtgaggaagggttctgattggtgactatactctcattctcattaggaattcatacacctctgcctctctttgaaggtgtgtccacaccaactt

SEQ ID NO: 315623 - DNA, 4001 bp, Homo sapiens
ttattgcaatgctttagcataatattgcaaagtaacagtaaaaacagaaactttttcttttcttctttaatcaaacagattctaattgtgttatggttaaatataattatgtctgacttacatttttggcagatgtctagttgaggacgttttcttcttccattgtagttttgtttgtctgtattttgtttttaaaatgtgaaatgaattatggatgttataaaacaatttatctgttgccaagtgaattttatgtttttctcaataaagtatatacttaggcagaactatctttgcattcctaagataaacccttcctgttaacacttgttcataatatattagaatttttattgtaattttgaattcaatatggtaatatttcaggctaaaatttttaagcatatacttataagttatctcagcttacagttttctttttcaatctcacgatatttgggttatactatatttagagaacggattgtgaaactttccacttattaatgttctgcaataactgacacaacatgggaattatctgctctttgaaaacttaattgaaatggaccatgttggtagtacacacttgactatcatttaaaattattttacgctatattcaaatcttctccttattcagttttgataattaccgtaaaattattatatttcctttatatttattgatatatatttacatctagtcttgtcttattaaaaatctcttccatacgtaaataacatttcctattatttttaggtaagcttgtttatttgatcaatcttttaaaaacactggcttttgattttcaaatcaaatattagtgattctatttcattaatttttgattttacacttgctcattccttctaatttatttttctgcattggtcacatttcacagttttagatatgtgaggatcttaatgtctttcattttaaatagttcataatttgtctattatgctttaatatattatttaatataaaattaaaatttttaaaataaatagattggagatgtggtgggttttttttaatttctctgattttgttaatggtttgcaaataattatttctgctacaggaaatttgttgaaatttttttgtcctgatataagatcaatatgtatgaatgcttttaagtgtttaaaaataattagtaaaatttcagaattttaggagcaatatgctatatcaattgaggaaatcaaactctttagaaaattcttcattagagagtgcctgtaagatgttttataatcttctaatatgactatatatttctcaatttggccttatatttccaacagattaaaactgtccaaggaagtaaaagactggcatttgaatattttaaaggtattacacagtaaggaaattagacatcttaaataaattaatctttaaattctttgattctaaccagcatttagcacttaattttatacgatttggtcccctcctctacttattgaatgtgcatccgtatgtatcctaaagtgggctgcaatttcctgaaaaatgtagtttacatttccctcaaaaaacaaaacaaaatgaaacaaaggagtgctggatgcatagtcagtatttagtaatgtcaattgattgatatccacaaaggaatcgctaaaccatttaacataaggtgtacctactgcagctctggtcacatatcactgggaattgaactactaaaatttctgctttgacatagcgacacacattaggatacctttcagctcacactgattctcctataaccagatctaactataatctaccagtaatgtaagatggggctggccaactgtcccagaaacaagagcaagctagaataactatataattcttttcctaagtaaatgaacccatgatgagaaacttcactgaacccatgacaaagaaacatcactgaagttgaacaaccttagctttcctggtttctgcctttctgaggctgggaagttccactctgccttggattctccattgtgacaacattaaatagtagtggcagctgggttctgttgttggcaaccaacagagttgttgtcttttctcgcattcattaaaatgcacaagaagaaatttctaatggtgaggggtgagtagaaagggttaagaagttccttggtggtttaagctagtgggtaaggtgctctaaaatgtttttcttaggtaaaaattagccactgttgtggcaaaattgcaaaatatgtataagtaagaaaaatgtagaagtagttattccatgtacacaactactttttgactgcatttctggggacgtatcattaagtattctactactataatttactacaatcaactcttgattattcccagtaatccaaaattacagataaccccaaatcactttgaaatgcattcatgactattttcatatattcctaccaatgtgtaccttgtttcacctaaaatgaatatttaatgcattcctgaacattaaatattgaacagtagtaggagaaggcacagaagtacactgatgatagaggaatattgatctggaattaaacattcgtaattgattttaataaaatagataacatatatagataacgaactgcttttaatagtgatatttactgttagagaaaatggcctaattattaaagtgtgatcttttgaaaatactggtgctagaatgagaccaatagagtcctagttgtagtcagttcatctatgaaaactggaaaggttatacctatatcaaagggtcaagcttgttgtaagataaaccaaaataatatgtaaaactgttttacaggatccagcaggtgtgtaacgtagcattgtttctttcttttaagagtaactatcaatgggtggtgcatttattccagggcaatgataggctcatgccttaaggtcatcttgcagatgctgtgacaagtcttaaaaaatgttgtgtttacttgctttttaacctttatattccaactacttaatacagtatgcctagcatattgtaggctctcatgatatattgtccaaatgattgaattaaaaaatgaattaattgctccataagcttagcttttaaattcttaaatattattagagcaattaaaagtttgttggcataaattaatgacaattcaaatgggagatgagaaaaattacttttgctagcatatagtgcttctacaacctaaatgtaataatattatgtcagtatagcatacttgttttcttaggaacattgtggagaatgtccaagattttacttgccaaaaatattttacaaaacagtatgctatacagaaactaagatttgtgctgaaatatcttttaatacatattcttgatatttattcagttttaactttcccgtctgtcttcatgtagcctacctgtagatagatgagatacagatttttcttctgtgctttaccactctataaatatttacaatgatgttcaactaaaaattaagtgtttaaagtttgatacttggccctgaagaaaatgccttcattccaacatttcttaatagtatttgttaaaagtatattatagtcaaacaacaactttaaatttgtcattcattcttaaagttttagatcatttactagaattttaaaatcacacataaatttggtaataacaatatacggatagaaaaaactcagaaatataaatagcagagagcaaaacatttaaagaatacatatttattggactactgaggatagataaaatgacttgaaagggggaaaatggagaggaaaaaatatatttattataagaaaatttgaggctgggtgtggtggctcacacctgtaatcccagcaccttgggaggtagagtcagaagaatcacttgaggccaggatttgagaccagccttggcaatatagtgagaccccgtttctacaaaaacaaaaacaacaaccaaaaaattgagtattacatttagtttatgcattcttagaagagtttacaaattcctgctgatgtcagtagtt

SEQ ID NO: 315624 - DNA, 4001 bp, Homo sapiens
cacggctccagtcttctcctgcacgttccaaaaagcaaacccctccttgctcccctccctacaaagcccagcagtccctgagggaagcaggagactgagggcagacaaaaagccaccttcggaaaagcaagcgagagctttctaggcattaatcgccgcacccccacgccgccaccagaacaaacgtgggatgcggtggtcttcgccaaaagggaagggaatcttagccgcgcctcagggcccggaatgcccctccagcttcacttccagaagggcagagctttccggaatggcggggggcaccaaaccatcgtgtttgggggagtttccactgggcaaccggtcacagtttcgcgaggaacgagtaacaagcggagcgagctcccagatgggaacgctgcgcggtcgccaagagctgctcctccccggcttggagtcccccagaggagttccatccggagcaggacaccggaaagtggggctgctagccggactgcggcagcgcatcacccctagagttggttttctcccgacaactccaactccgctctcccgcggagctgtgttcccaggaggctgccgcggccgctgctaggctgcgaagaacagaggcgggggaaggggcgggaggcggggagctgggccgggatttcccacagggattcgcgagcgctaccgagcgcccaggctccccgctgcgccgggcacggtgtctttggagcgcgctttcccagccaccaagccggaggcaccgccaagtctgagctggcagagagtgacgctgcccgacgactcccggccgccgagtatcctctccggggtggtggagaggctgggagactttaggtaggaccgaccactcaccccagcccactcctgttccaaggctcaagaggcgaaaagggtttccacctctccccgactgaccctggaaacctgcagtcccgcaggcgcccggaccaccagactggtccccaagggtacggccaatgaactccacccctctccttcggcggccacttgcgggataccacggcagagcttctccggcccccgcgcgcagtgcttgcacgccaagcagagtccactagcccgtggactgcgagctggagaaaaggaggtggcgcgcggctgctcagaagcgtatccgtgcctgggagcagacgggcgccagtactccaggagccggatggccagaggcacccctttctccccaacgcccagctctggctctgccccagagctaaggagcatgcaccgcaatgcagcgggctccgagctctccgagcgggggctgcgggagaccgaggctaccagggagtgccggggcgaggaagccgggggactcgcgagccagtttcgggcgctaagagccagccgggggcgctctggtgggtgccgcccaagccccgcgctcggcagcggccgaggctcccaaacctccttgccctcgggtcccgggatgcctgcaccgcaaagcagccagaggaaccccgcgaaccgcggagcacagcagtcccaaggcggccggcaccagcagccaacttgctccgtggagggtacgttaccttccatcgcagccactgcggatgccaggaggagcagtagtagataatccagggccatcgccggccgacggcccgcaggccgagaccaagccgaggcagcagcgccgggagagcgccgcgtcccagggcgccgctgcgctctccgcgggtggcttctcggtatcctttcgcgctctcgcccggaccggacttcccggagcgctgcgtgggcgtgggcaggagtgtgtgcgcgtggggcggtgcgggcgcgcgtgggtgtgggtgtgcatgtgtgtgtgtgtgtttatgggagaggtgggtgtgtgcgtgcgtgtgtgagagagagagggcgagggagaacgagcctgggagagcgcgcgagagcgagtgcgtcctggtgtcacattgctagctacagcggagcctacgggaggacggagccggccagactgacgcgggagggagcgggatcccccaccatcagctctctccccacccctaacacctcctgtccaatcaaggaatcaaacctgcaaaattcccccggccaatcaggcgcgagcacctccttacactggcattgttagtttaagaaaaacttttgcttgcaaggctgtgcgggagggctcggaaggcgctaggaggggtccgggctccccctcgtggtgctctcggagaaccgcagcggcccgcccaactcaccctgtccccccatagggtgcccagcgaaggagctggggaggcctcgtgcccttacatcccacccaggactggatccgctttaaatgatcaaacgagccttcgttcatcttctctgtgacaagagcaccctgcctaccctgtttagagcaactccaggggcgcacccgtgcctctcctccagagctcttcactctctagcatgggttggtatttactaatcgattttgtttatcgtggggtctctccctcattaaaatggggtcaccattttcggattcttgtctattttgttcactacagaatccacagttcacagaacagtgcctggcctgcgggaggcatagtacatgtccgtcgaaagaatgaatactgttcagataacctgtgggcacttgctccagggtccacagggaaccggatttgcttcctgtccaacgtttcgcagttctttttctgcagaagcctctggttgcctttggtgttcacttcccagtgcattgtgaacttccacagagggccctgaccccagaggacagctcagcgtggggagaccaggagtcacacagtcagctataaaacagcaaagcctgcaagagggctctcccaggccggtgcaaggcgaggtgcactgttgctgtgggccaggccttcagtgtgggtgggaaggacttaggcagcaactggggatgcagccttggagataggagcaattctcccaggctcagctctcacagctacactttatcttcctgtttctggagatggtcaagggttctaaatcagaaactcaccttgaggctgttatatgttatgctggagatgtgtccttccctcctctcccgccccccctacatacctgatgatagtctggtcctacagggtcagggatgacccgttaggttccccacccctcctcctacgcctctcaccttggaggcaccaatcctttcccctggtctgttaatgagctaacagtgggcagatgcgatatttccctttgggatgactctcctttctgggcttttctaaatcagttccccacaccccccacctctgcgtgtctagtctctcctttgctgggacttcttcctctccaccacagccagactcaagtcccccaatcctgacaattctttccttccctggctctgactcaggctgccttcctcctcccctcccctccctcctaccccacctctgtgcctgaagggaagatgtcatcaacctccaccttctcatcatccaccttaatgccatgttagctgccctctacgcctccacaccaccagctgtgtcgtgatgtccctggagccacctgatgtcaccctgggcaacaacctgctcctagttagctgtcatcctcctgcaccgtcagcacctgctgacattggtgtccagtagatcttttggggctctggccccagtttccatggtcctgcttctcctcctacccgtcttgccacttcttactgttccctctgttacctcttcagctttcaagagaggtatcccccaaactccatccttggagttcgtcctcctggggtacatgggcaactccttggcagcttcacttgcttttttacccccagccatcccctcatggatggacaggtggatggatggatgggtgagtttcacactcttccctccccctttcactatatcacagtcacttggtaggcatgtctggcaaagccccggctctgccatgtcctcctccttatgcccttgtcctatgcctgtgcatct

SEQ ID NO: 315625 - DNA, 4001 bp, Homo sapiens
acacagatctggcaactagaacaggctccctggctcacaccctcaaggcaatcaacaacaaagccccacactgggttctcacgcctgcgatcctatcacacacatgtgggtgagtgtgtgcgagtgtgggcgagacctcggtgtgtcagtctgaatttgcatgtgtccacccgtgggactcgatctgtcagcacagcaggctcagagatgaggagggtgggggatcataggaggtctttcctctggagaacattagaacgcaccagaggatgcctttctctctgaactgtgttcttttttccttccaacctttaagtttaccgactgtgaacataagaacaagccaagttccacagagttcgtgttttcgttcctaaactaagaaagtaactagatctgttaaagataccccaaataagtactgcctttattccaattgccctcgaatttctgtggcgtccctccctccactttagggaaggttctgaccctctctcatttaatggctccgaaattcttggaaacggggcgtgagtgtgtgtgggcctccctattgtttgtggctggtgttggggcctctgtccgcggcaagcttgtgtcaagtggcatgcgtgtgagctctcctgccagcgccaacaacgccgggctgttcatccaagtacaatcatttggaagttggagctgccccccacagcagtcttggcaggtttcacagaacctattgagaagcctggccttttcccaccagctactgaggaaggcgccgggctctgctgctacctggggcaaatcccgcaacttcaggggttcaaatggagacccaagccctgctctagcaggcggagagggagcctccacaaagggtgcgggggcccgcccatacagcacctcgggtgtaattggcgcccggtaaaccataaacaataacaggcccccgcctgtccgcccccgcagcggtcccctgacaaatcggggtgctcgcactcacactctcacagttaactccaacgggctcctcattagcgccccccaacccggggagtcccgcttcgcccccacccgccacagccccgcggccctcgccttgcctggggggtcgcccacacgtcctcgacttcggggggtgccgggagccccacttctctgccgtgagtgtgggggactcccgcgaaagctcacagcagggccaggactctgggggacgttcgtcccgagtctagctccccgcgaccccccaacccgcgggctgcctgcctccgagccagctccagcctccgaggcggctccaggggcggcctccccaccccatccctgggccccggagcgggcgccggtggcggggcctcctccgacgtgcgctcaatccgggtcggacccacgctgctagcccgcagccccgcgaccccaggcaccttgttcccgggcgcgccccccgacgccgctcaccttccagcgcccggcagccggcgggcagcagcagcagcggcagcagcagcagcggagggagcagcggcagaagccccggcggcggcgacggcggcggcggcgggcgggctctggccatggccgtggcagctctaggagccgagccgggccgcgccgggccgggccgcgccggcggggctgcaggcacccgagagagggtgcgctcggcgggctccggggcaggctcgcgtcgggtcccaggagatccaggagaggagggaatgcaatccaggcgggcggctccgggaccgaggcggtgcaccgagcccggcggtcctggggatgcggacaggtcggtcccgcgggaatctggacggaccggtccaggaggatccggggcgccggggagctgggtgcctgaggacttggggggcgggccggggcaggagggtgcaggtggtcgtgattcgggatgcacagtaatctggcggtcagctgcgggcccgactgggatccggggcttcgggggcgcgcgccgtccggggtccgagctgggatcttgctgcgccgctcacgtactcacttctgctgtccccagcgctggcgcggccgctctgggcgagaggggtgggacggcctgcctgcccgtcaacgctgaggccccgcccctagcggctggccacccactcacagaccgccaggcccgctggttcggcctcgagagcactcagctggagttcagttggcggtgtctccgccaggcccaccctcggggtctcaggggccggagtgggcggggctaaggaaaagatgaattagattgggcggagcgatgctgtccatcagagggagaaccccgcctcctggcgcccattggcgattagtaacctaaactgagtccgaggaggtgccaaccagctaagacggaccgggggcgcccccatgtggcccgcgtctgccctgcgacgccctcatgtggctgtagcttagtgctacttggggggacccccaccgcgatgtatcctgtgacaagggacttcatcgtttcttcattctttcactgggctgcgtatttagtcattcattcagcacatctttgtgagcgcccacaatgtgtcagactgtagtacctgcgggtgctaccgcaatggacaagacagaggcttgtgttactagcttagcagtggaggacgtgggattaagtcatcgctgtagagtgtaaggagctttattgcagaggaggaagagttcctcgagcgtacgtgagggcgacggccagtgtccggccctgaagaactggcattcaagctgaaataggaaggatgagtagtgagtggcggattgtgtgttccgggggagtgaggaggggagcaaatactctttgtgtgaagacctaggggcaaaagaaactgattcactggaggaatccgaaagaagttcagaatagcttgagtgtaagagggactgaaaggagttcttagaagtaggtgttgggggaagaaggaattttttttggactcatgataaggccttcctgagagctagggtttgaagtaggggcatgaccttggatgatcatggctgctctggggagcatgcatgggcagaggccatggtggcagcaggagaccagtgagggtgctgtgcagtgcgcaggcaagggaagatggtggcttgggctagcgtggtggccctgaggagggagagaagctggcaggtgtgaagtgtatgtaggaggtagagttcacaggaatttgtgattggttggtggagagatgtggtaggtgaggacgtcaaggagaacagtaggtttctggtttgggcaaatggacttctgccccatttattccacaaacatttacaaagtgcaatcaacactctgcaacagtaactcgaacttattgaaagttattttatacagcctcattttacagacaaaactgacatccagaaaggcttagtgactttctcaagtcacatagctaaaaagtggcagagatgggatttgaacccaggacttcatagcttttaaatacatttcatcagaaacctacagaggacctaggtactcgtttaaaactcagaattctaagccaccctttcctacctcaaatcttggaactcagaatctctggg[440 bp omitted]

SEQ ID NO: 315626 - DNA, 4001 bp, Homo sapiens
catttcagttgtggcaacccgaaacagggcttggagatgctcatctgttaatggctgactcaaagtgtgttggtttcgagtcaaatatgaaaaagccttttcacagatttggttactatcaaacaaggatgccaccttacaggcaacccctttgataattgggtaggattcagcagacaatccagcataaaactgccccaagtctttgattctgtattcattccaaagattagtgtttgcctgaagttttgttagctccaccctcactgaaataggtgcatattcaggtttaaagttaaatggatttgaaaaaagttctaagtcctttttaatgaacctgaggtccttaaaatgtctctcaaattctttttggagacgacagatcaccatttgatacctatcaggatcaaatattttttcatcttccttattttgctgttttagctcatcaacaacttctctgagggcaggaaagtctgttagatttttttcctcaatatgtctttgaaataaattcagcttaacttcgaaagtacaaatatggtcaaaggcagcagcagcaaagactttactaactcgtaattcttcactgagttctcgaaggtgttccataatgtccaccaagaagccaaagtcacaaagccattgtttgtctgagaagtggactgttgttgcccctactgaaaccaagaacgcttccatttcttttcttagagagaatattagttttaaagttttccctctcctaagccaattgttcagacatcgtccattaaccctttcaccatgctctgattcagattccgttagtaaagtctgaaattcaggtcgcctaacgcctctggtcttaatcaaaactatccattcggatatggtatttatgatctgattaacatctacatcataggagctcaacagttccaagtgaagaaatcctgaataatgaatgacattccaacagttggggcttacggccttttctctcatgtatgagacgagtcctgagttctcaccaatcatcctcaaagtatgggtcgtggtcagtccaaccattctctgcaagctaagccctgctgtctgcagggactctaggattgccgacatgagcgcaccaacactgaaatgatgagtcaggttgattatggtcagaagatcttcttgcacctccaactcagggcctacaccgcggataaagaccaggaggtagttctcataggccacaaaagcctggtcgtccaaggcaagagaataggctttaaagtccctggctcggttaaaaagctggttgcgtagattcctgtcaatgctcaggatcctctgccttgtgatatctggagataagtcaacgccttgcaggacgcttacatgctcgggcagtacctctctcagcaacacctccatgcactggtatacaaagtccccctcaccccagccgcgacccttcaaggccaagaggcggcagagcccgaggcctgcacgagcagctctctcttcaggagtgaaggaggccacgggcaagtcgccctgacgcagacgctccaccagggccgcgcgctcgccgtccgccacataccgctcgtagtattcgtgctcagcctcgtagtggcgcctgacgtcgcgttcgcgggtagctacgatgaggcggcgacagaccaggcacagggccccatcgccctccggaggctccaccaccaaataacgctgggtccactcgggccggaaaactagagcctcgtcgacttccatcttgcttcttttgggcgtcatccacattctgcgggaggccacaagagcagggccaacgttagaaaggccgcaaggggagaggaggagcctgagaagcgccaagcacctcctccgctctgcgccagatcacctcagcagaggcacacaagcccggttccggcatctctgctcctattggctggatatttcgtattccccgagctcctaaaaacgaaccaataggaagagcggacagcgatctctaacgcgcaagcgcatatccttctaggtagcgggcagtagccgcttcagggagggacgaagagacccagcaacccacagagttgagaaatttgactggcattcaagctgtccaatcaatagctgccgctgaagggtggggctggatggcgtaagctacagctgaaggaagaacgtgagcacgaggcactgaggtgattggctgaaggcacttccgttgagcatctagacgtttccttggctcttctggcgccaaaatgtcgttcgtggcaggggttattcggcggctggacgagacagtggtgaaccgcatcgcggcgggggaagttatccagcggccagctaatgctatcaaagagatgattgagaactggtacggagggagtcgagccgggctcacttaagggctacgacttaacgggccgcgtcactcaatggcgcggacacgcctctttgcccgggcagaggcatgtacagcgcatgcccacaacggcggaggccgccgggttccctgacgtgccagtcaggccttctccttttccgcagaccgtgtgtttctttaccgctctcccccgagaccttttaagggttgtttggagtgtaagtggaggaatatacgtagtgttgtcttaatggtaccgttaactaagtaaggaagccacttaatttaaaattatgtatgcagaacatgcgaagttaaaagatgtataaaagcttaagatggggagaaaaaccttttttcagagggtactgtgttactgttttcttgcttttcattcattccagaaatcatctgttcacatccaaaggcacaattcattttgagtttctttcaaaacaaatcgtttgtagttttaggacaggctgatgcactttgggcttgacttctgattaccctattgttaaattagtgacccctcttagtgttttcctgtcctttatttcggaggacgcacttcgaagataccagattttatgggtcatccttggattttgaagcttataactgtgacaaaaaatgtgaagggaagagatttgaaacatgtggaaggaaaagtgagtgcagactataaacttccaaaaagacaagcccaaaatacacctaaacgttatgtcagattattttgttaaaatcagttgttagtgacgtccgtacgttaatagaaaaaagaatgcttcagtttggagtggtaggtttctagagggatttattgtgaaagtataaactattcagggcaatgggactgagagaacagtgggtagaaaggaccactgaaggaaaggaagagaattggaaggtagatgaaagaaggagcaagaacctggggatgttttttccttttcacttgtaatagtagtaacagaagcaatggcagactggcttttgtttctactgtgttagaatgaattgacaggacaactgggcctattattgtactgtgccagaatactgtaaaacaaaactaaacatactagcttggtggcttgtaattaattacttaagtggagatttttattttttttttattttttttttagacggagtctcactttgtcacccaggctggagtgcagtggcgcgatctcagctgactgcaacctcctcctcacaggttcaagggagattctcctgcctcagcctcccgagtagctaggactataggcatgtgccaccacacctggctaattttgtatttttagtagagatgggatttctccatgttggtcaggctggtgtcaaaactctcgatctcaggtgaaccgcctgcctcagccttccaaagtgctgggattacaggcgtgagccaccgcgccctgcagttttttgtatttttaatagagacagggtttcaccatgttagccaggatggtctcgatttcctgacctcaggtgatctgcccgctttggcctcccaaagtgctgggattacaagcatgagccaccgcgcccggctcaagtggagatttttatatggagtccagttatactctttttaatatataagttgagatga

SEQ ID NO: 315627 - DNA, 4001 bp, Homo sapiens
aagggtgttgaaaaatcaggctttcactagtagtgagttgagatggatctggtccttcacccatgattcatccacccgtgaaagtcttgctggtgaaaaccatgacaccatcaccttccacacccctccctgccaaaactgtaaaagtattttattaaagcacagaagcaaacagacaagatggcttacatgagaaaaaggcaaactctactactccccggaaagaaaatggcttgaccccaccaccaccgaactgacattctgcaaaagagaacaaggcagccctcacttccagaagttgagttaactgtcagaactaaaagaatcccttctattcatgtgactccccataaagaacgtttgccggctccaaaaataccttataaatccatccagtagagccaagccccaagtactgtatactgagaaacaatgtgactttacaaggacaagagtgaccataggagacaaagtgccacacccttttcccggatagctcaacggtacatgttgtctcttataaagactgcaattctggagaaataggtgggcaattctaacaccccctcccccaattccttctttacacagattcattttcatttttaagccagtggcctcggcatccgcaactactacaactaataatcaggggggtggtgggtaagggatggggaggacaaggaaacacaggtcaaatatacttgcttctaaaagtccattttcaaagagttttcttcccgcttgtctgcctctcacagctgtatccccataccaggtggaaaccaatggttaagtaaaatcactgatttaaagagccaaccaggaaactaaccatgacaagtgggagctgccctcctctcccgagcattgattggttctttgggttccaccggtccccattctacccacgtaagtggcaggtgtggctgtcaatcacagagggaaccgacaattcaccgctcggggagtaaattgcctttcatacagcaaaggcaggtagccgcctaaaatcgatccactcctaaaagagcggaccctccctctctggcaaggagaacagagacccttaagtacaaaataaataaggcagggccgaacggagagtttacgagcgctattttattaccccgaaccaaagcagctcttaatcttcactgtcctaagacgatctttcaaaggctcgtacggtattttttttaattaggtacaccttcgtaagtatccctttttttgtataattaggagatggggaggaggagagaagggatgccgttcagttcaatttcacatcgtattccttttcatacaccatcccctagccctccccgataaatcggcttcattttccctgacacgggttttttaaaaaaaaatatgctcccctctgaacccacccaggcggccagccaccccacccccgggcgggggctccacctttctccactttgttctgcttaggattgctcaagacccccgaccccgcgaacaccccacccctcgaggcaagaggggacgccaggcagaagagggggatctgagagaagaaaggcgatggcagtgagggtggctgccggagagggactgcgggaggtggcccgggcagccggggctagcgagcggcgcccgcgcgctggaggaaaccgtgcacttgttccaatccgggggtttatacatcagggcaaagcctcccttaggccgccccatccctccccccgcccaagaaagccccgtaggaggcggatggttcacccttaggctccccacgataacgcattgcagctccccacgagcgagggggacccggcacgaggaatgcccgggcacgggcgccccgagggagccgggcaccaggcggccccggccccggcgtcggcgtctcacctttccgatgctcgccccggggccgtcccacatggatttttacaacctctcgtcgccttggccccgggcggccaggaggagcaggagccggcgccggagccggagaccgagcgagcaggagcgggaggcggaggaagaggaggagaagcggggcggggaacagggagggaggaaagaagggaaggaggaggacactgctcggagggccagggccaggcgcggggccgggcggggccggcggccgagggggcggcacccgccgcagtcccgagacgcgcgctcgcgcggcgctgccaggcgctgcgctcggcggggcccccacccggccggccggcacgctcgcccgctcgcagaggccctgactcacattcccagcattcccgaggagccgctaggggggacggggctggggcccgggcgcctccgctgggggcagcagaaagcgcccggcatgggcgggggtcttcgcagcgcctcctcccggcaggccgcggcgcgaagcacctgtccccaatcttccatccccgacgccccttcccgggtacccccctccaaaagctgccaggcacactgggaacttgtcaggtggctttggtgacaggggcagggatggcacttatcttttaagttaagcattggagtaaggggtcgtggttaccataccctggcaccgtccatcagctttaatgttccttaggaggttgaaagaatttcataagatcttcactttattgttcccccaaagaaaggacagaatgaaagataaagacaggaacaagagaaaagatcgcatccgtcatattcactgggtgcctcttctgtgccctgaaatgtgcttgcattgtcccaatttaaggtagaaagatgatgtctgagttgatacgcgcgcacacaggcagatacacacacacacctcaaggtaatgagcaagaggatttggacaagtttttcattggaaaaagcttccactcaacaagtctggagccccagctgctgccattttatattagggagggtactgggatagccatgggcatctttaaacttggtctctttcactgagtagtcaatttgcagggatagagcagtcatttccttcctgtcctgatgagtctgcttccagcaatttcagtggccagatctaaatttctcctgctgggaagctcagacaaataaagcaaatccagccatgggatgtttgggtgcgcagaggcatagaattagtacagcgattagaggatggatccttctttcctccccgataggaattcaatttttttttttttttttttggagacagagtcttgctctttctcccaggctggagtgcagtggtgccatctcagctcactgcaacctctgcctcctgggttcaagcaattccctgcttcagccacctgagcagctgggattacaggagtccatcaccacgcccagctaatttttgtatttttagtacagacgggatttcaccatcttggccaggctggtcttgaactcctgacctcaaatgatccgctgacctcaagcttctcaaagtgctggcgttacaggcgtgagccaccgcgccccgccggaattcaaatattaaatgattcctgctcagggaatcagactctgagagacaaggatgccttcctgttccagcccaaatgcctgttccttaagcctgtacacctctggtagctaaggtttttcatagactctctttgccctcatcctcttctttctctctctgagaaatcaacactcattctcctgacctagatgctccaggggcaaaaccaagctccacctattgtgttttgttccccacatacatccttgacagcctctgctcaaaaggcttgttgtatatgagagccttgttgagagtcctttgagaattcctaaaatcccacatcttttgaaacgtggccaacattttttagtacccccctctgtgcaggcacttacattttctcaactattctcacaaatattctataagatgtttaccaactttcagaaaagttgggtaacataccagggtgatcccatgaagaatttatttaaatcaatgcctgaggttcactctggttggccacccattctcttttcctttgatccgtgggttt

SEQ ID NO: 315628 - DNA, 4001 bp, Homo sapiens
ctttatctctttcaaagtgtctaccagtgtatatttaaaaaaaactttttaaaataagtaagtcacaaatgccctggattattttactctacttcctaacatgtttatccaaaaggtaaacattattgggttcaaaaaatgtgaaatttgaaaacattttcttacctatctatactcatttcagacatgtctttcctaaatgtctgaaatattttagggaaacctgttgaatgaaacatttaaaaatcagctattccctctaaatcaaaaggtcaattctaccccccccaggaacacatggcaatgtctggagacttttttttttttttttttttttttgagacggagtctcgctctgtcgcctaggctggagtgcaatggcgcgatcttggctcactgcaagctccacctcccgggttcacgctattctcctgcctcagcctcccaagtagctgggactacaggcgcacgccgccacgcccggctaattttttgtatttttagtagagacggggtttcaccatgttagccagaatggtctcgatctcccgacctcgtgatctgcccgcctaggcctcccaaagtgctgggatcacaggcgtgagccaccgcgcccggcctggagacatttttgatcatcgcaaggatgtgtgcttctagcacagccacgggtagaggacagggatgctgccaaatatcctgtaattcacaggacagtccccaatcctccccaacaaagaattatccagaccaaaatgtcaacactagagcttgagaagcctactctagaagacttctctgcttcttttttcaaggaagtgactggagtggcttcagcacaggatgttaaacacaaaagagagttgttttttttttttgcaggactgtttcagtagtacagcacccttaaggcacttctctggaaataatatgagtgtgtgtgtgtgtgtgtgtgtgtgtctgtgagagagagagagagggagagagaaagagagggggaggggagagggaggggaggaagagggaggggagggggaacagagagagagagagagagagatgtcacggtgtgaatgcacgcaaaaatgttataaaaatgagcactcccagcagcctgggcaacatagtgagacgccagattagctgggtgtggtggcgtgtgcctgtagttccagttactcgagaggctgcggtgggaggcttgagcccaggaggtcgaggctgcagccactgcactccagcctgggcgacagagcgagactcttgtctaaaaaaaaaaaagcacttcatacagccatgcccaagttcaacttttatggtgtttcgcctatatcctaaatcgtgcctcatcacaacagctcagccaagggttcagtgtctctgacaagggcgtgagagagattaggtgtgtggaatggtgcatgcatttagaaatcaggcacgacgcgcaggtcgacgaaggcaccacccaggagtgggtggaccaggtgccccctggagacgagaaaccctcgaggaaggggtgggtcgggggcggtacttttatgcgaggaggtgctggagggtgggcttgcgctcggcgtttcagtgctggtcgcgctctggctgggcacgaacgtagaggtcaggctagggctgacgatgctggctaagcgggggcgcacgtctgggaagtcgtcgtcgtagtcaccgatgtccgtgaccttccagaggtactcttcgctgaacgtctcaggggcctccaactcctgctcttcccccaccaactcctcctccaccacctcctcctcctcctcctccacctcttcctcctcctcctccacctcttcctcctcctcctccacctcttcctcctcctcctcctcctctaactcctcctctgactccttctggtccttcttccccgggtctccgaagccgctaggcgagcgcaagtgggccatggctggcgggaggcgggattacagccagctctttggccgcggccccggtcggctctcgcgagcgcgagcctctgttgtgcgttggtctccccgggcaactgcttgccctgcgccaccgagcctcccggatttaaagcggcaggagctggttagccggatagaatgtgggtgccgagggccggtgggggccaccgcagacttctttctgtccctgctcttcagcgtctctgaaacccctggcagcctgcggagaaacgatcttttcttcgtctctcagcttatttggggcctttttttttttttttaacttgggtggaggaagtggcttctagcgacggacacacacggtgccatttggtattgcggatgctggagtctggttattgagtagacagatgcttgctggaacgtccagtgaaactttatttacaaaatcaggcgccagcccttgggccctcgtttgcggatatttttaaaatagctttaaatattaataagcgtattaaaattgccttaaatgttagttatcttaaatattgttagattaatattaattaatcttgattggcgacatttttagcgtcccataaattttgctccttgctgtgatctgggtcctgcttcttacttggcccatctatccatcctggagtagaaaagtcctgaagcatctggccacctaggtaccacctgcgtccttctgggactttgtatttacttacatttttgtaaaatatatacattttttatttttgagagacaggatgtcactctgtcacccaggctggagtgcagtggcggcatcatggttcacttcagccctgaactcttgggctccagtgatcctcccacctcggtctcccaagtggcaaggacaacaaatgtgtgtcaccacgcctggccaattttatatattatattatattatattatattatattatattatattatattatattatatttattttgagacggagtctcgctctgtcacccaggctggagtgcagtggcaccatatcggctccctgcaacctcagcctcctgggttcaagcaattctcctgcctcagcctcccgagtagctgggactacaggcacgtgccaccacgcctggctaattttttgcattttcagtagagatggggtttcaccgtgttagccaggatggtctcgatctcctgacctcgtgatctgcctgcctcagcctcccaaagtgctgggattacaggcgtgagccacagtgcctggcctgtattatatttattttgagacagggtcttaccctgtcgctcaggctggagtgcagtggtgctatctcagctcaccgcaacctcctcctcccggctcaagctgatcctcccgcctcagcctcccgagtatctgggactactttttgtagagatggcgtcttgctatgttgcccaggctggtctcaaactctcggtctcaagctcctgggctcaagagatcctcccatctgggcctcccaaagttcttaggattacagacgtgagctactgtgcctggctagggaatatttttgaaagtagagttcttgcaggctaaaggagcaggcagcacagatgagaggagacatctgagttgctttaaaaggaagggcaaaatgtggtgaccagagaggaaagtgaaaagctttccagcaggctcacggcaggaaaggagggtcaggacagggaactatgtgtacagatattgaggtacaaataaggtaagtgtaatttaaaaagagaaaataagaaaaagctcatttcttttctggacaatactaacagtttgatgctggaagctatcttagaagttaggaaattcaaccagggtcctcagagagcagactggaagtcaggatgtggggatgagacacggggctggcagacagcaagggtgacagtgcttgtgcttactccgcttgtgcctgctgtagctcagttctgtgactgccctggcattttctcaattgtgtggtgaattaatttgtttaagtactccttgtttagaccctctatttaagaccttttttgaacattttatggaatc

SEQ ID NO: 315629 - DNA, 4001 bp, Homo sapiens
gcccctcatcccccaaatatgtaagctatttgcaaagctttaccatcaaatcgtacattaaatattaagtgttatgaagtgtatgcccactttgaagtgctaattctcagttcttcagaatgtgattctatttgcaggtagggtttttaaagtggtaattaagttaaaatgagttcattagggtgagccttaatccaatatgactgatgtccttctaagaagagattaggacacagaaggaagacggtgtgaagacggtaggaagacagccagctgcaagccagcagaggccgcaggagaaaccaaccctgccaacaccttgatcttggacttcggggctctagaaaggaaaggaaaaaagtgtctgctgcttaagccacgcagcctgttgtactcagttatggctgactgatacagtaagacttcatttctcttataagataaactaaatgggccttatatttttttctcacacctcactttacagactactgtcaggaggaacctatggccctgctggactttataggccacaggctagagacagtgaggggtctggcgacctcccccgtgggcctgagagtaactggaagaaatctgaaaacgaagagccccagcaccggagagacagtaagggtttgccgcagaccaaccattggacggaacacccctcttgccggtgtttcccaagctcacctaatcataagaatcacccaggatacctctgtgccaccctgggagttatgcaatggggcccagaacttgggttttgttaggtaagccaggaccagaagcgtttgaggaatcgtagtgccgcccatgccgccccaggagatgggtttgtcggggcagtgtgcgtgtgccggcatccctatccggcggagggagggagggaaggaggcccggggcccggcgccgtcggtctcccagccgtacccgccactccacctccagccccgcggagccctccccctaccgcagtccaggcctcggccgaaagcaactgggcccgccgtttctgtcactgcggtatttgcccatctacgttttgcgtccggcgttcgttctctgaatcaacaggcgggtggaagaaatgccttctgattccaacccgagtaagtctgcgaagtcccagacgcccttgtttttctcccgggtgtggtctgcccgtgactcttctctcgagctctggggccttaaatgaaacccaagttccccactcccaccgcagtcggaccagaggtggacgtgagggtgctgcgcgccgcgggaggggcggtcaccgtccccagggtctgcgccccgggagcggtggggaacggggtgtgcaggtcgccgggctcccgccctgcctcgggtttgcgcgcaccagctccccgctgaccgcaagttcctccgaacctcgaaaggcatctccccacctcccactcccacccggcttggctcacccaggctggcaggtgctggccccgcagctcgcggctgatgaactcgcgttcattgtcaaggaattcgaaggcggcggccaggcgcccaagcttcccgcggcggttcctgcgccaccacatccacagcagggcgccgagcagcaaccaggttatgctgagccccaggtagccagctaggtagacaggccccaggtagaacagcacgcgcaccacgaaggtacagagctcgggcagcagctggctggacaggcgcagctcggggcccggcgtgcgctgggctcccagggcgctgggggccccgggggcgcagggctcctctgctcgcatctcgtcgccgcagtcttgcccttcccgagagcttcacccgagcttaggtccgcatgcccccacgcccatgcgcatctgtctcccaagctcgaggaccaggacgccgcgcccccttgccctgctgggactctcggcgcgccgagctcagggttctctgcgacggagagcagcgcctggaaatgcaccgcgccgcgccgcgccgccccagttctcggctccagtgagtccgcagctccggaagtctccgccctagaggggcgggccgcccgcctggctcctgcccgctctaaagagcaaccagccggtgagctcggcctccgaccccagcacgtggcgcaggcgtcagccggaggtgtgcactcgccagtccgggtggaccaagtgctgccctaggtggttaatgactcaccaacacctgtgtacaactggcttatcatggataaacatcacctaaaacctgtttcctacacgcggtctataatacacagtatagtctggactcagctggcattcgaggccctccctggacaggctcagccaggcctccccagcctcaggtcctgcgtcccggccctccaactggcccctagagcctgcaacgctgccagctcctctggcatctgtaaagcttggacctagcccccagcctcaccaagccgagctcagggcccctcctgcgcgccacaaaaccctctgcccctctctccccatcctctcttctaggtgtctgtttggatcgtcattccctgcatcatcagacggggaacttccggggaccggcccgtcttggccatctgtggggcgcccaacaagggcaagcgaccggcgaataaaaggaaagatgaagaggaagccccgaggtgcctgagagtcaatggtgaagcccatggtttctaaccctttaatgatcagagcaggtggagctccgaatctcttaagttcggatagtaaatcgtcttgcggatagcatatatttcagacggccacatgaaagggctcacatcaattactggaatgtgattttggagttgacaaatgtaccagagtgatttggaatgactctactgtttcaacagctttatcgaaaggctggagccgatggatagcaatcaaaatattctctttccttttctctctctccctccctcccccctccccaccccgccccggtctcccgttctcgttctgactcttgctctgtcactctctttttctctctctggctttatcctctctcttggataaaattacttactgcaatgagttttttcaacaatacgtgagttcctggtggtcagaatacctggacccttctctattgttcttggctttccaggactcagccaaaacagaggcttaaagtcccccaacttaacattctcccagtgtagcctgggaaatcaacggaagaaatgctgctcgctggagttccttcttgagagttgcatgtacacagtcctagtaaaggctctgagaagtccttcagacaaaaagttattaaattctatttaacccagtgtttcccagattatttgaccacagaattctttcctcaaaatatttctctattggttaacccaggtctgctgaagcaaaagagagtgtaggctagggatactgggaattctcctggaagctgaggcagaatgtgtctggctctcaggatggatggaccaggaaactaactgccagaactgcgctcctcatccttgtggccctccctgctgacctgcctgtctggttgaagtgcagaacacagcactttccccccaacatccagagatggaggacacaggtctcaccaatccagagagactgccttgacccttatcctgtcccaattccaaaccccttggagacaggatcctgctgaatctgtcatccccttcatccttcacacacagcaagtccacacctcaacctgggctagtttgggagggggtgtggaaggtagtgagtttgtggggggattactagagaaaggaaggttgttggtttgtgaactggatggacacccactgagacagatgcccagcctgagacgacctgtgggacattgccatccccagctgcatcgcctttctttccttgaacacatcaagctcatttatgctgcaaggcttttgtacttgctgttctctctacctggaatgttcctcttctaaaacttctccaaagtacgttagggtgatgggattatgatttcacccccctcctttttaaagt

SEQ ID NO: 315630 - DNA, 4001 bp, Homo sapiens
ccttcacagccagcatcctccgcagcactttggcccaaggaatcagatattttcaaagtcaaaggaaagagaggagcaaaatagcacacagttcataacttcctagaaaaacactcgcgccagcctgcctgcgtgccccgtccaaacaccacaagaaatgttcagaataacgcctctctcaaatgccaccaaaccgtatacaaaatctgagaaacctcagcagtgagttgaggggcatgaaagagagagtgctctgtcgcttaggaaaatctgtcagattaaatcatggcctaagacattttgtgaatgtgttaggaggaaggggacaaccagtagaagacgggagggggagatatttttcagtctcatgatgaaatacttcacccggaagagcaaaaaaaattctaaaaaattaaaagaaataaactgccataaacgaacggaaaagaggcattccagggttagaaaaattgtattccaagtataatttttttaaaagcctgaaggaaaggctcgagttcatccaggagtttaaaccacttcctttgcccccccaccacccgcgccccgggcgcccccaggaaaactttagcacagcgcagcggcgcgatccaggcccctcccctgtggcgcgcagcgggcccggttttatgaatgggagagcgagccgcggccgccacatcaggtagaggctgtaactggatctctagcgctgggccccattcacaaaacaagacacacttccacccaattctcagccttccccattcatgaaaactccttcagctgcgcccccgcccccatttccaacgcacgcccagcctccgacgcaggcccctcaccccagcgttttaggaagaaagctcaatgcttcattcacaaaaagggaagaaaaaaaaaaaagccgcagggagcagcgagccaacgaaagaaacccgcttcattcataaagtcacccacattcataaaaacgaggtgcggcgcccggcgctaccaaccgcttccaatccccccacccccaacatctctccctggcaccccctcgtcgaccaggagttcggttcccccccgagttttctccaccctctgaaaatgcggccggaaccctaatccgctgcgaggctgcagcatctttcggtgctgtcccctccacacccgtgttatccccaccatccccaggccgctgttccggtgcgccccgattttctcgagtcgccgcacagccggacgccctcagcctgctgggtgggagcagggcgactggatgtccactttccaccacctgaaacttgcaaggcctgcgtaagttcctggtcgacccccgcccccgcaggctgcacttgcctgtgtcatttaccccctcccggtgctctggggggcagcgcctctcagacattcccctcaaactgcttcccgccccctcctcccaactgcggagctccgccaagcgtctcttctcgcgagcctccaagtcccctcggggctctcgaatctccagagactgtgaaagcctcgcaactccgcgatcccccatccactcgggagcccccgcactcgcgctccggggcgcctcccccacgacgtgtggaaagccgctctccccgcgctccggaaccgttagccgcacccgcccgacgcctcccaggaaccaaaccggaccgggccgcggggggagggggcggtcaacccggggggggtcaccccagctactgcaccccgactttgaagattctgaatcagcccgtgaactctagccggctgggcctgtcggaccagtggccggacgccccttccgatctcccccctgcccccgcaaagccccctcacctgaggcggcctctctcctccccttgcagcggccccggcggcgcaggcgcgctcacgcacgcgcgcagcgggcctgggcgcctgggcgaaaggctgggccgaaccgctccgaagacggtgaaccgctccgcgcaccagcggctggactctgcgccgcagctgccaaccaggctggagcgctggcccggccccccgcggctcgctgctccgcccgccgccattggcccgcggccctagcccagccttgttcccattggccagaggccgttcccgcggctgtccatcacctcttgtttaccctgtctgcgggcaaatccaaccaagccgccccatcaactccggcccccattggccagcggtgcatctctctccaccccctcaggggtctgttttacataatttatgcaccgggggccattggccaatcagcacaggcttgtttatataatgaatgtaaggacgtttttcattcataaaaaacgcgacctgagggggaagcttagctgagtcagtgaagcacttaaaggggccgaggccaggaggagccgccgttacttcccttctcgccgctctcccgacttttcaccgaggcacgactcttcccccttacccactcacccccacttctccatccagcaaagccccgaccagaattgggtctcttggcgccagacgttcgcagctgcagcaccaagcaaagttatcattttagaattcaggggagaggaattcgtcattccacacaaactcgctgaccgacctgggcgtttagcccacagaaacacagaaaacggaaaccgagccctctaatcttagttacctttaagagaggccttaatttcttttaaccaggtttccagtgggaagaataagcagcatctccttttaaaatctcagctctcaaacagatttttgttactattttgtactggcaaggcctaagacccaaccaaatcccgttttctctttaactgcggctcgtaacctccgccagagtgggttctgtagtcgaggtgagacagggttcgggctcaaagaaatcctctccggggacagcagcagccagtccaccgacctggaaacctaaatccctccgaaacgggcatgcagactcagactttttgcctccctccccgggctgcttgttttccatttaagtattgaatgcaagatggtgtatttgcgaattagatcccgtgcagctgggaacgacgagaagcggctctgcttgccaaacgatagggcactaactgcaattgctgagattcttaacagggtgttccaggaaacaaataaacaaacaatcctctcccctctccgcccccttaccccctcctgtgaaggccgtggggcggctctatcttctctccggggatgctgggggcctgtgacggagctctgttctcgtcctgctggagtgccctgccattcacgccgcgtgccagcggtggggaggaaagatgctaagtgacaggagagagcccctagcaatgggggtcccacggtggccaactctggggcagttcctgcccctgccacccccacacttaagtcaaaggttctttcctatctccacttgtgtctcttaaacagagcggacacttggtctgtcgtttatagcccttgaaatgttggcgtgcccctaagcaacctgcagcacccgtgttgagtcctgggctcagcactgaccaggcacgctggagctgttgactttggaagactgaaatgggcatgagttgatggatggaaagtactctgaacatgtaacaagcagttccttgagatctagtttcctggtagaacattttgcttccgactccagttttcccttagtgccctttttctttctccaggtggtaccgtttctgtttggtggctggagatcttacactagtacagttgtgctctgagcttattgctgacattcctgagagctctatctccctagctagatgaagggcccaggtaagctcccagatcctcctcctccccaattttgtctacccccactcccgctcctccccatcccatcccatgacatcctgctctctaaactcatttttccaaaggagctttcttactcctcttcccttaagtctctcaggccccagccctccggaaggcttacagcccacagagccacatatcctcaccatctaaaccgtaacacatca

SEQ ID NO: 315631 - DNA, 4001 bp, Homo sapiens
actttttactgttccttaattatactacactaacttgcaatcacctcctttggaaaaattattgtaattatacatctaaaattatttgtttgatgggtcaacccactctcccaactcaaagtgtcactggggtagagatcctctactctggtcacacataggtccccaagggttaccacagtgccagacacatagcaggcacataaatatttgttaaggtaaaactgaatggtgctcattgctgtaatatttatgacagagcctcccaactagtgtgtcaagatatgggtattttcagccctgagacagctggaaagggtctggctttctggctgccaggcagggttgatttaaccagtaagttatataaatataattttctacatgtgctatgatatgaaaaaggttgagaatattaataatcatccctgttttaaatttggagacatctttcataaatactgttacttcagtttttttatccaaccacctacccattatcttgcttttggaaatatgttcaagaacccatctaggcacccgctttgcctgatcataagacaaagcgtgattagtgtaacaccttgcctctgttccagttaaagggaatccaaattgttccaagacagccttttctgcagatcctaaaaatgaaaaaaaaaaaaaaagggggggcagagacaaaaaaaacacacacacacaattagtggctcttaataatgaaagattataaggaaaaggagagcggtgtgatttacaaaggactggctcagaagtctaatcaaccagaaaatctcatttttgcaattacttatgagatgaagaaaacagacagtaggcaaagtactgatttgcctataatcagtgaataaaatgcagctactgcattaacttttgaataaagacttgatcttattagtctttcacatcaaatttccaaatcatctctgaagcactgatatgtgtgctgttgcaagatgacagtaaaactggtactgtttttcctagtgggagaaaccaagcacacattcagcagtgagtcagtttcgagataatcctccccgatgccttctcaaatcctcaaccccccaagggggtagttctcttgctagatgccaagtatccaaaggagcaagttaaattagcacatccgcaaagtacaagaaatgagctcgtgttaattttttttttttttttgtcaaatataaggtacccattgcaacatgagtttttatacactttggagggatagcaggtattcttcaactgaacaatgacgaaagaagggcagttaactcatctactaaaattatgtattaatttattccttcattcatacttactgaatgccaattatgtaccaggtactgtgctggttagatgatggagaccaaaacagacatagtctcaagtcttatggagctaacaatcttagtagagaacacagacattaaaacatagatatcgcgatgagtaactggggggaagaaagtcgggcggcgggggtggttctgtgcagaaaacgaagatgcccgggggaaggaaggacatgagggaagctggcgagacgcgaggtggggaagggaggccgagccgggagaataaaggtcagaaaccaagggccaggctaggggcccagcaaacggtgaaggctgtccgtcaaggactgccattcacactccaggtaggagtcggagcccgaaatctgggccagcgaagggaggacgggcccacagacttaccatccggctgcttccctgtcaacgctccctcagcgccctgactccggaagaactgcagggccgcgagcccagctcccgcagcgcccactacagccccagccacgaagccgctcagaaaacgacgggaaccccggaggcgggaagcgatactcttgatagccatcttgcccgaggtaccggccttttaccacggcgcatgcgcgcgcatgccggcccccgccatccccccgtcaccccacgcctcaccgcccgccaagctgagggcctcgcacgccccctggtgacaaaccgggatgcctagcgcatccccgcttcatccctggtccactggacggggcgatggatggggaatatgatgtctagagggcttagtggtatgctatatatagtcatgagaagaaaatacctttagtctcatttaataggtgagtaaacacttgcgcatggttacactaaggtctccagagccgatattccaactcaggtctatttatttatttagcgacagggtctctgttacccaggctgcagtacagtggaatgatcatagcttactgcgatctcgaactcgtgggctcaagcgatcctcctgcctcagcctcctgagtagctgggactacaggcacgtgccacattgcccggctaaatttttggcgggagtgggggagcggtaaagaagggggtctccttatgttgcccaggctggtatccaacttctggcctcaagcaatcttcccgcctcggcctcccaaagtgctgtaagtccaggtgtgtgtcactgtccccaaccttctcttttaaattggaataataatacttagaccatagcgttcttgtgaggattaaaggagatgacacatgtaaaatgtttagggaagtaccaggggcatgtcactaagtgctctataaatgttagaaatgtttgagtcatctctactctttgtcttgatagaatataaaatccagattgctgaacgcctgctggcaaagaaaggatagatttcatggactaccactcacaaacaaatgagtcttcattttgcagcatgatctctagcattccgtgtggacttagttcttagcagaaacttcaagtttcctatttcttagataactggtaggaataactttcatctgatcccactgatgattcactgaccaggaggccacttctaacaacctactgaagtgtgcacattattttgacagcctcaaatgggaggctacccccttgccaggaatacctcttctgaaggaccctgactggttaagctacatcaaccagagtccttcctagggattttcgatctagtagtctctctgggtagcaaagctgtgacgtaaaactcacaggcgcagtggctcatgcctgcaatcccagcacttcgggaggccaagactggaggatcacctgaggtcaggaatttgagaccagcctggccaacatggtgaaaccccgtctctactaacaatacaaaaatcaaccaggtgtggtggcgcgtgcctgtaatcccagctactcgaaaggctgaggcagaattgcttgaacccaggagacggaggttgcagtgagctgagatcgtgccactgcactccaatctgggcaatagagcaagactctgtctaaaaaaaaaaaaaaaagctctggcactgtctacagccttgtttcctgctaagaagtcaaaggagcagatgcatctggtcttgctctgagcaataatggaagaaataccaggacacaggtggaggcctgcaatgttatgaccccaactcccacaggctcctgaagcccacatacatcctgcctttctgaagtcttggctagtcatttcccccagaatcctttcagtgaaacccccttttttgtctaatggcttctgtcacctgcaaccaagaatcctaacaaatacaaccagacaacactggtatctgtaggcttcaaggctacttcagcagctttccccagaatttactaaatacacaatcactgaggtactgtatttcttaaggcccttgtaagtgccagacactgtgctaaatactagagagataaatattagatggcttttcctaatccagatcctctacttctgaacaagtgtaaccccacttttggtcccaagaggtcaagaactggaagggttgcctgcctcagggtaggaaaactccctctgggcctgtttgcccacctgtaaaattggaattgggccagtgatttgtaaactttaatcaaggttcctaggtgttccatagggatac

SEQ ID NO: 315632 - DNA, 4001 bp, Homo sapiens
taggctcaagcaatcctcccatctcagcctttcaaagtgctgggattacaggcgtgagccacaatgcccggcccctggtatactttaacttcaacctccactaactataccacttccttggcatagatcttacattacctttgtttttattttattcacttttactctctgtttgtctccctcctatctttcatttatttcacaaccatgttttggcatccctgctgtttcccacataacatgccaggagctagatatatgttggtaaataaaattaactaatgaccatggtgggactctgctgctggatagctaatgaactgccgtgggaattaagggtgctggggagaaagctctaaccttgaggttacagatatatccatgcctcagtgccactttcagggatgaaatgttgagagaaaataggacacatgacagagtcactacatcatggtaagctccggtaacaaagaagaccaaaggtttttaaatttagaggaaaacggttatccgtaatgtgtccctaaaaaaatactttgaggataaaaatcacctgaacaaagtgtatacaaaaatatagcagggaaagacatatctaactgcttttgggcatttttatgccccctcacacacaaataacatacatgttaccctgtaatacacacatatgtcccactgttgttaatcctgaattataactaaaatatgcaactgtgagttctgactttattatccaggcataatatgctaaatattggcatttcttcatatataaagggcccagaagataacggcaggtcacgatttttaaatggacatgtccttaactcacgttgtgggacttcaatgatagctggccgcttcaatccgatggctacatcacgggaccactgactttgcagttggtactgacagaggaaaggcatgaggaaaagaggtaggagctgtcgccagaactctgccaaggatgggatgaagaactctgataggaggaccacaccgtaggttaacaagtggagacacagccggaggaggatacagggtagctcgttaccaggtccaacatttttcaaccctcgttctggagtggtcataaccagggatttaatatagaacacagaggacattaggttatagctgcctagggatcttagttcttcattggcaaaatggaaacagcacttaggctatcggctgcctagccgctttttttttgagactcggctcactgcaacctccgcctcccgggttcaagcgattctcctgcctcagtctcccgagtagctgggactacaggcgtgcgccaccacgcccagctaaatttttttgtatttttagcagagacggggtttcaccatgttggtcaggacggtctcttgacctcgtgatccgcccgcctcggcctcccaaagtgctgggattacaggcgtcctagccgctttttaaaaacccttccccctttatttgtacggcaatttgtattttcaaagtgcgttcacctcgcatgcgccctcctaaccacgaggtgaggaaaagcaggccagaagcccacctccaaactcccatttcctcgaagagaaaactgaggctcggacaagatctgtgcgcgaacgccgaatggatggccctggggccgatgctctctcactaagaaaaggcctccgagactgcccaagcttcctgcccgggttcggaatcttatagacccgcaaaactgcaaatgcgctaacagtcctaaaaacgtccacgttgccagctctgaattgcaaacgccggcagcagaaccgtttaatcacaaggtaaacggagagtcgccgcagctcggctgcctcctcactggcaaacccagggcaggccgcgacccgcagggccaggctgaacccggcggccgacccaacgccgctgctgtagctacctggacgccatgcacgatgtacaccttctccgcctcgctcagcgtcacggacgccatgctgccgagctgccccacgagccgcacgtcatctgcgcgcgtcccctcctctggaccgcgcccccacgtcccacccccccccgccccgcgtcagcgcgtcatcaacctgcgcggcggccgctcctgcagccgcggccgccgccactgccgggagagctcgatgggcttctcctgcgcgccgcccggtgtctggccgagtccagagagccgcggcgcctcgttccgaggagccatcgccgaagcccgaggccgggtcccgggttggggactgcaggggaaggcagcggcggcggcggcgggagccccaccggggtctgggactggggaactgcctccggcttcacggtcagttgggaagggaaactggggtaggggtgaagaagctggggtgaggcgagcctcacgggccgggggactcccagtgggagaggcgtgcggcgtagttgctcagagctggagttgacttaggagcgtgtgtgtgtgtgtgtgtgtgtgtgtgtgtgtgagagagagagagagagagagagagaccccgactaaggaggggcggacgtcgtgattggcccgggggtgctgtttccctgctcttctcccctccatttctctagtccctaggatggctggagaggcgatgcagccctccctaggtagttcttggtgggaagggtccgggaatgggggacactagtcctaaggcgtccccacccctccacccaggaatatctctcgctggctcgctcactctctgtgaccgaacgctgtcccattaccttgctgggacctcttgcctcgggtgcttaccagagcgttgtcccacagacgggggaggaggcgcttggtaaccggcactggcgaggtgcgcagtgcccggacgtccccaacgcttcctagcgggaactggaaaccccggcttgatggaagtgattactgggagctgtgagcagttgcccgaaaaaaagccaaccccaaccccttgcgatggccgagtgggagtatgggcattggatacccggagaggatatctgcaaggtgaagctggggtcaccaaaggaactcattaaggcggggctgacaaagtatggtgcaagttttaaaggagccgtgtggataaatgggagaaagttaacccaaattagttgaagcaaggagggcaggttaaagcaattctgatgactttcctgatgttccatttttgaggaccctcagccaaaaaaaaaaaaaaatggtatttatcagatagtgggttcaaatacagtttcagataactattgggagcctactatagataggctttgtgctacctttagaacacaagacaagtaaaacatactatgcccagagaagttccctgggcagatgaaggctccagggccaacataaccacagatcatggtggttagagctatgatggtcgcatcagtgggcacagtgggattgggaggtcgtctgataaggttatagagaggaagtgcttgctcacattcttaagcattaaactgctgagctccaaaattgatgatcagttcttcgtagactggacattagatgtttcttatgtctctacgtaattctccacaggggcacctaaaaggaagacagcttgcagggttggactttgccttccagggaaactgaaagaggtgaagccggaaggatttcctccctaatgaaggcacaggtgccccacctgttgtggcacttagatgtgtttgtgtgtggttggacggctgggttttatgtgaggagctctgttgtgataagataacatgagattgctgatgttataaatgatattttctagatgtgctagagattgctcagaaaggagagaccctggaagtgggattttagaagctaggatatctgaggagactgaggatttaagaggtgacagcaaatggacagatcagaaagacacaggaagaaaagcctgagttcagataccatggagttatctttatataaagattttccaatgtcttaaaatatagaacatgtatttgaactgtccccccctcacaattgacgg

SEQ ID NO: 315633 - DNA, 4001 bp, Homo sapiens
tgaggcacaagaatcgcttgaacccgggaggtggaggttgcagtgagccgagatcatgccactgcactccagcctgggtgacagagggagattctgtctgaaaaataaaaaaatgaaacttgggagcaagaaattaatccactgttgtttttaaactcttatgcatgtacttaattttcaagattctatgaccaaactggaaaatgataaatacaaaaaaccctctatttttgcaaatattttattaaaatgtaaatttaaaaagatgaaaaaccatattccacttactttcactgatggagatgataccaagcacttgaaactttttacatgtctttaaagaaagctttttgcgtatctcatacgtacccatcaatcttttaaaatcccttccctagcaacccaacacctaagtttcagagcatgacttaaacaccaacacgttgccactgttcatctaatccacctgaattttgccttaacttaggtttattcttactggggactgaaatggttcgttcaagataaaccgaagtcagtttaaaaattactagatgatagtagttactaagatgctcatggttcccttttcagcaaaggcccccaggtagggccagccaataatgcaagtcacactcaagtgttgacatcttcatctccgggccggccccttatgaagtgaggggggtctccagtaaaatcactcaggaagctcctcgagccaagtattcccaaatgctacttactggaggtacaaaaaggagaataacttttctgagggccatttcacaatctataccagaagccttgtggtatagaccgtggattctatcttgttttagaacgaatcttgtgcgattctttctacagaaatgatcacgctcaaaaacccagatacaacgatgctcaatgaattactttttgcaataactaaaaactgaaaaccacttgtacgctcaccatcagggagaaactacatttagtaaatcacagtccaaagccatgccaagagtcagggatggatgaggtagtcaacctgacacacaggaatgtacagtcgagagagagagagagagagagagagagtcgagagagagagagagagagtcgagagagagagagtcgagagagagagagagagagagagagagagagagagagagagagtttcagcactttatgatgcaggttctgcaaaaacaagccccgctcatgttacaaggaaaaaccatctggaagaatatacaccctcatgttaacgcagcttgtctctggggagcagcggcacggctgctttgcttgcttccttgctttctgttccacgttttcgacagtgagaagtattatctttagaggtcgcgaacaggccggaggagggtgcggcaggtcgcggggcagggcctcgctaggcagggacgcccccgcaccgccccgggctggccccgcgccccgcgccccgccgcacctccacctttgccggcggtgagcgggagccgcgtcccgccccgaggtctgggatcaccggcgggccggctggaagcgtccggaactcacccagcgtctcacccgcgcgggtctcaccgaccgcgcaaacaccgcccgccgccgccgcccagagatggccgccgccggcgcagcagggccgagagcgtggggacgccggggggctgagtgcaggggtttccagggtgcggagcgggcgggcccgaggcgtccgggcgggcgcaggcgcgacaccgaccccacccggtctgctgcctcacctgtgctctgtgggccgcgggaggctctggggtaggtttcaccaaacaaccggttggttccgactcggctgcgtaggccgcgtggccttgctcccctggccgagaaacaggcgcagccggcgcggaggttgaaagctctgcaggcgcgagtaccaaacgcgccgactgtttgtcgcgcctctcaggtcccctggggcgaccagcgcaggaggccacccctcccgccgccacggacccaaccctggtcctctgccttagccgaaggccgcaccctccgcgcataggccttcctcagccccaacccaggacatcaccatgtcccgcagtgcgtccagtcttcctgccagcaagtgtgggtaggagccggccgctggccccgctctgggctagacggtggggacatactggcgggcaaaaacagccctgtgcctgctctgcagctatggggaaggaatatctgttcatggcagcaatagcattcgctccttaaaacctctttatgagtctcattccttttttaaagacccaaactacttaaggtgggcatgaagcccccatgtgtgatctagcctctgcctgcttggcttcatttaggtccttaaaggatgcaggtttcttctcgcccagggcctctgcaaatgctcttctctctgcctggacactcctcacctcttccctattgtgagagttcttcatatatcatttcttagattacactatcctggcccataagacttgcagcattgctgggtgtggtggctcatacctgtaatcacggcattttgggaggcagagtggcggatctcttgagtccaggagttcaagaccagcctgggcaacatggtaaaaaaaaaaaaaaagagagagagagaatgagaaagaagaaaagaaaataattagcggctcaggcctgtaatcctagctacttgggacgctgaggtgggagaattgcttgggccctgaagggaggtagaggctgcagagagctgtgattgcaccactacactccagcctgggcaacagagcgagaccctgtttcattaaaaaaaacacacacaaaaagaaacagccgggctcagtggctcacgcctgtaatcccagcactttgggatgctgaggcaggcatggcaaaaccccgtcactactgaaaatataaaacttagaggggcgtggtggtgcatgcctgtagtcccaactacttgggaggctgaggcaggagaatcgcttcaacctgggaggtggaggttggagtgagctgagattgagccactgcactccagcctgggcgaagagcaagactctgtctcaaaaaaaaaaaaaaaaaaaaacagccgggcacagtggcttacacctgtaatcccagcactctgggaggccaggtgcggattgcctgaggtcagaagtttgagaccagcctggccaacgtggtgaaaccctagctctactaaaaatacaaaaattagccgggcgtggtggcatgcgtctgtaatcccagctactcaggaggctgaggcaggagaatcacttgaccttgggaggtggcagttgcagcgaactgagatcgcctcactgtactgcagcctgagccacagagtgatacttcgtctcaaaaacaaaaacaaaaaaaacacaaaaattgcagcaccagggattcttcttcctagcccctttcagggtgtgcaataatttgtgtaatttttgcttaatgtgtaacttaacagtagactgagatccatgaaggcagagaccatggccgcttggctctcattcttgtatgtctcacatctgtaccgtgcaggcccatgttagctctggtaaatatttattaaatgaatgaatgaatgaagagcaggcctgggtagtgtcttaggtggccttgattttcaatttaaggaggagacagtgttgcctacagagagcgagaaaagttgttgagtgggccatgtgaggagcagtgaatggtccctgtggagagtaggcccagtcatagaatagagataagtgaagggattttggagggttttgagggcccagcatatttgggggctgctatggtttggatgctggtatctccccaaaattcatatgttgaaacctaagacccaacacattcatattaacaggatggatcctttgtgggggaaattggtgcccttgtgaaagaggcttgagggagcctgtttgatccttctgccatgtgtggatgctctgagaaggcaccatgtttgaagcagagaa

SEQ ID NO: 315634 - DNA, 4001 bp, Homo sapiens
attgggtacttatgtaccaggctctgggcagggcactaacctcagagtggcagagtccggagataccaagagatgattatagcacaacagtgggagtgtccttataaagggaagcagcataggatagaatgggccatagaggaagggtcgtagctctgccgaagaaggctttggtttaaaactttggagaaagtggccaggcgcgatggctcacaccccgtaatcccagcactttgggaggtcaaggcggtcggatcacttgaggtcaatagttcaagaccagcctggacaaaacggtgaaatcctgtctttgcaaaaatagaaaaatttgccgggcatggtagcgcacgtctgtaaatcccagctactccggaggctgaggcacaagaatcgcttgaacccgggaggtggaggttgcagtgagccgagatcatgccactgcactccagcctgggtgacagagggagattctgtctgaaaaataaaaaaatgaaacttgggagcaagaaattaatccactgttgtttttaaactcttatgcatgtacttaattttcaagattctatgaccaaactggaaaatgataaatacaaaaaaccctctatttttgcaaatattttattaaaatgtaaatttaaaaagatgaaaaaccatattccacttactttcactgatggagatgataccaagcacttgaaactttttacatgtctttaaagaaagctttttgcgtatctcatacgtacccatcaatcttttaaaatcccttccctagcaacccaacacctaagtttcagagcatgacttaaacaccaacacgttgccactgttcatctaatccacctgaattttgccttaacttaggtttattcttactggggactgaaatggttcgttcaagataaaccgaagtcagtttaaaaattactagatgatagtagttactaagatgctcatggttcccttttcagcaaaggcccccaggtagggccagccaataatgcaagtcacactcaagtgttgacatcttcatctccgggccggccccttatgaagtgaggggggtctccagtaaaatcactcaggaagctcctcgagccaagtattcccaaatgctacttactggaggtacaaaaaggagaataacttttctgagggccatttcacaatctataccagaagccttgtggtatagaccgtggattctatcttgttttagaacgaatcttgtgcgattctttctacagaaatgatcacgctcaaaaacccagatacaacgatgctcaatgaattactttttgcaataactaaaaactgaaaaccacttgtacgctcaccatcagggagaaactacatttagtaaatcacagtccaaagccatgccaagagtcagggatggatgaggtagtcaacctgacacacaggaatgtacagtcgagagagagagagagagagagagagagtcgagagagagagagagagagtcgagagagagagagtcgagagagagagagagagagagagagagagagagagagagagagtttcagcactttatgatgcaggttctgcaaaaacaagccccgctcatgttacaaggaaaaaccatctggaagaatatacaccctcatgttaacgcagcttgtctctggggagcagcggcacggctgctttgcttgcttccttgctttctgttccacgttttcgacagtgagaagtattatctttagaggtcgcgaacaggccggaggagggtgcggcaggtcgcggggcagggcctcgctaggcagggacgcccccgcaccgccccgggctggccccgcgccccgcgccccgccgcacctccacctttgccggcggtgagcgggagccgcgtcccgccccgaggtctgggatcaccggcgggccggctggaagcgtccggaactcacccagcgtctcacccgcgcgggtctcaccgaccgcgcaaacaccgcccgccgccgccgcccagagatggccgccgccggcgcagcagggccgagagcgtggggacgccggggggctgagtgcaggggtttccagggtgcggagcgggcgggcccgaggcgtccgggcgggcgcaggcgcgacaccgaccccacccggtctgctgcctcacctgtgctctgtgggccgcgggaggctctggggtaggtttcaccaaacaaccggttggttccgactcggctgcgtaggccgcgtggccttgctcccctggccgagaaacaggcgcagccggcgcggaggttgaaagctctgcaggcgcgagtaccaaacgcgccgactgtttgtcgcgcctctcaggtcccctggggcgaccagcgcaggaggccacccctcccgccgccacggacccaaccctggtcctctgccttagccgaaggccgcaccctccgcgcataggccttcctcagccccaacccaggacatcaccatgtcccgcagtgcgtccagtcttcctgccagcaagtgtgggtaggagccggccgctggccccgctctgggctagacggtggggacatactggcgggcaaaaacagccctgtgcctgctctgcagctatggggaaggaatatctgttcatggcagcaatagcattcgctccttaaaacctctttatgagtctcattccttttttaaagacccaaactacttaaggtgggcatgaagcccccatgtgtgatctagcctctgcctgcttggcttcatttaggtccttaaaggatgcaggtttcttctcgcccagggcctctgcaaatgctcttctctctgcctggacactcctcacctcttccctattgtgagagttcttcatatatcatttcttagattacactatcctggcccataagacttgcagcattgctgggtgtggtggctcatacctgtaatcacggcattttgggaggcagagtggcggatctcttgagtccaggagttcaagaccagcctgggcaacatggtaaaaaaaaaaaaaaagagagagagagaatgagaaagaagaaaagaaaataattagcggctcaggcctgtaatcctagctacttgggacgctgaggtgggagaattgcttgggccctgaagggaggtagaggctgcagagagctgtgattgcaccactacactccagcctgggcaacagagcgagaccctgtttcattaaaaaaaacacacacaaaaagaaacagccgggctcagtggctcacgcctgtaatcccagcactttgggatgctgaggcaggcatggcaaaaccccgtcactactgaaaatataaaacttagaggggcgtggtggtgcatgcctgtagtcccaactacttgggaggctgaggcaggagaatcgcttcaacctgggaggtggaggttggagtgagctgagattgagccactgcactccagcctgggcgaagagcaagactctgtctcaaaaaaaaaaaaaaaaaaaaacagccgggcacagtggcttacacctgtaatcccagcactctgggaggccaggtgcggattgcctgaggtcagaagtttgagaccagcctggccaacgtggtgaaaccctagctctactaaaaatacaaaaattagccgggcgtggtggcatgcgtctgtaatcccagctactcaggaggctgaggcaggagaatcacttgaccttgggaggtggcagttgcagcgaactgagatcgcctcactgtactgcagcctgagccacagagtgatacttcgtctcaaaaacaaaaacaaaaaaaacacaaaaattgcagcaccagggattcttcttcctagcccctttcagggtgtgcaataatttgtgtaatttttgcttaatgtgtaacttaacagtagactgagatccatgaaggcagagaccatggccgcttggctctcattcttgtatgtctcacatctgtaccgtgcaggcccatgttagctctggtaaatatttattaaatgaatgaatgaatgaagagcaggcctgggta

SEQ ID NO: 315635 - DNA, 4001 bp, Homo sapiens
tctcactggggagccccagcctggccctagcagctttgggcttaagctagagtccacgggcctgtctggcctcaggctggtctctgtttaggagaggaccagctggtggccttccctcctgtgcccccacttcctcattactgttcaagctgctgggttccgaacacattcagaaccctcttggttcagcatttaatgggatgccagggcagaggagaagagaggctttcaaaataacgactggcaaaggaaaaacaggcattcagtaaaagtgacaagcacggtcactggatttcctgacccttctggcttttttcctctccatggggaaagtgcctatttgtatttcactggccagcagccaaagaacagtgtatctcggagccacctccagatctcccagcagcttctggtcgatgctcggaagcccccagcagagctgcttgtccatttggatgcaatgactcaaggctgacttcctgaacattttgcctcaggtccgttgcaacttcctacctcggaaggagaatgttgggtggacatttaggattttgaaccaattaaatagcagagtccagggctagacatggaggatacttagcaaggttagtggacagcattgtgcagttgatctggaacaagcatcagcagacctggaatccctgctggctcattagtggcatgatgtcagccactttacctggcagatgcctctgcagggaaaattccagcaggtactcaccaccaacagaactaagagggccactcaggatctaagccacccagagatgcaggcgtgggggctgccttgaagctcaaagctacttgggtttggtagcagtttcaaaaagtgacacacccaatcctacagctcttgatttctggcccaatctcagacttgccttgtattgcaaagtcctaaagccaaattcaccagaaaggcaggcccttcacacgttaacctgcgtgcactatgtgccatgcactgtgctaagcacctagcagccatatctcatgaaatatgaaattcttacgacagactgaagaggtgggtactgttattatcctctttttacagtcaaggaaactgaagttcagggaagtcatctgatttccccaaatcacacagccggtgaaggaaagagcttgaatctgagccaaactctgaagctgaaatctgtgttctgtctgttgtgctgagaattaaacccccatactgtgtgataattgacttaggtgaggctatatcatgcattaattcagattcacctgaggatgcagcagaaaaagatcaacaagaatgcagggctatgccagggggctcgcttctttgtctcctacccttttccgaaacccagggtgcctggaggcatctcccgtatcattttatggatgctgggacatagcccgggtacctaaactcaaagcactcaggtccactgacagcccacttcagtgtaccgggtctgccctccttcccttccacctcctcccgaacggcaccgctctcaacagcagatgaaacagaacagagatggtcttacttctcaggtcgagtccttgggaagggaagtcaggagcgtgttgctgggttcctcactccaccgggaagtcccagactagcaaggagggctgcctctagagggcggttcttaaacccctgggaacggaggctgctgaaatgtgccaacaagtgagacagcctttgcattcctgtttattctggtatcaataaaaaggaactgttactatagtaacagatattccacttggtgcacggccacttccacgatgcggaacatcatgtccaagccacacgcttgagaggcacaaataaatacccattttgtcagattgatgaggaataagaaacacgccaagctttgttctgagcaaggcggctcacgtaaaggaatttcccttgtttcttatgggagggtcaggcaagagtggattccagcacttccccatgggaggggaagccaagcttcctgaggcagtggtgtggattcttcaggagaaaatggctctggggggaaaagggtggggtgtaaagggaggggaaactgctcagcattgggtcagttcttaattatccacgaatgggtcagaaactccgtacacagcgttttcctgataccttgaatgtcattggaacttcacagaggagccaacggaagagcgtgggagaggggatgcaccgtgtctgggtctcagcaggctcatgtgttggccctggctccagcaccagccccttcagcagccactcagtgtctctgtgtcttggtttctgtgtttgtcaaatgtggagcataccagggtggttgggagatgacatggatgagatgacattagtgaagcacatagtcaaagctcagcatataggacttttctccaagagagacctggactctacgtgatctgaggccagagcccagcatggtgcattttgcctggcagaatatgtgttccataagtagtggctcaatgaatgaacatgtgaatgtaaaatataaaagtaggccaggcatggtagctcatgcctgtaatcccagcactttgggaggctgaggtaggcagatcatttgaggtcagaagtttgagaacagcctggccaacatggtaaaaccctgtctctactaaaaatacaaaaattagccaggggtggtggcacacacctgtaatcccagctacctgggaggctgaggcaggagaattgcttgaacttgggaggcagagtttgcagtgagccaagattgggccactgcactccagcctgggtgacagagcaagactgtctcaaaaaaacccaaaaaacaaacaaacaaaaaaacccaagaaaagtaaaaaatgtatgtagatccttaaggccagcctggatgcttatagataatggaggcattctcctaatttcagaatcagctttcacttgaaaagctggaagtgttttctatcgtttagtgtcatcctagttccccagtgaggaagctggggtctaccagttagaccaggcctccaccccaactttactttctcatggagtcttggttggctagaaggtgatgaggcctaggacatgcatcacaggtgaatggaggctttaacaaggcaaccttgtgtcttctttggcctatattatttgttcatttaacaaacatttatttaattcctactgtgttcctggcactgttctaagtgctgggggtaccatgtgaatgacacaggtaatatccctgctgtcagggaacctaccttcaagggggacacacagtaaagaaggggacattcaggatgacgtcaggcagtgaggaatgccgtgatgaacgcaaggctgggtgaggtgagagcgggtggtgttttagggtagcagaatcacaaggagtcagttgtgtgaagtctgtacacatgggagagtcttcgtagggtgggaagagccagtggaaaggcccagactgggtggatcctggtgtgatgtaaaggcaggctgggtgccatcttgggagtgagggaggtgggagacaggggtggagtgggagggacagggcaggcatgtccagggagtcttggccacgctgaccattctcgagccacttaaactaagagggtcctaaattcttgggtataaaacaattttctggaaacaatgtgtggtccctttttttcttcttccccaattctgcatttcttgaggcactatgaatggtagccccctcagcctcccaccctgctctgccttaacttccccaaactctcctggtagaagaggacagctagattcttgtcaaaccactctttgctgaccctggttccttgcacacatcctcctgctctgcaaagaagtattttgaatatttcctagggtctttggtggctcagatgaaccaatcccagtgccttctaacagttggagagtaagaaggatcctggagcgggggaacttctgacagctcctgctcatccccggagaagacagaagcccatcacctggtacacttcagagg

SEQ ID NO: 315636 - DNA, 4001 bp, Homo sapiens
gctccttacccgcaggcgtgcagcccctggaaacactcctacgtgtttgctattctgcgtgggttgatagctaagaggtgagggggaacacaaggccttcagattagggagaccccctccgcagctttgagagacgatcgagaactgggtggggacacttagggtggcgtgctttgtagggaaatcgccggagctgggattggaaatcagattcgtctgatgataaagctactccttctctgcctgtcccgcctcagcaagatttcagaccctcctttaggaaggcgccgccagtcctgaagtttgggccagttctcgctttgggacttggagaactgtggttccagtaactgggtggcgggatctcccccaggcggggcttaagcgggaagggcgagcagttccagagcgggccgcgcggggcgcggggacaggcaccgccgctgcagacgcggcagctggtttgcctcgcgcttttggctccagcggtcggcaggcaggcctacgggtggggcgagctccttgcccaaggcagagggtagctggcccgtgagcccaagtcccttgacgctttgtaatcacggacctccacagtgcaggaccccagcacgagatagcgtttcacctcctccaaacgtctctctccaaggagagtcgggaggaaaataccccaaatgcttaccggggctttgctttctctttttttcccccctacatccctgtattctccgaattatttggacactggtcatatattaggttaacttcatttttctaaataaaaaggcttatttcctgaatagaaaagaaacacgtgcttactgcaaacaagcaaacaaaaagatggaagagaaaaagcacctatcatccaacccccaaccttaagaaatgaaaccacccagtgtttccttccaaatagttgcatgcacacatatagaaaggcagttgctctcctagatctgccttcccttcccctccccaccttgtgtcatgcctcactggacagcagacctccttcaaccgcgctgccgggctccagtttctttatgcctgattgcctgctactcgagtcgtgcccattttcctctctcctggcccaaacttcctgcgcctacagccgccttcaggcacttgtgtgagtctctgtttaagagatcagccaggaggtggaacctcacaggacttctgtggtcaagaaactgtgtgagcgtgttctcacacataggaagaaagcaatgtatgtcatagatccccaaaaggatgaatgcaggaagagggaaggaacaaaggaaggaaagaaaggcagaaaggaggaagaaaaaaaaagtaattaaaaagaatgacgtgaggattgtttgagcccaggagttggagatcagcctgggcagcactagggagaactcgtccctacaaaaaatttaaaaaattagctgggtgtggtggtgcgcacctgtagtcccagctactcgggaggctgaggcgggaggatggggaggatcgcttgagcccaggagttggaagctgcagtgagctatgattgcaccactgcactccagtcggggagaaagaatgagaccctgtcacaaacaaacaaaaaagcaaaaagaatgacggaaggttaggaaagaagcagagcaacgaagcagaggcgcccagcggcggactggccagggactgagcgccgtgcaccacagagccctcctcgcccacttcccgcggcgagggtggcgttgctcccacttacccgaccggagcagcacagcccggtagagcccggtggcatcggagggcccccgggcccactcgcccagcctctgcgccatgcccccgcgcctcctactgcagagccagcactgctggccccgcgagcgcacagcaggagcgtagtccggagccgaagcgcctccgcgacggtgacgcggccccaagtcccaaaccccgctgagggtcaagttacggcggcggccggaggggcgggcgaggagacgccgccgggggaaggaggggggcaggggccagggcaggtgtccgcgcccaggtagcaggcagggcgcgggtgaacgtctgcagtgaggactcctagccccgaggttccagggccaaggcgagaacacagtgtcctgacttccagcctcggtctcccacctactcttctgctttctttggccgctggccttgttgatgctaccagcatggggttctgaagcgccatacctgggatcaggtcccaccaccaccattaaaagctgtgtgtccccacgatttagttacctaacctcgcagaaactcagtttcctcatctgtaaaatcggaataaccagagtactttcctcacatggttgtgaggttaatcagcttagagtgtgtgtgtgtgtgtgtgtgtgtgtgtgtgtgtgtgtgtgtgtggcccagaacagaggctggtgcagaacaaacactatacagtatacactggtactttaaaacatgtcacaagtatcgtggggtgggtggcactgagaggcagggtctttgctgggtgtgaaggttgagggtggaggcctatggaactccaccagattgctttctctggctttgtggagtgtctgtaacaatcagagatgagtgggccaatcaggtctaaaggtgggaggtgccaggctcaccagggggcttcaggagatacaagaagctggcaattttgaggatctattctgtgtctggtgctaagtttcttctaaaacaaaaactcatgttaattgtgtgcttcatgttctgtttcatttaatcttcataatcctatgaagcagggtctattaacattgcaaataagaaaaaacagagactcagaggggtgatgcaacttctctgaagtcacacagtgtagggctgggatacatgaacgcaggtggtccgactacagaccttggccacctgctcttctgcctgtctgctatctcattcactcgtcacaacagccctgaagggtgggtattccctccagtttacaggtgaggtcgttgagacttaggcaggtgaggtggcttgcacaaccaagacccaatccagttctcagcccacaaaacttaagcccctgaaatctagagattcctggagctgtccagggtactggatggcctctgttcaaggctgtgtctgaaagagccagggaatcttgagctgactgttgtggtctcagccacacagtaccacctccctttgcggcctgttaccagccttggtaccttcaaggccaactgttggccaaactctctttggttggcccatggccactgcccagatccagcttctgctctgactcaggggtcctgtacctctctgctccccagacaccatccagtgtcctgaaagcccatctgccacacctcagatgccaatcaggggcccaaggtgacacttgatctttggaggcctcattgattggccagactgatcatgtctgtcatcaacaaccagccttcaggagtgccaggcatgatggcagatatttggcattcactgtattatatcctttcttcagaggatgaaattatatccaatttacagttcacctcatttaatccactcaatagctctttgatcaagctatggttctttctttctttatttttttatggctcactgcaacctccacctcctgggttcaagcaattctcctgcctcagcctcccgagtagctgggattacaggtgcacgcaaccgcaactggctaattttgtatttttagtagagaaggggttttgccatgttggtctcgaactcctgacttccagtgatccacctgcctcagcctctcaaagtgctgggattacaggcatgagtcaccatgcccggcctcaagtgatggttatgccccttttacagttgaggaaatacggcacaagtgacttgctcgagatcacataatgagttggtagtggagccagaatttgaacccagatggtgccagaacttatgctgcaagggagaaaccaaaccagctgtggagcaaagtgggactc

SEQ ID NO: 315637 - DNA, 4001 bp, Homo sapiens
gacccctcccacagcttattgaatatgtatatttggccatgctgctcagcataaatttctactccctttgcctcttcctcaaagtgtcagtttctggattctggccagaggccatgcttcccagcctctcggaatggccaccctgcaggctgcaaccctttatgagaaataaagctcctctttccaaattaacaacaatagcagtaccctgctctttcccccactagctgcatgaccctggctaagaaattacttcttccttgagtttctcaaccttgatggaacaggtcatcactggttgtctgaggatcagagtcccatgtttatcggggagcctctgggcttggggtagcacactgagcacttcacaggcatcatcttgttgaacttcccacgaagcaggtaccagcccccctttataaacaagaacctgaggtccagaggggttcaggtcatcgccacggtaggtgggtggtggatctgggacacggcagcctgtctatgccactgggatggcagtaccgggtcgttgtggttggagagcagtgagcacgtaggacaatcccgagagctggtgagtaaatgcaggcccctctttgcccctaagaggctgatccaggaggtctgatgggccatgagaaagtgactgtttcacaagctccctcctactccccaccccaggatgctgacgcaggggtccgcagagcacatttccagaaacagttctcaggcaatgctgtctacaaacccccagctgagagctcaggcttagaaggtgagggataataacatgaatagaattctaataataatggagcaaagcctctacacagtgccaggcagtgttccaaacactttcactcatttaattttcacaatgattttccaaggtagtgattattattggccctattttacaggtgaggaaataaggtacagaaagcttaaataacttgcctattgccctacaactggtaacagctggttagctaactttataataataattttaagatctttcccctgtatccacctgcatcagacactctcctggggtatggggaaggggtacccagggagcttttattcagggaagtagagatgtgtgtggttaagaccagggagccagagagatttggctgcccccgagtctgtcctagagatggagagataggacactggttcttccctgagcccttgcctgctttctagatgcaagtcttggctgtgagttccagggggagggctggtgggcactgccggctgaagctgcagggtaggtgggtcggggctcccacttgctaggtccagtctcccttcccatgaccagggccccaacaggacacttagaggttcctaccttcttcccctgggctgctcccatggcacgaagtgggcaccaggcctgggtgggctgcaggggccaggctggggtcctccctgctggcgttgatctcaggagccaggacccaaggggctcccggggcgagggccccctgtcctcttgcggctcattctcccaggcacaaaggcggctttcacagctgctcctaagcccggagcgcctcagacaggcttagggcgattgatcctgacagaggggccagtgtccccaggcggcttctatgcccttcttgggtccctgcagctcctcacctcccagaaccctgcctctctcaggaagggaaactgaggcagctgggaaatgagggaagacgtggggcagtcctctcatcacacaccggtagctcaggcgcggcgggtgacctctgcctggcccagcgggcaggacttggccttctcaccttgctgggcaccactcagccgacagggccagacggtggaggccgtgggctggctgaggtgcagagctctgggagggctgcgtgcggatgtcagcttcagctggacagccccattaataatagacctttgaagatgcttggggtccggggctctcccacagcagatactctgagagcagactccttcattcaactgggcagcaggctgcctggaagggctggagggctgctggtctgggcccaggccaagaaaatatctgaaggccagattccaggcctggggccaagttctcaaagtgcccccggcagtcactctcctcctcatttgccagccctgtccttctccgtgatgccagcttgtggcagaggttaaggctaaagagaccttgggcttgaactgtagctctgtccctgatagttgtgtggccttgggggcacgatgttgtgtgtgtgtgtgtgtgtgtgtgtgtgtgtgtttgtgaagcactcatactgcagagctaaatggggtaaggtgtgtgtgtacagctgaagccatcgttttgcgaaagcataaatcagagcatgttgctctgttttatctgtcacttcaccaaaggtggggtaagagttgcccccactgcatggggctgtggggatgtgcagagcatctggtgaacaacaattcctcagagaagttaggtgccactgctatcatgctgctaataacacaaatgatatccactgcccagtggaaagtcccgaataaccagttcactaagcacaacaccgtttcccaagaggtgggggggttggggagaccttgccaccctttcctttcctctagcacgatgcctggcacacagtaggtgcctgcaacacatacacagatgacttacggaatggcagctggtggagggtcaagaattaggcattctagatccagccttgccaacagaaccaaacaccccatggtctgcaaggtctgattgactgtcttgctaggacctcatttccctctcctccctctccctggtagtttctgggtcacagcacctttccccccttctcagggcctttgcacttgctattctctctgcgtggaatgttctctcccccacttcccctccactgcccatattttgatctttgcctgattctatcctttttgtccttcaggctcctcagagaagctttctctgttgccttgtgcaaagcagttcccaggctctctgtttattactttgttgtagcactcatcagcaactgaaatgatatgacttcggtgtttattgtccgtctcctctgccattcctctggaatggcagttccacaaagaccagggcctggtctgtcctgctcctcagtttaccccgagtctagagcaatattagtggaagaatccatgatggaggattaaatgaaatagtctaagtaggtcgagtgcttaacacagtcctgactcatcgaaagtgctcgcttcatggcactgcttaatactgttgttattgttactgtatttcctccgatacccatgacccttccagccaagcaaacatgtagcttcttccttccgccccttcccttgggttcagcctctgccttcctcggctgctccccactccttttctccctgttccagtcgtggcctgattacagtttcggatttcctgcagaaaggagagagtccacaaaattgtaaagggaaatgactaaattggccttcagatggagcagtaaaaatgctgtaagtcaacacggaagatcaaactcctttggcaaccatcccataattatccaccagcttgactcttggtggggtgggaggaaagaaaatgattcttacgcatttattaatgttttccatctgtttggagccctgccgaaatgtggcttagtgctgcagtgaaagcctggttgacagagcctgtgattgggctctgaagtccaggccctggcaggatgatggcccaaaatgcaacattcaggccacatggcatgggcaggaggaatgggggtggaggccccagagcccagcactatgcctggcgcagaggatgtacttggaatacgtgaacagatgatttatgaggtgacagctggtggtggaggaccaaggagcaggtgttctagatccatctttgccctgtctcactctgtggctgggcacatcccttagactctctttctccatctaaaacatgagagtaaacatgt

SEQ ID NO: 315638 - DNA, 4001 bp, Homo sapiens
tcttttctgacgaactcatgatattttttctgattttcacccctgtcccctgaagccgtttcctgatgccctgtctggccccagcctggttctccctgtttcagcctggttcttaatatctaagccagagtaattttccttttccacctaagcaccctactgctcagcttcccatcatctcccagatcacatccatgatccctggtctcacctctgcgacttgtctgacaagtccatcgtcctccaggcccttcacgctgccacagaaacattttgcccagcacagaaatcataggcatgctggctgtgttgatgcagagaaccaaaagcccagaaccgctccaggctcagctcccagttctattcctgttttggctccggatgctgagccagtcccctccccatttggaacctgtgcctagtcacataaggagaacattcctgcctcatggctctgaggaggtgggaacaccagggctcagccaagctctctgggactcggggagctgaggcccattccctagacagtgccaacaggcaatgtacatcacaactgacctttagctggagcagccgtctctatccctgagcctcggccagctgttggtccccagaaatgctaccaaccagaaggaaaacaggaggttacaggccatccctggcccccaactggtacctaaccagggctctcgaggccagtcctgaggtcagccaaactcacccctgacaagagaaggtgatgacttcctgaactccaagccttgatagggccagagagatcagagcagtcagctgctcctcagcttcaaaagccacgaggttaacttaggactacaaatcccagaattcctcaagggaagtacaaatctcagccagtcttagctccaaagaacatcaagtaccaaccacaccaaggcctgtgtgactgaccacctgccctgaaggtccaggacccatcccaaacccagtcctgccttgccttatgcgtggagaaatccaccacaccggagtaaaggaagctggccgacctctgatgcacaggactacggccaggcccggtgtgcatggccacccacggaaaccgaggcccaggcaggggtcagcactgtgggaaggaagccctgatggcctgcctctgggttcctctttccctccacagagtagagtgatttgtttttgctgagtgggggcaggacattaaaacaactgtaataggtgagaggtgattcagtgttcacaggtgccccaaacgggacctcagtcccccttcgccgactgactgaagaggggagtcaatgtccgacaaaaattctgtggtagggtgcttagccaggaccgaaaggctacctctttaagaagatggggacacggctgggagaagcaggttcccagcacagggccactcccaggactgtgaaggcagaggtgtaggcggaggggagtgtgtgtgtgggcgcgcaaggccagtcgccgagggctggagtggtgggggcatcgggctgcccagcccctcccggggctgtgcgtctccggccaccctgagcagtgggcacacggcagccagcggcgagaccatgcgtctgccctgcaaaaccccaaggcaggcaggccgtgggagcgaaccggagtcggtctggccccttccctgctcattcccgctccctcctgttgcctggcccgcctcccggtgcaggctcctccctctcccgacaccggccccctcctcaaggcccccacccacccgcggcccgcgcaccggcggccgcagcccgactccccaacccgtacccggcctccgcctcttaccctgacccgccgggctccgagagccgatacagcccatggccgggcacccaggcacgctagcctgcgctcggggcgcgggccatcgccttgcagagggtagggtcgcggccacactggggaggggagagcccgtgagaggggaggggtgggagccgcgcgtccgccgccgctccccggagagggaaccgggccggtgacgtaagcgcgggggcgtgaccgccgcgtcaccacccaaagtaggcggggcgcagcgacgtcacagccacgcagaggcggcctggaccgggttcgaaaatgccggtcctctcctcccagagccgactgccacctgaaggcaggggcggcgaacactcactaagccagcccagtcacactacacggggtcgcaaaacctcccttcatgcatccagccccttcattttacagatgacaccttcaagccataaagggattctccagctataaacaacccgaaacccaaaagccttccccacacaggggcttgaatcattctggtaggagagcagagcctagcaaggatgtcctatcactaatctcccttttctccggaccaggaaggcacctatcaagcccatctgagggcccaaccttccaggaaacctcagatccctgcaatcatggacaggggaagaggcaggaggggtgccaggttacagggaacagcgctacagtaccagctctgggaaggatccccacctataaacaccttctctagagggagcagggcataaagcagaaaggcagtgagcttaattgaattcatgtttaataattacaggcaccgtgcccccccttccccctgcccaggcaacagcaggggtggtacaggggctggggcatatgcccccagcagcgaggacggcagtcccgagagtgattttcagaaaataaaaaaaaggaccccaggggcaggcgttggtgcccctccccaccccaagacacaccaaatttcaagactttatatataatatatctctgtgccccagggggaggagagggacacctggcggcatcctggaggggggcccaggcagccccaagccatcctgcctcttcagccactttattagttcagacacatcacactacaggcacccactgccaccgccgctgctgccgcccccctgcagtccaggcggctagccgggccatctgtgtgtccatggggctccaggtccccggccccaccagccctcagttgtggtcagactcctcctctgcttcacggagccacttgaagaaggctgtgacagatttaagggccacacccttgccctgctgctcagcggggtccttgctactctcccaactgtagaaggcatcctccttcaccacgtcctcgtcatacagtgcgtcaaagaacatccgcagcaggtctgcaagcaggcgggacagcagttagaggtgactggccaccgccaccccagcccaccccagggaaccctcccaagttccactgttcaaacaaggccctgatgcaccagcctgacatttgtggccattccagagtgactaggcctctgacaggatgctaatctcatgatctgagactgctgcacagcaatgagtcacttggccatcagaaaaaccttacaaacttgcttggcctcaccttggcagcctgaaacctctctgcccatgatgtatttaatggagaaaactatattcagaattggtactcctgaattcaggaaatcgctaaaagtcctatatatatcatacataaagtcctatatatatcctacatgtaacctgaacattcactgccccccaaacagatcctgacaactcctgatctcaatttcccttccttccccacacatttcctgtacatacacaccttctctggccttgacacttttgtggatgctatatcctttgccggaaacttcctcgtgtcttgttccttcaggactcaactcaagcatcacctgttcgggccctctttctcctcaacccctagctgctgggtagccttcccaagcaacgtgtcctataacccctgaaacacaaccgaccccagtgcccacaaggcaccaccagtctttccaaaccaaaccttacacttctaagccatctatgagatgctgccagccaggatgttctgcagggcatgcccagcctcaaagtcacaaactgcctaggggcacagtcacctgctacccccaccccat

SEQ ID NO: 315639 - DNA, 4001 bp, Homo sapiens
aactccgtctcaaataaataaatacataaaaataaataacaaaaaacaaaaacccttctccaccaatccctgtcagcaagcagcccgcctgcctccaggaaaaggaactcagctttcctctgggccaagaatgccatccttacgtgaaaaaatgcttgccatcacttaaggcccatctcaagtgtcacctgcaaataatgctttcagccgacagcctcttcttttctctgacacaccccgcccccatcattgcccttgtctgtctcccgagggagctcaggatggcaaggcctaagtctgatgcacgtaagttcctaactccaccctgtacctggctcagggctccctgacaagccccagcaaatgtttccctcacttaatgaagttggaggcacacatccctccccggcattgcccagctctcttctatcacgttcccgtccctcacaagggcagccaacactgccccttgacctgaggcccaccctcgatccctccccttgggtacctggctgacagggcccccagggtggcgccagtagcctccagccaggcctaggcgggggagcacctgctgggtgtttcttagcttgctctccctccctcgcttcgctcccctcagccgccgccatccgtgcccggcgctccgcgcagctgcggcccaggcccagagaaaaggtgtatgtctccctggcaacccatcaccacgcaacagggtctcccgggatacggcccgggatgcgctgacgtcagcgcggaaggcgcgagctctccgcctgctggcacagcgccgagcagagcagaccggcacgggggcggcctcccggcccgccgccggatagcgcctccgcccgccggaaaagggagccagaagctggctggccaggcgtgggtgggggctgcagatcccctttatatggatgacgtcctccttccccccaccaccaggggcccagcacctctggcaagtcctgactgtccaccgaggaagggcgggaggacctgctccagcctcggagggttcgagcagatcccaaagaggatagagagagaccccgaggaagttcgatccactccacagcccaagcggggtccgaggacactgagaggaaggggaaaggctgttgagctgtgcccctacttctgcagagatccccattttcatccagtattgccgtatcatttctcggcccctcccccaccttccagaagaccagcgcccactgagtgctctcctcaactctaaaagcccccatcccacacatcactgaccctcgggcccctggggccattctgtggcagcccacttgccaccttcctgctctggataaattttgcctcaaaaccctagggtgaaaccaaacaatgataaattctgactctccttcccgtttcccagcctacccattcctcttggaaagcacactgagttcttccgccatcactgtcccccccaccaccgccaccctggaccctttgcaggagggttgccttccttctctcttcctgctgccttctttcctctcgccagcctcagctggtccacagctctttactcttcttttctgacgaactcatgatattttttctgattttcacccctgtcccctgaagccgtttcctgatgccctgtctggccccagcctggttctccctgtttcagcctggttcttaatatctaagccagagtaattttccttttccacctaagcaccctactgctcagcttcccatcatctcccagatcacatccatgatccctggtctcacctctgcgacttgtctgacaagtccatcgtcctccaggcccttcacgctgccacagaaacattttgcccagcacagaaatcataggcatgctggctgtgttgatgcagagaaccaaaagcccagaaccgctccaggctcagctcccagttctattcctgttttggctccggatgctgagccagtcccctccccatttggaacctgtgcctagtcacataaggagaacattcctgcctcatggctctgaggaggtgggaacaccagggctcagccaagctctctgggactcggggagctgaggcccattccctagacagtgccaacaggcaatgtacatcacaactgacctttagctggagcagccgtctctatccctgagcctcggccagctgttggtccccagaaatgctaccaaccagaaggaaaacaggaggttacaggccatccctggcccccaactggtacctaaccagggctctcgaggccagtcctgaggtcagccaaactcacccctgacaagagaaggtgatgacttcctgaactccaagccttgatagggccagagagatcagagcagtcagctgctcctcagcttcaaaagccacgaggttaacttaggactacaaatcccagaattcctcaagggaagtacaaatctcagccagtcttagctccaaagaacatcaagtaccaaccacaccaaggcctgtgtgactgaccacctgccctgaaggtccaggacccatcccaaacccagtcctgccttgccttatgcgtggagaaatccaccacaccggagtaaaggaagctggccgacctctgatgcacaggactacggccaggcccggtgtgcatggccacccacggaaaccgaggcccaggcaggggtcagcactgtgggaaggaagccctgatggcctgcctctgggttcctctttccctccacagagtagagtgatttgtttttgctgagtgggggcaggacattaaaacaactgtaataggtgagaggtgattcagtgttcacaggtgccccaaacgggacctcagtcccccttcgccgactgactgaagaggggagtcaatgtccgacaaaaattctgtggtagggtgcttagccaggaccgaaaggctacctctttaagaagatggggacacggctgggagaagcaggttcccagcacagggccactcccaggactgtgaaggcagaggtgtaggcggaggggagtgtgtgtgtgggcgcgcaaggccagtcgccgagggctggagtggtgggggcatcgggctgcccagcccctcccggggctgtgcgtctccggccaccctgagcagtgggcacacggcagccagcggcgagaccatgcgtctgccctgcaaaaccccaaggcaggcaggccgtgggagcgaaccggagtcggtctggccccttccctgctcattcccgctccctcctgttgcctggcccgcctcccggtgcaggctcctccctctcccgacaccggccccctcctcaaggcccccacccacccgcggcccgcgcaccggcggccgcagcccgactccccaacccgtacccggcctccgcctcttaccctgacccgccgggctccgagagccgatacagcccatggccgggcacccaggcacgctagcctgcgctcggggcgcgggccatcgccttgcagagggtagggtcgcggccacactggggaggggagagcccgtgagaggggaggggtgggagccgcgcgtccgccgccgctccccggagagggaaccgggccggtgacgtaagcgcgggggcgtgaccgccgcgtcaccacccaaagtaggcggggcgcagcgacgtcacagccacgcagaggcggcctggaccgggttcgaaaatgccggtcctctcctcccagagccgactgccacctgaaggcaggggcggcgaacactcactaagccagcccagtcacactacacggggtcgcaaaacctcccttcatgcatccagccccttcattttacagatgacaccttcaagccataaagggattctccagctataaacaacccgaaacccaaaagccttccccacacaggggcttgaatcattctggtaggagagcagagcctagcaaggatgtcctatcactaatctcccttttctccggaccaggaaggcacctatcaagcccatctgagggcccaaccttccaggaaacctcagatccctgcaa

SEQ ID NO: 315640 - DNA, 4001 bp, Homo sapiens
ctgagtgttaattttctcagtctgagtgataatttatgagtcaaacaaggacagatctgaagccagaggctgctcctgttgggaaatccctgaggatgatgttccagggaagcctccagccttgggagtcccgtggaactgagccagcccaggtcatgaagggagctggtgccagacactgactggggacctgctggcctctgggcagaccgctctgtccctgcacctggcctgccaggtatccctgtgcagtcataccaagtcctgtgctcagaagggccccagagtagtttaaagctctgctgccgcccctggaagctcatgattttgaacaacaacaacaaaaaaaaacccacgttttccactcggccccacacattatgtggcctgcgcagctgtcaggctgtggccacagtgctggcatctctcacacaatgaaggctgctggagtcctggctggcttgttttgactcttttgtgaggcccacacctaagctaaacactcacgtgcccccacgctgactccccacactctaaagcatgaatctgccccttcagctgggagagggtcctcgtgtcatctgggtttttggagagaaggtcaagggagcctgggttctagttcttcagtaatcaagagtaagggtcttacctgttcacaggtccccgtggctgctttacagaaagcaggaagtggccacttcagccacacggctgcatttccagctcagtccaggcagagctgcaccctgccttgcacctctgcagatcctgaggggagtccttaactgagccagggcgagtcctgggggcactctgcccctgggcaggccctgaatctcctctgctcccacactctagagttcaacgggtctcaggggctctgcctgaggactgcccttcaaccaggtattcgtaatttccccaagacccaggcttgctgagtcactcagttacctgaatgcctttttcacaaagggatgactgtgctgctccgtcttccttcttttttgtttgcgaggccacagggaaatctggatcctctggtgaaaaagcaaatccagttgctgctgctgctgctgctgctgctgctgctgctgctgctgccagttcttgtaaatgtcctcacttggtttctgggcagcaacttccttgacttgcctggggagcggatctgagctgcatttaccaggccatgcccaggggaagtgatcagtgtgggaccgtgaagctggatttccccaggagctccctccaagcttctgggatgatgataagactcgggatgaaccaaggatctcgaaccatggacaatgtgaagtctagacccagtggaggaagagaaaggctacgggaagggcaggcttcacgttactgagcatccgctacctgccacacactttcacgtggccttattctgtgtgtttctcacagcacccttgagaaatagagactacgatcacatcttttacataaaagaaaaccaccatccagggaggcgaagtcccttgctcacagactgtcatgtgggaagctctctggatgcaatgattgatgtcctccagttgcagtaccaggcaagctgtcccagagttcatggagcggaaaggctcgagaagcaactgaggatgctcgaatcacaggtttataaaatccattcgtaaaacacagcaagaagctgagggaaggagatgggagggccgtatgacctgattcctgtgctgtcaacattcatcggttctcttctttctctgctagtcaacctcacccactcaggtgtgaccacgaggaccagagccgaggtctgggcaagagtgctcacagctgaagggcttatgacacacaccggctcaacgggacagacatgggacaagtgtgcctgatcatggtggagttgccaagaagcagctgtcgcactgccatgggttctacgtgtttcttgggcagaggacgcatgggaccagaatgggcaccaggaatggtggtgaacaaaggccccatggttctgcatgtttaggtgtctcttgtataaaggcacattgtgaattgaacatttagtgcccaggagcctcatgcatattaagtatctcttggcccttgtgtctcttccttcccacatgtaacatacctgttctctgtaactatctattctgaacgtatctaaaaaccatgtcttgcctgtgttatacaaaccacatgcatactcacgttctctgatgtagctgaaggtttcctaaggccagggcacatttcagggtcacatagagtggagagagggaccaaaatagccttgctctgtttgactcccagccgagatgtctgctgggcagcactgcctctgtaggctctaatgggggaagggagctcaggggagcctctggggctgggcaggctaccagagggtgtggacatttggatggaccctgacggaggacttgggtttccttgggaggaagtgtcaggaagggcatctggggctgagagcactgtgtgagcaacagaaggaaggaaactgtggctggctgggaagggatggtatgggggacagggtgagacttctggccctgggtgctcagatgaagacctggggttgcctagtggctggaaacacacaccagctgtggcaacttgacctctgggatgtgagtgtgcaggcagctgctgagaacggctgtggatttggagatgtggctacagggaatgggcaatggattcatctgggaattctgcaggcagtggcccatagaggaaacagcctggaaatgagactgcagatacgtgctaaagaggctggaggaacagtgaccccagtacaagtttatggatcttatccacaatctaaagaaatggaggccaaatggcttttgaaattctaagatacatgcagaggaagagtaatgcttcatgggagagtcagactcttactggcagtgacgctacacggtagagctctgttcctcctgcccatgtctgtggttggggctggggtagtgcacaaacatgatgctgatgaggcccaagcattgttggaaaagaattcagcagctgccacaagaatcttgaatccgtgggtgaagaccttgactttctctgggaccaatgtggtcaagaacaaagtaaaatcatgacaacaaacactgttcagttttccaaatataagctattttaaatactctacatttaccctcaaagactgacataacttagaataacttttataacagcaaggatgagaactaaaacttaaattgtaaatacaattttatttataaaaacaaagttagcttcaaatattttatgaactagtagaattttaaccttttgtcacatttcccagcaaaataaataattctttttttcacttctagtctgtcagaagaaaagtcttagctgaaatggccagaaactctgaggcacactccggaggctgcttccggggcacctcggcatggccgcttttccatgccggccctcacttgatgcggtccagcagggttgaaattgtttgaaatgcttgttcccagtgcggtaaagaaatagcacttgaatgtaaatttaatttcctcagcaaggccatttttatttttttttaatttctgcagaaagtgtacactcgccagcagttttgccacaacagtatactgagcaaaggagacagggtcatttataacctgatgcatccaccctactgctgtgtccagtttccagtggctggaacgggacctcacattctgtatttgtcccgattggctagcaatttagaacttttttaaagaggaaaaggcagaggagaacgaaggaaggaggaaataacttgtggaatgctgaaaaaagtaaaaacaccttcgaataaagaagaggaacaggcaatgacctaaagcttgcttggactagtataagcatgccagggcaaatatttaggctaaattgtgggagctaagaacataaagtacattgatttctttattagggctagcagatatttaagaatgttagcacag

SEQ ID NO: 315641 - DNA, 4001 bp, Homo sapiens
actttcatttcagaactaaatctgcatttcatgactcttccatttcagattaatgagatccaattagtcatgacaaattcacacacgcacagcccctgaatgaacagcttgaacaacagcaaaaagcacaaaaattccagaattaaagggtaccctctcctggctctaacattttttggcaaagagatcctggacaagtcatctctgacctatgtttcttcatttataaagtgtgggaggaataagacttacctgagagggctgctatgagaaatccatccaacaaaataatgtatatgaaagtatttagctatgaagtgggtgaaaggtagtaggttgttgcggagttgctcacaaagcatcagacattcgtggaagatcatatggagagagctgctcatataacatccttagtgtgctattaaaaattttatatctgaagtaaaataaattgttcttaaatcactcaaggaattctgctttggttaagtggtcaatagtgaagtttttacacatcagaagtttgcagagatgcaaaaatatatttatgcaagatgcataaatatattctcaaagcaagaagatgaactacttacaatatactcagtattagttcaaagatgtcaaagtagttccaagatgtcaaagttcttttcatgcagtccattttaacttttttacagagcaatgatcctttcacttgccttgttgaaaagcttcataatgttaataggatgtacagaagatattttaggtgaattagttcaacaaaactgacaaaatcaatgaaatcatagtattgaggattttagtggaagaagtgtttgcttttaaaggaagtaaatataataatactctctagtttgagacatgttttccagtccattctctaccggaacactagataagctgtgtaaaggataatcttgaggtggggaaggttatgtatcaaacttgtgaaactatgcaacattcactctttttttttgcattacttcatttacattacaatatatatttatattatttgaatagccaagtttggggctatttttcctttaaaaatttaattaacaactttttaataatgtagtgtgtgccattgaacaaaagatctctggtacccagaaaagagtcaaaatgcaagccctctgatttctcaacccctactatgccaaggctctgctggttctcccaaaaaaaaagaattaagctttcattacctaagtccaaaatagtcatcacacaaatgtctaccaccaaaacaaactgcagatccttcaattacacacttcctccaagaaattcgaatcaattaattgtataagtgtttaaaagtaatgtatcctccattttaagaaaacaattattattaatctctaagacctaaatccttggcctaatcagacatttaatgagtggggaaacttcagactggaggttttctgggataaactccagagaggaaggagcagggggaagagggaagactcaaggagagcaatagataggggaggttagggtggaaagctgaatgcatgggtaaaggggaggtctagggatagtaggtgctttacagactgagctcaggggaggctgaggacgggggtggggagaagggtaggcgcgtgggcagttaagttggtgggagctgggtggatggagatgagggtaattcacgggcagtctccaatgcctatcagcagctgctcacctagttccctcccacatggctactaagtaggtaggattctgaggaaccgagaaagtgcgtcatggaatggagccactccggggcccaggaaggcttcaggattcccccacccgcagcggccgggccagctcccctacctcccatatcccgaccggcgtctcacctgctgccaggcgcagaccgctgaggctccccatggccacttgctactccgccgaccagcgcagaacttcgccggggacggtggcgctggtgagctcaatgtcacccagcgttggagtgggaaggacgcaggcggcgccggggggcggggcgtgcgcgacgcggtgtacaggcctgcgccagtgcggggcgtgtaggacgtgcgccacgcgctggagacccgcggcgccagcctagtgcccctggcgccgcatcctgagccagcctcggagatggtcctgtggagtgtggcgccgtgggcccttgccctagcggatatgtacccatgggagtacctgtgtgaaatagaaaggaaatgtgcaactttcgtgatctgtaaactcccgaaatacaccagataaaccagtattccagtatgccgctcttccagtgttttcaatgaacatatgcttttatcagaaaacacataattggactctgctcagtggccctatctcttgttggagcatccctcaggctaatctgagaaattaacatgtatgttttcaatttgttttctatttacctattttctaaaaacatttgatcatctccatcctaaacactttactcatacccacccacactgccagaaatgccgttttttcttgacgtttcttagtggtcccaaattcttaacaaagacccccctgctccagggtccggggaggaggttaggcactggagtgagaggtattagaaaggcctcacttgcctagatttccttcaacgacctggtaggggaaccacaaggaaattgtttcccttttgtgaaaagatgggattggagtaaacagtcccttcaaggtctgacaatctttgatccatgtatctggcccagttccaggaggacatgttaaaagggttgggacagcagggtgacaggttccgaggtggatgcggaccacgttgaactcaagccttgcactcagctttcctaaggattcccctcgtactatattttttgtcaggcgactccgcggtcacctttgctccgcggtgattggcctgcagcggggtcctcgtgtttgtccaatatggcggcgcccagtggcggtgtgaactgtgaggagttcgccgagttccaggtgatggggttttcctcatgtggcaggcatgtgcctccttttgtccccagaccctattccctgctttgcgagggagtatgaaccagctttggaaaaagcgggcaattcaaagctcttttctcgagccattggaggtcatggggggcgcgggtttggccttagggagcgaggctgctctgtaggaggagggaggaggggggtcatagttctctccgcggctctccggccttgtctgggaagctctgggtaatctgctgtggtaaagctcgggatgcgtggataaggattgtaacaatcttgtagcagttccctgaactcagtttccagcttctgccattcctctcctacttttgtaagtagagtttttgtgggagagaagaaggtgcagaagagctatttagttgataaaacatacttggtgcaatttactatttttgtgggacaggacgtatggaagcttggagggaggattaattatagtacctgctctagtgtcattgcccattagagaagatgtaatatttagaggttttgcctttttatgttcaaatatcagagacctagggctaattattaacacctgaatgcaagaatagggatctggttttgaccaagttgccattaaagttatctgttccaattcagtcataaatgtgcttctgtttagttacaaagttgaattccaaaatcatgatcttaaatatgtattgcattattaactaacccaagatactgaaaaattgacctatctgtagtaagctttgtactttgaacggtttgaaggtagtggtattcttgaatactgcctcagcctccctgtagctaggactacaggcacgtgtcaccacgcccgggtaattttttaaaagaaattttgtagcgagagtgtctcaccaaataatcctcttgcctcgtcctcccaaagtgttgggattacaggcgtgagtcaccacgcccggcctaaagtgtttaaaatttttgcaactcttattttttca

SEQ ID NO: 315642 - DNA, 4001 bp, Homo sapiens
ccaaggccatttcactgccagaggatgaccatcaggcccctctctctgcaagtgaaccctgagacagtgaaatgttgacacaagtcctcttcctaacacaataccagaacccagagccagggacgtgaaaccgggaagctgcaatgactcacagaacgggaagcttacgctggcagtggggcaaacacaccaatgttcccctaggcagcctgagcagaaggcaggtaccatctctcctccaggcactctgcttcagccgcagaccacagagcctctgctacatttgcctttaaagccaggagactccagcatgctaatgcccctcggagtggatggctgtggcctgagttctggtaacactcttgctcctaaacagggaatttgtaataggatatctccacacttttcgtttcacatcctgtacccccaatcattcccccttttgaagcttaagattccactatttccttctcttagcagctttgagaaaaaacctgaagctggataggtgttaggaggggtgaaacatacacacacccctagcctcaaaggtacccttccctgagcccccagctccttatgaccagccctccacctctgttccagccacctgccaggcccccctgcacacaaaggagctgttctcacagagaccctccatcctacagcgcagtctctagacagccttctaaaccccaggcccagcaaaactccccacaaagcatctccagtgggttccgatctgccttctgtgagcttggaaggaaagggaagaggcgagcaggcacggaagcagccaggggagcccagtgaactgcaggagcccagttggggttgcaggggttttctgctgcgggagaagcagagcaactaaccagcggccgggcctgagggacgcccctttcctggggttgcatgtgtcctttagctaagccgcctgggccacattctcgatgggtttttcttttctgcctgttagtgtctgtgaagttgatcaatggaagggccacgtccacaagatcctggtttcatcgtgacatcccagacccaccagtgcttccacatctgcccaacagtcctcctgtcggggaggtagaggaaggcggattggaaccttactagagccaatttaactcaatgttaatttagttattaaatgttaataaacgttaggacattatttttaatatcaatacatagctaaattagagaagatagtataaaattcacatgaactttggagagtattaaaatgacttcaaaagcatctcatcagaggctgccgtgggttccccagggaacgctcccctctccctgccttgtggattgcatgaagattgcagagttgcgagtgggttacggttaggtcaaggagtgcagattagtaataaaagcccccttattacggtccgccccactaagagcggcaggaaagccgatcgcccccagctctggtgcagaaatgaaagccgccgccgccccatgcaactttcggggaacaactccggcctcgggaggccgcgcaggctgcgcgcgccctgggccgctgcgcgttgactgcagccacctgtcctggtgatcgccccaccctccgctcgcgcgttccttcccgcgagtcctaccatgtccccggcggtgccccggccggctcctcggcgcgctcagccggctcgcagactcatcccgcctccccttggccgcccccggcgccgtggctcgccaggcttcccaggatgcgcggctactcggctggggcgggtttcccggactgaaggtgcacacgttctctgcagccaagtggccctgcgccaactctcgggagatcgctgcacaccgggatactccgcgggtggggaatacacgccggatctactgagatctacggggatctgagggagcctacccgcggccgcgagcctctgcggtctactcgggacttttgcagagtttgcaaagtccctgccgcgcgtcccggcccagcttccccattcccctgaaagcgcgggagggggaagctcccttcacaataaaagccctgccgggggctcggccagccgcagtcttctggtcttctggagtaggggcccaggtgctaggaaggaaaggtctacgccctgactgcccgcctgacgggtgatgcaccaaggctggacggtgagggacgcctctaaggtgtgagggtgcttggtgagttcgctgcaactcagcaatatggctgagtgttgcccaaactgccaccctctcctgccaagcaggacaagtctttttctttactgtcgcttgtcagaaggacaagtctttttttactgtcacttcttcgccttgtttgggttcagtccccaagaggatttggaaggaaaatccgttgaccactaagctaattaacaatgaagagtttttgtccttgagaactaatcactgttaaagtcactgaagtaagtggctgatacctctctgctttggatgcacagacagtgcctttgtgtcccctgagtcacctactgccaacaaaggcacagtcagagcaagacctgagagtctatccgttccccgttggggaatgtcctgggcttaggggttctgtagtcccaaaatcagggctagccccactattaacagctggatgaccatcgaccagtccccagacgtctttatgacttgtgtcccccagtggcccaatgtttggaccccaggattattaagagcctgtagacaatggatggaggcgaggcagagtcagcagtagggtgctctgagagaatttgggggccaggctgaaaaattagcctccagtactgaaactaacaggaagcatcattagctagatgaagacaggcatcttcccagcagtctcctgccccagaatgatctgaggttatcactgatggcagtgcttctaaagggaagcaaagatccagagagtccccttaaattgtgtatgtgtgtatgggcaggaggaacagatgaagggaaagtattcggtccttaacattccagatgctttctgtacattatttcatttaataaccacaaacgatcctaaaaggaaaacttttgcaaattaggaaagtcaggattagggaggtgaagtaactttcctgagaccagatcgccagtaaacagtttagcaaatccaagtctatttgccagaacatgaaacaaagaggaagacttgatatggcaggaacaggaggcaggatgtagcactgcaaactgcagcttgtctgtgcatatggactactgaaaggacagagagtttgagccctggttgggaaatgagggaagagggtggaggacagtacaaaccattcagggttttatttagatgtttagggagacgctgtgatcttttgagtctcattttctgactgtgaccccacacaagatatatattaaacatatatgtataaatgtaactaaaagattgttttataaaacattacttcatgtgatgcactctgacattttctattctattccaattttatgtatttttaatgatggtctcaaatcactaacttagacaggaagagagtgcccagtatttccaggattactggaagcagaactgtttttcaaaagaagcagctccaatgactcatggaacacacttgggaaaagctgctgcaggatctagcccagccaaataaaatgtcacacaagaacatggctaagctgtaaagaattgtttgttgttatagcatatcctggtccatcctaataacatgaataaaattacttttaagaagaattacttgaaaagagtcataaatcagatttttgtcatttctctgctcaaaacctaccagaggcttcaaatctcctgcagtgtaacatgccacatcttacaggggcctacaagtcctttcacactttggccctcattggttctctaacattatctctgcacactctctctcactgtgctccaggacacactcaccttcttattgtcccttgcatattacaggcaagatcccacctcaggacctttgcacttg

SEQ ID NO: 315643 - DNA, 4001 bp, Homo sapiens
cccctgtagtatggtattgcacattaggaattttcaggcattccccatattacagagacgaatttggatagtttccagggagtcctgactcatataacattataatactttgtttattagcttttgtaaagtttggtaagttttcccagatcattggaaaatacttacaagccaactggggagtatccatattgctgcttccgccttacagtttaggagatgaattctaaccatctaaatatatggtacctccactcacccaggtgcttcggccagaaacttaagagtctccttcgtttgctgtatttcctacctctcacaaccaatccatcagaaatacaagctaacgcttttgtttgcagatcccacaggaagcctttaaagaatatccagggaaattggctatgaagtatcaagcctactacccaatatatatttgttaaggatggtcctgtggactaggttctttcctatttctctgcatgtgtaggagaaaagagcttgtaagaagccccctgttgtgtctaccaagcatcttactttcttccatctgcacccctgatggctttgaaagattcctcaatcacagaccattctctgatcatcaggttggtcacatgactcaagcctgaccactcgggaattcccatgctctgtcagcagagattggctcaagtgtgggcacattacccaaggaagaacacaggggaggaggggatttacttcctttatagtggtggctacttttatctttgaggaaaaaggttacctggggaagcagagaatacaatcatacccacaagagaaagaggaaaactagggttgaagatggagagagagaaggagggagaaggataagaatagagtctaaatgaaggttacagactatggtttgccttctgtttttataaattaagttttactggaatacaaacatgcccatttgtttatgtattatgtatacttgcattcaggctacaacagtaaaattgttggaatggataccatatctaatgggttattcctgactgagggcacatgaagtatgctgtccttctcaaagatcttataatttagtgaagggcaagaaatgtaaacattaaagcacaataagataatgggaatcaagacaaaactcaggatagaaataaatctaacaaaataacaatgctaacaatgataatgttcctgatgatgacagataccattgattgactgcatagtggcactgtgttgcctctctaagtatattgtcactcatcctccaaacaaccttgccaaatagatgtttcagttaggatacaaaaatgtttgctgtaataacaagcaaccccaatagctcatgctgcatatccagtgggggtcagtaggaggatttgcttattgtaaacagccaagatcccaggataatgaaagctttctccatatgttttcatatttgcctcactgggggaagggaccattgtaaatcacacactgtctctaaaaatgtctgtccactagtgaaacacatcccttccactcacatttcattagtcaaaacaaatcatttaaccattcctaaactgaaaagtactggtggaaagtaatgctaccatgtgcttagaaagacaagagctataaatatttagagaatgccagggcattagtcagggttctccagagaaacagaaccaataggatatagatatattgacagtttatagatatagatagatgatatagatataggtatagatatagacatagatagacatatgaggagatttattaggggaattggctcacataattatggaggctgtgaagtcccacgacaggctgtctgcaagctggagatcctgggatgccagtagcgtggctcaatccaagtccaaaagtctcaggaccagggaagctgatggtgtaagtctcagtacaaggccaaaggcctaagaacccagcaggttgcttgtgtcagtcctgaagtccaaaggctggagagcctggggttctgatgtccagggccaggaggagaagaatgtcctagctctaggagagacagaaaggaaatctttttctctccttttttgttctatctgggcccccagccaattggatagtgcccacccacattgagggtggatcttccccactcagtccactgattcatgcaccagtctcctctggaaacctcacagacacaaccagaagtaatactttccagcttcctaagtattccttaatccaatcaagttgacacctcaaattaattatcacaaccatgaatctgtactcaaatgggtattattagtgttcacttttccaatgagaaagcatagtaagagaagttaggagacttcctcaaggctgtcagttaataagtagtagtgttaaaattgaacccaagtcagtatgaatctaaaccccaagacatttttgttttgttttaccatgtcaacatcttttctcatcagctttgtgttagatgattgaataaaatagtaaatttacatgatgtaggaccaagcaagagatgtaaaacatttgggtttgatgagcttggaaatagtaagccctttaatatttttaataaagacatttacattatataagcaatacttaataaagatatggacagcagttttgaccagagaattgggtctgcagtgggataagagagcagtataaaagttgggataagataatgcaaaaaaaaaagtgagagagagattgaagaggaagagagaagtgagtagttagaagggaggtttcagacagagacctttcctgctcttgagtagcttaagtataattctttcctaaaaggttcaggttcaaatatttatgagacagagttactattccttttagaggcgtgtcaagtgtaaaagaggaggaaaaatttgtttgtgaagggagtttacagtatacttaaagtttattttaaaaataaataggacttgatagggcaataaacaacaggccccatcagtaacctgccaggagcactaacaggaagcatctgtaggctgccaagagccagaaataagaatgaacaattcttaccgtcagagtcacaggacaaagtcacaagtcacaaacaaagtgacaggacaaagtcagagtcacaaacaaagaggatatttgggatgcagcatctctaagccaagttactctctgttatgagcacactcacagttatgtggaatacacccgcacaggtaaaatcacatctgaatcagatgttgctggttccctttgctacgaattccagatgttgttttagcttgaaattatgacacagcacacaaaaatatatggggatctttagagaaatgtaatagcataaagatattaaactttgtatgctgtcagtaattaggaagtatatgtggccaagaagattttatgtgttctctccaaccacttattattttaatatttatatgtattaaatgtacacaggcatgactatttaggtgctcctacaatatgctgggcatgattacaggagctagggatgcagacgtgaagaagagaaacaatctttaccttcatggagcctcatattttactggaagagtaaaatgaggacacaaatgcacaaggtgattaaagattggggcatgtgacctgaatgtaagaaaagaatggtatcatggaaaacctggggaacaaggagtggaactgactgtaggtagtggtcaaggagccctttggggtactaacctttgaggtgagaactaaaaggtaataagcaatcatgcagttgacaaagcatgatatatatttgggcttgcttcaattataggtcagtgcacaagtaattgcagtttttgcagttttaatgataaaaaccacaattacttttgcaccaacctaataataaagactttctttctggagacaaaaatataatagagctaatagagctgggttgtgaagctcaatggattggggatctgagatttgttctgcctgagatctgagatccgagtctctgttttcccacttaatag

SEQ ID NO: 315644 - DNA, 4001 bp, Homo sapiens
aaggaaagagtgggttctttttttttttttaattctacagtcatgaatttttaattgcaatgctgtcttctaaactaagtaatcatttctcagaggcatgttgtaatctcctgatagaactgatccttttgactggacctaagaatcagaagggattgtgtttagccagaatgagtttcagatgcaacacctatgcttctatcctagagcaagccataatttgcaatattgcttagcctcctaagattccattgtagcttttgttgtatagcattgatgaatatgcatatacaggtggcatatgtatttatggatgaatatgtaccttttctcgggtgctgaaactttgacagtcttatctgcacctatgaggatcttaggaactacaaaggctcaactgcgctatatattgtccaatttctcaaacaacaccttatgctgcatttcatattgccaaattaatcaaacttgaagcaccgtccttactcagccagtgatagggaagcattttctacacaagaatccagttaactgtatgcttttctgttaggcagagagggctttggaagatttctttctttcttttccttttcactgtcaaatcatacccttcaaaaatctcaactatacgttgaaaacgtgctagtaacctcccagcctggcttctttattcatgaaaattggttctttattaaaaactgatgttcagaaaacaaaaatatacatcatatgtatgcacataatgcacgctaatttgtggattttagcagagagatgcagtcttggaaggattttaggactataatagacaaatggtgacaactataattaagtgcaaagcaggaaaacattattttcaacagcttggtgctattcatgcctaagtctgtgattcagatggagcattcactttctaattagtttcactgcccactgtttacttttgtatacaacatactttgccttattgttttcagaactattgggataacatacatgcattctcttcagtggaaataaacagcaacacccctcctgtgaaacctaaaatgaatgtatttggggactttttcagaataccctgcaaattacagaaagacaaaacagaggtgactgtggatgtatttactgcttgtgaattgcagttaaaatgtactggaaattcatccaaacttgaaaaaaaaatcctgccacaaccaaaacttaatagtttttcaatgactgctttctcttgctcatttcttcacccatatagatcctaccactcaaaaggattactgtgattttatgcttgcaatatatatttttttaatttaacttttttaaattctcagcattacttccaagcctcctgcatgtcactctcactgcttgctcctttaccaaggggttgtctcaatgttattaagcgtcttccccaaataaagcattcagccttgcacagttctctagatatgcctggatatgtttcagatctgctttctgaatcttaaacccttaaagatgcttcttacctgaaaaatccagccaagagcagagtactctattagtgttcattggaaagatctaacactttttaaaatccatctgtgccacaatttaaaattttttttcaaagagcttcccaacaatcttctttatcaggattaaaaaaaaaaaaatgttactctcttccgatcctatttccacagtaaaaaaaaagacatcgggttcattcagactgtattgtcagaaaaggagccaaggtttgaggggtggaaaccttgtcattttcacctttaaatcatctcctggcgtcacctctgcctgacgagacctttgaagtgatggggagataatgtgcagtttcctgatgagaatcagtttatagttgccgatggaccatccccactccagtgcattcggggcagagtaaggcagcaaaatgtaggagcagggctgctatacggtgctgtaagtagcagtagtctgtttcaatacatccctccgctctaaagtatcacatgtcttaaagtgacattaccctctattacagctacagtgaattgtaatatctgcctactaactcttcaacaactcaagcagcgctttaacattatattgcctgatttattacattagaagtcctactgataccactgatttaacaaaagagtaaagagggaaggagaaacaagaaaaaagcattctgcaaaatactgatagtattagtgggagttagacttctaacagtaaatgggaaagtgaaatataagccatttcttacctcttaatgttctttttaccagtaaattaaccacaaatattgtcaggtttatactaatttaagtctgctggttgtttcagcagttaaatagactagaatttacctggaataggacatagatgcgtatatgcataagtccaataaaaaccttctgaactttttgaacatgtttaataaataaaaatatgttattttcagcatcaaatgaagaaatatgctcacagctcttttttaaaaaatttttcctctccttcaaataacatgctggggtggggagggaaaacactcagaagttcaacatcttcttcctcttactacggtttgaaccctttcttcttcagaaatatagtataattttgcctaaatttcaatgatgaatacaagatgacctagttttcatttatagattgtgctggtaataattctctgaaataccctcagttatttcacaaatcacttataaagcacctactatgtgttaggtgcctgggaacaaagcagaaaacgtgattgatgagatccccactgttatagatgatactgtctaatcttttatggtgttttcaaaatcaaggtagttctcataatattgcttccttggaaacattttgaaattccccagaatactctcttgcctttcagaggcacaataaagaaggtccaatgctgctgcacatctttgcaagtgattctgttttctcatgttacacacagtgagagagttagggatccttcagactcgtcagtcttgccaattggtctttcacattgcacaaaacacacataatagctctttgtaacataacaactgttctctaaatcttacctctaaacagatttctaagtaatagtaaatattaatctcacagttaaaaatgtcaaagttctagttggtgttgcatgtttcacatctgtgcctcattattattgttcatgagtgtgtacagaaagtttacactgactgtacagcatcaagataaaaaaataataacagcagtggcagcaggtaatgtttatcaaaccttcaccagatgctagcacattctatagtatgtcttgtaaagtctaatttaattctttttaccaaccccacaagataagtattattattatctctgtttcacagatggggaatgtgagaggagacaggaagattaaagaacgtgcacaaggttgtgtggtagtaaaagacagagcagatttcaagcccaaatgatttggctcaagagtacattcttaaacactgggataaaatatttaatggaaaaaaaatccaaaaaaataactattatattttcttatttctttaacattaagatagtctcaaaaaatgattattcattctttctagaggtacatattacaccaggcatttgaaatatagaagtatacaagatggcttttgccccgtgattgttgttggttgtggttttgctatgctaatgaattaaaattaaaaggaagttcacctttgctaataaaggctactattttgaaaacctgtaaccattatgtttttcatttctagagattaaaataagggtcaagatagttacttccataattcaatttaatcgaccacctaatggattacattcaaggcattcagataggcattgctgacaattaagaaaaaaatactggaataaagactcgccttaactatcattctaaatgcatgtaatgaagcaagaatattagcatagttctatttttttcttccaaataccttgca

SEQ ID NO: 315645 - DNA, 4001 bp, Homo sapiens
tatgaagaaagcttcttccacaaatgagccatgccaactcactcggtcattttgggaggacacaagtcatcattcgtcataatgattctgaaaactgctctcacactaccttattaaggcctgtatttcccatctagaggaagtgttgggctttcacactgatatgactataaacttagcagaaattcttctcactataaaacccacgcgagctattgaagaattcttcaagtcatacatttgttctcagtgactgagtggtaacactaattatattgcaaaatggctgttcctaaattattttagcctttaaaaaaatccaaggccttcctgaactgggctctgacacaaactgcccccacctcttccctcctcagcgagtgttctagagggggccaaacgaagatgcgtgtgattaggaagctaggccatcagtgtgcacaagtttgggtgaccgagtctgcaggtggcagctacgagttatggtggacaagctttatgccaaggatattagagacagaaacagaccaaagcttcgaaggcgcccatccccacacacggggatcgcctgtcacatcacatcaaccttgcttgtctcagagggaagaccattgaaaagttaaaagggaaaagagttcagggataaagacgttaaaccaaaggggggtccctgaatctcggtgacgggggatgggcaccaggctaggtctcggcgagtccgtgaacccgtgcatgtacatactgcttaggagctgattcacagctttactaaggctccgtggagcccctaaacgttaaatgatgctgattcgagaagaaaacgcaccagcggcactgtgtctggcttgggcagcctcaccaggtgcaggagatcaagctttccagttccaatcctctcccgagctccttgcgtagggtcaaggatgccctctcttctaggagcggattaacagggcaaagtgggaaaaagagcgaaagaaatgtagagatgccaccttggtgggcaaatctgagatgcctcccgcggaaagagacgcaacttccagacccgctccagttctccacttgggcgggaagctttgcgctcccagctggaagacgcctcccgagcgctcgctgcgcccttcaagcaagatcctagcaaccagagcttcagggtgggggtgggggcggggggacgctgaccggctcccacctgcttgctcctagaaagatcctagctcagattaaagggatgaagcgctaaggtcgacttgtccagaaaagagctcacggtgagttcaccaccccctataccaattcatcgagtggcctcctccgcatcagcagagcacccccggggattctgtcagacatgaaccccgaaactggaagcggccgctgcctctctccagccacacatccttacttcggagtgccccttccaacttcgggttgcacgccgacctcagcacaggcactctccccggcgccccagagagccgggatgaggggagctgcaccgagctgagttaactcggtaccagccgagaggcagcggctgcccacgagacagcacctaaatacagggtccaaatccacccccaccccatcctctcgcccctccttatcccttccaacccttcttactcgactagagccggcatccaagtcggaccggcgcgtccggaactaggtactgatcgccgcaccggagcccgaggacgctcaccgtgccgcctccccgcgggagccccgggagcggcccatcacctctgcagcctcgccaggagaagaaaagttcccacgtctctaccaggagaagcccgaagctcctgcgggagaagcctgaagctgctgctggagaagcggcagctgaggcaggactcccgatgtttgcccgcagccgcgcgcgcagtcggtgcgccccgtccagggcggcgcgcagctagcagtgcggagccgagcccagctagcgcgctgaccaggaggggccgggcccgccgcggaacgcgctgattggccgggccgcccggctgctcctgtccctgcctggccccgcggtccacgtgggccggccttctccccgccccgcacccctgctcaggcggcgcgcccccactgccggcctccaggcgcctctcccgagcgcctcgctgtggccaccactccgcaggtgctgagcaaaaggtattcttcctgaatacctgagagtcgcgttgagctccacataaggaagacggatttagggttcggctctcactcgaaaccattctccacgcaggacccaaagcggtttgcaagcaggatttcttagccaccccgtgcagtagcacattcatgaactaatctggcttcgcgtgtaatgtgcttgtatgagagaggagaaaactcggcccacgtatgaatacctaaatacttttcttttttaatgtataaaatacagctggggccgggctcggttgctcacgcctgtaatcccagcactttgggaggctgaggcgggtggatcatgaggtcgggagatcgagaccatcctgactaacacggtgaaaccccgtctctactaaaaatacaaaaattagccaggcgtggtggcgggtgcttgtagtcccagctactcgggaggctgaggcaggagaatggcgtgaaccggggaggcggagcttgcagtgagccgagatcgcaccactgcactccagcctggtcgacagagcgagacttcgtctcaaaaaaaaaaaaaaaaaaaaaaaaaattcagctaagacttctttgactccctcctcccaccccattcctagtcatgccctccactcttccgcaagtgaagtaactgataatcagtgtcacttaatggtattcattttactgggattagttcatctgatctctattttatagatgagataactgaagcacagagaagttaaatcgtttactgaagattacacaggtaactagtaaatccatgctctttagtatgcaaagcatggcgtcgtagagcggtcccttgagaacactttagaactgcagactttcaggccccaccccagaagtagaatcttcattttaacaagatgcccaagtggctggtgcatgcataaagttagaaaacgttgctctgtaccactatgctgctcactgtcattggcttggcttatcatcttctggtccttttactctgcattgacatacaattatgtgccatcctgcccctgctgcactccaaagtatgttcacccttctctgactctaccccttgaactaacgtatggcaggccttctgcttctgttccccgtaccacacataccatagcacattttacttgttaaacagtttcaatctcttactctcttattattaaaatgggggttctacattcaaaggcaatttgttatcaagatgtcaccagtttaagagagaattcaagctttggagataggcgcttgatctttgagatttcctttaaagactagcattgaagttctgtgacggccaaaggggagatccaagcaaaacctgaaatagcatgccaggagattccagagctctttctcaacagcattcattcattcattcactcactcagcaaaactgagggcctactctgtgtcaggcgctgtaacaagtgctggtacatagagaaggaaacacaacagtgaaaagttcctgagttcatggaacttatcttctagtagggagagatgggcaattaacatgacaaataagtgaattacagagtttgatagaaagtggtcagtgttatagagagaaagaaagtaacagaaaagaaggtgagtactggggagatggtggttttaagaacagtagttaggctagttcccactgagaaggtaatatctgaaccaagacttggaagaagtgagggagcaagtcatttagaagaacaagtccacattcatttgttcaccagatattcgttgcttccacactgtgtgacaaacatggttctggcaaagatctgcgtgtttacttaagccctgttttccatgtctccaat

SEQ ID NO: 315646 - DNA, 4001 bp, Homo sapiens
cacggtttgtccatattcttaggcacttaaaccttaaaaatagatttcaaacggcttttatcaagctgtgaagaaaaaaaatagttccacctcctacctcataaccagagcccatttgaatgtacttcctacctattctctaccaattgattacactgggaacttttctcatacagactataatcatacatctcaaattttaactaaatacacgaaaagaactgagttttgacctttaaaagtatctttctgaaccctaaaattacattaactcaaaagatatttctagaaacattcctcatgctaatttccaaaggttaacttcatctttgtcaacatggtttctcacaccaagtattttcttggctttgccatccaaacaaatgaactttatttgtatttttccaataaaaggctcaaacaattccagtagtgcaaatggaactggtgatgcttatggaaagtcagtataatgctacagccaagactctgtaccagatggatggaaaagatacgggaaaaaaacaaatcctatttttttccaaagtaaataatgaaaacctaaccatacagtagggcaaaaaggaagttgtctaaattcagaatatccaaaatttactggatagttaaaaaataataccccaataacaaaaaacgatactaattttgacctccattaggaattctgactccatattaacaatatggcattaagattttttaaaagtacaagtaattaatgtaactgtttccatatgggttccaaaaactaagactggacttttttttaacctgaagttctaccatctagaagaccaagttggtgactcttgagaataaggtaacttctcattagtttttttccattgggaaattactgctccaagaacctacctttccattcttttcaaatataagaaaaacaatactaagttcgaatttaaagagagaaaaacctatttaatctaacgcttcaaaaacaagggggaaaaatctacatggaaatgaagtgtgatggaaaacagcagtgtgcatggatcacatctactaatagagatttctaaataagggaggacgctgacatcaagcacatttcaagtagacacacagaactgaagaatttccacggggagaagcactcatggtcctcagaacattggcaatggccttggagaaagccccagaatccatggccacgggctatttccatagcgagacttctcagaagcatccttaggaggacacaacggcttctctgctttcaggggctgggagggaggggcgccgagcaccatctttcctctctgggagctgcagccttacggacaagcttcaaacctgagctacttccaacttccgcggggaggggcagcaggggagcgtggttccaccgctttctctcgcaccaaacgcggcagctgggcggccgtggcggtgaggggagaggcggccggcgctgcatgcgtgtttacgtatctcggatgggtgtgggaagaggagatagaaagattctaatgaaaagatggaggggagagagagagggggttgagaagaaggggaggcaccacctttcttttctctgctcttcctggggatctgaaaactcctcctaacaggcctttcgggctcttcggggcctctgggcagggcggccgcgcccgcctcagaggagtcctgaggctgctcgtggctgaggctctgggcggcctcggcccccgcgttctcctcacgcccagcgccgccgctgggctcagcgatgttgaggccgccgccgccgccattttgttgggaggactcaagctccggaagcgcctgcttcatctcgtcgtctccgccgccgccactttcccaactcgcatccgtcggctgacaggcctccgtctccacagcagtcgccatcgcgccggcctaaggagctctgggaagcttctgcccacaaggtcgacgggtgtggggggaaggggcggcgggccagtctcgccgccgagctgctctcagcccacccacccccttccccccgtggcctcaggctgcgctcccgacctggcagcctcttggggggccctgtagcgggcaccccaaatgcgctgcccggtcctcggagccgctcctccctcgggcagttcttctgccttcccccgccactcaacgtgcgcgcgtcggggccgggagggggcggggccaccgcgggccactccaccaatgggagcgcggcacccgcctgcgcgagtgcggaaataccgcgccggggggcggagtttcggggcgcccgagcccgccaaaaggggcgaccgcaacgccccgcgaggacctcgacgccgcagccgtggcctgcggaatgcgtgggcccctggcgatcttcgggttcccggggattcccccgccgcgctgcaggcgagggagactagcttggcctcttctccggagcgcaggcgtcgcccatttgtgggcaaaacccttcctctgcgcacgagttatctcggcccaaacgggcttcagagcagtggatgcgggacgatctcggttttatgaactatttgcatgtgtacaaaaacctggagaggagataaaagaatgggctaggcggtaatagcctaaaagcctcgacagcctttgcgacctgctattctcaccggatcttgtatctttatgatagattactcgcacccggccttctcttttatctcagagagtgtgacccagtgtcacagctccagcaagcactttcacctgagatcctctgatgggacttaacaacctagtgttaacaggatttggttctggggagtttgaggggaggaggctgttaacttttcccatttttttcctttagtcgcacccccccccaccacacgccatggagaccgcacctggcctccatttgttccctttctatggttacttctgttaaaaatctggccactgataaacctctaactccactgtttcttccactggaacgttcatcaacgttttcctatagtaaatgtatattaaagaaaaaataaacttgcggtcacattaaaaaatacacagcaggtcgtcgctctcccataaagggaacaacttcatagttaagagccctttacatagtggtttctaccttatcagtataaactatcacgggttatcgtgagtacagccaatatttactgagtgctttctacgtgctagacacggactggacaagtgatttacgtgcattgtctccatttaatcctcacagcaacagacatgaggtagatactagtttgcagaatttgaaagaagcgttgcaagacactggacaaattatggtaaccgaagatttgaaaccgggtctatttaactctccgagtaagtacttaagcactgcactgactgcttctctaagacctaattttcacagcagctgtgcacttttattcattttatggacgaagcaacagagggctgacattttgttgagggtcgccaagcagcaggatcaggtttgagacccagatctctagtctcaaactgtctcccaaggagtttacagaccaaattatcatcataataaagccccaggcttaaagagcattcctaagggcaacacgaaagttggattcttttgtcctctaataaacattaccactgtttaacagctgatattaaaaaaaaatcatgaattgcccaacctattcgaaacaatttagtaaatcatacgaaagagagtgtaaatccattattagtaaatagtttaaaaacacattttaggccaggcgcagtggctcacgcccataatcccagcattttgggaggccgaggcgggcagatcacctgaggtcaggggttggagaccagtctggccaacatggtgaaaccccatctctactaaaaatacaaaaattagccgggcatggtagcacatgcctgtaatcccagctactcaggaggctgaggcttgagaattgcttgaacccgggaggcagaggttgcactgacctgagatggcaccattgcactccaccctgggctga

SEQ ID NO: 315647 - DNA, 4001 bp, Homo sapiens
ttgaacccgggaggcgaaggttgcagcgagccgagattgcaccactgcactctagactgagtgacaagagcgaaactccgtctcaaaaaaaaaaaaaaaagataaagttttataccgtaaatgtactgactagcctatcctcaaatcaagacagagacgtagaggactcatattgccaaatcacgtaatttcaaatcaaccatttaaaaaacaaaccaacatttatattgaagttcttatgaaccaaaataaaatttaaatatgaaaaagaaataaggaaaaaggctcaagaaagtgataaaattagcaaccacgaactgctctttacttatacttacagtttgataggcaaaaaagcacgagtggctgacctcagagaaatataacacaaaagttttcctttatttaaaagctgtcctttccacaaggtatagttatatttatctaaataaaaagaatataatgacacagcttagtcacttggcagcccagagaagtgagtgcacatttattagaaatgagacggaaaatatctagaaacaaggtttaagtaggagggcaaaaaaaaaaaaacagtgactcttctacacttctatttactaacagttcaaatattaggatttttgtttcaggtatttatcccctacaaaatcattccagttgcaaagaataacaaatgtatctgtctaaatgtcattatcagaaaagttggggagcaaagacaagataattattcatctcttatttcctccaaagggacactgtatgaaatctggttgattatatgaatgcctacagtgtcctgtatcttctactcattgtgttttcattataaagaaactttaaaataggctgggcatggtggctcacacctgtaaccccagcactttgggaggccgaggcgggtggatcacttaaggttaggagttcgagaccagcctggccaacttggtgaaaccccaactctactaaaaatacaaaaaattagccgggtgtggtggtgggcgcctgtaatcctagctactcaggagaaggctgaggctggagaatcgctggaacccaggaggcagaggttgcagtgagccgagatcacgccactgcaccccagcctgggcgagagtaagactctgtctcagaaaagaaaaaaaaacaaagaaactttaaaatagtttaatgtcaatgctactttcaatcttctctaattctaagtcctacacctctggtgaatttaatacttttaaaaagctgagttatgaaacctgttttattttttatctttttctattaaagtgctaaaacctttcagtctattcacagtagcagattttcaaaggagatcttatgcttggacaaccaaatgcgctgatgctacattataacttttcatactttgcagattttcattcattataaaaataatacaaagcacttaatcttttgctatatgtacttattctttccatttataaaactaaagaaacataaatctcttacctatgtttctatctgtattaaagctgttagatctacaaattttttaaaagaaaagaaaaacattactcattagtataatcataaaaattaacatgtaagatgatataagtgcaatttttaatggcatactacagttaagtccttcctccaggtaggaagaacaaagaaattactcattacaaagtctagtaaatccaagtctacttagagaaaacagaagtacttacttcgctcaaattaccacatttacccaaatttaagggagttgttttttccaaaaatattaaccaagagagaacagtgtccaccaaagtctcttgtcaattattttgctgacattagaagacacagcctcaatatataaatatattaattcatcattcagtaaatacatactaagctcttatttaccaggcacagttctaggtaataggattatagagataaacagaacaaagttccaacctacataaatctaatgaggaagacagaaaacaatgatatataacagatcatgatggttttcagtgctataaaaagagacataagagtatagaggtaaaaaaaaaaaacagagaaacctcaatcataaggaaatacgtgaagaaatgtagaatgaattatgcagcttactggggaaagtgagagaacagcaaatgcagaggccctgaagcaggagcattcatggaatattcaaggtacaaggatggatgttcactcaatgctcctttgaaatgatatagaggtcaagagatggaatcaaagaggaggcaaagaaattaacagtcattattcctgggggcatgacctcataattttaagtgctggatgtcttttaaagagtacttatgaaaacactgtagtgaaagtatgtatcacagtgatcataaatttagagccacaaaaaatgaaagccacaactgtctggatactatgtcaattggtacctgtggctatagatggtttccaaggattattcacctacataaaaggaccgtaaatggaagagaagataatttgatctggaaaactgacaaagaggtcaacctcaaaaatgtacatatatgtttcatgatatatggttttagaacagcagtatttctaaattaatagatatcatacatgacttcaaatatgtatacacacccaaagtaaaaaatgagcagacatttgaccatctcacctacatccctataaatatacttattccatttggctaaagcatttttagaatcaacacatggggaaaaaaaatggtaactgcttcctatttggtcaccttatactagagcttttaagaaatactcagtaacacaagaacagaaaaccaaaaaaaaggaaagaaatcatcaggccaagtgtggcagctcatgcctataatcctagtgctctggaataccaaggcaggagaactgcttgaggccaggagtttgagaccagcctggccaacacagcaagacccatttccatgaaaactaaaaataaaccagacatgatggtgcatgcctgtagtcccagctacttgggaggatcgcttgcacacaggggtttgaggctgcagcaagctatgactgcaccgctttactcactacagcctgggcaacagagcaagactttgtctctaaagaggaaaaaaaaagaaacagagggtcctcaacactggctgaaaatcagaatcacctggaagcttttaaaaactatcaatgccttgactgcccactaaatatttgattggtttgtggtgaggcatgagcatcctttgtagaagctccccatttccaagggtgctaatacacaaaatctcacttttttgttgttgttgttgtttaaatacagacgaagtcttgctctgtcacccaggctgtagtgcagtggtgcgatcacagctcactgccaacctccaccgcccaggttcaagcgattctcttgcttcagcctcccaagtagctaggactacaggcacgtaccaccacatccagctaatttttttgtagttttagtagagacacagtttcaccatgttggccaggctgttcttgaactcctgacctcaggtgatccacccacctcgtcctcccaaagtgctggaattacaggcatgagccactgcgcctggccaaaatctcactttttaaaactgccacttactggccaggtgcggtggctgacgcctgtaatcccagcactttgggaggtcgaggcagtaagatcccgaggtcaggagatcaagaccatcctgggtaacacagtgaaaccccgtctctactaaaaatacaaaaaaattagccaggcatggtggtatgtgcctgtagtcccagctactcgggaggctgaggcagaatggcgtgaacccgggaggcggagcttgcagtgagccgagatcctgccaatgcactccagcctgggggacagagagagactccatctcaaaacaaacaaaacctgccacttactcaactacacaaaccttcatttctaaggaagagattagcgagatgaggtttaaa

SEQ ID NO: 315648 - DNA, 4001 bp, Homo sapiens
cattgtaagcccacagtaggcactcaataaatgcttgttaaaggaaggcattgcagagaggatggacgatagaaaacagtgcactaatgcacacgggtgtgacatgggcatgacagggaccttcacacagagaaaaaaagctcttcagaagatttgtctccctgggcagtgcctcacagggctggggctgcctcttagtgcctcaggggtatggagccaggacagtctagaaaaaaggcttttattgtcccaggctggagggcagggtcagaggtagctgacatcattgcagatgatgggctggcggctacgacagctcatgagagctgcaaagcgtgagacatccgcaggcagttcaggttctgggcgaggtgggcatgacagccgctttcctgccatagctgtccgccgagccctggccagccggcgccgaagctgctcagagaggccaagcaggaactgagggggccgagcacgggcacggtgcccacctccgtcacccccttcactccctgtctcaggcagctccatccagttgtgcaccaagtcagcaaagcaattgtcccctagtaccaggggctggcgactgcgacccctgttcagtagggctgctgtccagtcctctgcttccagtccctgccagtgctccaggcaggcgtctggggtggacttgggccgtggatggtggacaggtggtacactggctacaggggccctgctgggcatggggaggccactgactgagaggcactgcctacgaaggggctgtgctgagggtgctgggcgctgggatacaggcagttcttcctctcgccatgtgctgcctgacacctccgagaagccagagtcccagtccagggcatgctccctggggcctcccaaggctgcatccctgtcttctgtcaccactgcttcctcctcctcctcttcctcctcctccacacagcagactgagtcctcttccaaggcacccgaggccctaagctggtggctgggctgcacatctgggccagtttgggaggttggctgcaggggaccaggcattgagggtgagcctgtgtcccgaccacacaactgaggggaagagagggcagaagtcggagaggtatcacttgtcaccaggccagcccagagaacagagggtccaggaaggttagataggcctgctggcctgggcagcagggtgttagtgagcacagggcaggcataggggtgctggcactcgaagctggtgtggttctcatccaccgacctggtggcagtctggcaggctgcagcatgcagggccgggcaagtcggcacccgccaccagggcgggcgggcaggcaggcagggttgcgggcctgaacggggaagtaggtcctgcccaggactggaggggcatcccgtgcctattgggggattcagctcccaaagcccaaagcgtctttcacagaaagagcgcttgctaggtgaggggtagagaagggaggcataggccagcctgaagtagggggcgttcacagcagcgccagcacctcgttagtcccttgccgccccatgccccgcccccaaagaagtcccccttccactctctcctcccgcgccgttccagcagcacggccagctggatgctgttatctgatgctcagctcagttcccaaccgtccgaaacccgacgcgggccatctgagccatatgcgccacgccgcccccaccccgcctcggaccggcacgctggagccaccccgcacccgtctgttgttccggccgggcggcagcctggcatcccgcacgcgtcctcactaaccacacccgctcccgagcctcaccagttcccagcggagctggctaaggaagctgtcaagccgagcgctgtgcatgtccatgccagggcccccaccgaacctactagctcctcttggaaccccggcggagccgcgcggagagggctgggagggccggccagcggcgccctcagcctccgcctgcctgcgcgactcctcgctctccgtagctcccgccgccgccgccccgacatctggcagccgcgccccgccccggccccgcggccaaagggggcggggctaaagcccggcgtccctcccgactccgccgcggttctgggtgggaagggcggggtcataactggaagccggacggggccggtacggggaccccccgagcccccagactgttgagtggaccctgcgtttgctgcgtgacgcaggacaggtcgcctccgtgcgggggcctcatcctccccgtttgttcaatggtgaaatagcggtccctctcacggggcgccgtgctgcgtccgcacataggcagagcaccccggatggtcggacccagagaggttgtggaccctcggggcctgacccacgggacccattcgtgaggctggccttggcactccctgaacgggatggaagtggggttcagcccgtctgaggactcaagagagggcgggactttgtggcagcgcaccggcggggcctcagccgcgtcccaaccgagctagacgggactgccctctagtggggagtgcttggctagtcgcgagtccagcggcgacgcgcgaccgtcggcattccctttgccggtaccaggtgcagactgagggtcggtgctgaggctgctctatcaacacaggctaggctcaagggtagtgtagctgcagacagactggacataccagcaacaggaaaataccagggaatgagggccgtgggctagcttggggaaagtcagtctcacaggaggtgacatcaagatgcaatcaagaagaggggcattctggccgggcgcggtggctcacgcctgtaatcccagcagtttgggaggccgaggcgggcggatcacgaggtcaggagatcgagaccatcctggctaacatggtgaaaccccgtctctactaaaaatacaaaaaaaattagccgggcgtggtggcgggcgcctgtagtcccagctactcctgaggctgaggcaggagaatggcgtgaacccgggaggcggagcttgcagtgagcggagatcgcgccactgcactccagcctgggcgacagagtgagactccgtctcaaaaaaaaaagaaaggaagaagaagcaggaggaggagaaggagaagaaggagaaggagaagaaggagaagaagaacattctaggcagaaggagcagccagggaagagaccccgacggacaggagctggacagggccaaacataaagaaggcccaggtgtctgtgattggtggtggtggcaggagggaaaaggtcagcaaaaccaggctctaacggccttagagcagaatgtgggttttgttcttggtgtgatgaggagcaatgggggcctttgagcaggaatgacctgggctagcccttgtttagataatcccagctgctttcagaaaaggattctgcaataagagtggaagtccctgccctcatccaggcaacgaaggggagggcctaggcctgggcagggcaggtgcactgaagggggtcactttggggtatgttttggaactaaaatcaagtcttgctgatgcatggatgtgggcaggaaaagaggcatcaagcatgactcctacatttctggcattaacagctggttggatgaaattgccataaactgatctgggaaagactggagaagagtgggtttggagaggaaaatccaatgatcatttatggacacgtaacccttgagatgcctgttagacatccaagaggagttgcagagtcagctgctaggtgtatgactctggacttcaggagagagatcagcactggagccttggatctgggaggcatagtgagtgaatggatggtatgtaaggccataggcctggataaggtggggtgggaggaaatcagtgtagtcagagggagacagcaatcgggactgtgccctgggacattccatgaggtggaggtaggggagatatgaagcagagctatcaaagaagctgagcaggaacagccaggagaaatctgagaatgtggggactcaggacccaa

SEQ ID NO: 315649 - DNA, 4001 bp, Homo sapiens
gccctctgggactgcaggctgggtgggggctgccagtcccccaggcaggcttgtcggctgcccacttgaagtctcaccaggactgccagtagtagacaggtaggtctcctccaagggggagcagctgccccagcaccaggaaatgttggcaaatgatgacttcgagcatcccccaccgcagggaagtgccaatgaggaagttaggcccctgggttctggaggcttcaacattcctatgggaagcagcagggtctgtgtgtaaagatggagttgagctcaggaagaggtgtgcacaccatggccataagacagaagcccctaaacctccaggtgcccaagggcagacaggcagatgcacagatttgggcagatgctgagcaatggcaaactcctccctagcctgtgcagacctgggcgcaacaacctcactgacttcaccttccaccaccagctactacccctttcctgcttgagctgctctgccctcctctttctttcctcctgttcccccttctcagagattctccactgacccaatcttttcctcccctgcccttcactcctgaaggacccggcattctcttgggagaagtctgccctgactcccaggctatctccatggtgtatgtcaaactgttttgaaaatgactatctgtgcaagttttccctttctggttagaaccatgtatgatacctcatcttgttaatcattgtgtcttttttacctgacccaattaatgctcactggatgaatcatctagaaggacactcttgtacccaggcagcccacttccagccatggactcagaatccactgcagtgtagagtcagtgtggcatagtgggcaggagcaaaagctttgcagccagattgcctggggaagttattaaatctctcactgccttggctctccgtctgcagagtgggaataatcatggtgctttccttgtagaggtgataggaagattaaatgtgttattatatggagagcacttagcacatcatacatgttattttatgtacttcagtgatgattatcatagttgcgtagacaatgagaacttcagcgattgatgggggatattcagactctctctcccattttacagatgaggaaactgagtcttagtgaaagggactagctcaatattacatagctagaaaatctctcaagtccatgcacctttgtcataacttttcagatcattaccttatgagaaaaatgagatttggggccaaagaacaacattcctttcttttttattcatttttcaaatatttgtgtggctcactgttgatcattggaatgtgtttttttgaatcaatagatgagtgaatgaaagaataaatgttgaggggcccctgtggttaaggaaaaaaccctgcagtgtgggttatcaaatccctagctggcatgccctacagctccttcttgtgcccatggcagacatagctaatcaatcatagcatgcttttgcctgagcccgaacccagccccagaatcctttttatcacagtctaatttcattgatcaggcctggtgcctcagatgaaatctatttgccttcctgagtctgatctcaggaatctcttcgattatgtggtttccttctttctttcctttcatcattctgtctcaggctctttcactcctatttcccaccctccccacctccattttcccctctgtcaatcatgtgtacctggaaccatagccctttccattcttggggggacgtacccgagggctcgaggctcccacttccctgcttcgatggagaaggcgaggtggtccagcaggtgccgtaggtccctgacccagctgaccaccaccctgggccagcttctgacagtcccacctcccagttgctggaggggtagtggcctcacagacggccctcctctagatgcagtgggcccagagggtgagacggagtgttgcgggccgccagtgggccagctgctcctgccctgcgcaggctctgcccctcctttgaggaagtttgccatcaactctccctgccctgttaaacaatctcacaaggaaggaggaagtttattctaagtgctcacggggcaggaaatgagtctaaagtcttgcctggctgaggagtggcttagggcctggctggggcctggggagaagggccatgcctgttcccttcctgtagagctatcctgaccttggcaagggaggtttgggtgggaattcaagcaacttaatcaggaatgagataccacaatctgccttcgaaaacagccaaaaaaccttacaaaaaacccgaccctgtgctaacaacctccccaggcgctgggaggtgtggggctggtagagcgagtaactgcagctgatgatcacctgctttgaggttctggactagagtgtgggggggtgctggaggggctgactggaaagaggggaacccaggcaagaaactcaggacaggaaagatggaggaggtcaaaggcaactgcaagatattgagcttggatgatggaaaagggaggcttcttggtcaagagtgaggaagatgggggagaggaagtggtttgggaaaagattctggatttgggtggggcatattgaattagaggttaaaggtggagggggtggggtgtggagaaagggaaagacggagaaagaaaagaagggctgctcagtggcagacttttagtgaaatggtgaatgcagcctttgtctcccttctctctccttaggacccaaggtgcactgagaggggctcagcttccccctcccctgatccagcactcccagtctttgtcacaaatcatggtctctttcccaagcgctttcctcttaggaggagttcttgcctcggtccttggcacacaggctcctggcaacttcctcccttgtttgctgactctgaatgcttccgtaggctgtgtggcccacttggaaggaatattcaggggcatgaggtccagcagctggtcaggaaatgaagatgcatgcccagggagctggtgcaagggaagagcagggagcggaccctgtgtgatgaggtgccgggagtggccccagttctgctgttccagctgcccatccccaggtaggcacgtgggccccctcaggatgtatcccagggcgaggcagtgctttccttcactctgactggctttaggactggtcctgtcctctgtcccatctccttgcctcttgctctcccttattctgctaggacggttctgcccataactggtgcctgggtcttgttcagacctgacctgcagtgtcacttcctcaggggggccctcctgaccctcacttccaatataaataagcacacaagtgtaggggagtaaaaatggctttctctacccttctagctgccttggctggtcaggaattaaactgacagcagggagaataacaggagaaaaggtacagacatttatcacatgcatgggggcatcccaggaaagaaaaggaattccccacacccagtaagatttagaagcttgtataccctcttcacaagggagagaggggtggggtgtcagcaccgtagtggagagtaaatgatttctggggaagaggagtgggccctcagcaggacaggtgacgacagcctgtgacaaaggctatctggacgtagtgtggacctttagactcctgtgaaacgagccagtccttccggctgatgagattccctgggcggagattcatggccactgcgtttgctctggacaatctgtctttagacagaaaaggaaaactcggaaagcccctccctgcagttgctgttccccaagtgacctcagttcaaagtctcaaagtggcatattttggggagttacttcggaactccttcacaagcaaatcatttaaaattgagacattctgtgaaagaacccatgaaagtgattccaggagaactttcctcagcaggtggtcagggaaggcctctctgaggaggggtgctttgaggagctgcagtaacaaacaaacacagaccagcagcttcataacacagctg

SEQ ID NO: 315650 - DNA, 4001 bp, Homo sapiens
agttgcgacagctcagccttcatgtcggaggcgctgcccagcagcagaggcggcggcccggcccccgggcccagggagcccccgccgcctcctagcgcctccccacggccattctccagagtatccaacaagtccccgcactcaaagtgcatggcgaccactagcgcacgctgcgcctcggcctcctcctctgctggatctccctctgccgcacggttctcctcctcctccgggcagccctcgggttgctcctcttcctcttcctcctgcagctcctgctccagctgttcgccgagcaggtcctcggtgatggagccaagcttgggcgcgctgcggctgcgctccaccggcggtttatagcagcagggtccgtgtaggagcagcttgcgcagcggcactagcgggatggtgtgtgcgcccaccagctcctgctgctggtgacgcgcgtcgtcccgccgcttgaggcgtttaaattccgccagcgcgttggccgacgtctggtagagcagcagggccatggcctgcgccttttcgggcttggacaccagcacggcgtggcagcgcagcatcacggccttgtgcttcagctcgtgccggtacacccaggcgaagaccttgggcagccgcgcgtcggccacgcagtaggtgacgcggtgcagcaggtagaggtggcccgggcggcgcagcgcgcgctcctcggcgtgcaccatgcggataccctgcgcactcaccgtcagcttcatcttggtgccctgacggcccgcctcgctcttgctccagatcttgcccacagcaaggtcggtgcagccgtcgccgcgcgcctggatggtggtggcattgcccaggtagagcacggtgtaagttgggtcctcgctagtgatgtgcagcttcttgcgcttggagcggaacatgctgcccacccggctaagcgcgccttcggggcacgcccgcgccagcgagctgagcgccgagtagtgcaggctcacagcgtagcccttgggcttggacgcctgccgcggcggcgcctcggccagcagctcgaacttgtgcttcttccacggcagcatctccggagggcgccccggcgcagctgggcggcggcggcggcggagcgccgggtgcgaggcccgctgagccaccggcccctgccaggctcggcccgggcaagatcgaagaataaaactactgggagcggccctgtggtagggagttggggggaggggagcagagagagtgcttaggaaccccgcaggaggtgcgggtaaattctctaaaaaagaaaatattcagcttcgagtgtgcaaaaaaggttggtgcgggggagacacgcgcgcacacagaattaccccagcctgggcaagggcgagagcaaagagtctcaggcaagcaacaaaatgcaagggagaaagaacgagcgtagagtggaaaatgtcaggaaaaaagctagaagcgcgcgtgcaaataaagagagccccagcaacagcacccgggatggtgcaagaatatgcaggaactcctcggcgaacgtgaggtgggtcccctaacacacacaaccctcaggactggggccaaaacccgcggaaactctacagcgagtgtgcctaggggccggtgctccccacctccgaggggtgctggagatggaaagccccccgtttgggctggtctcaagtcagcagctcgcccaaagtgcggtcggatgctgggtccggctggccgcggcgggccccgcgcagcagtcccgcggggactcactgcatcttcgctccgccggacgccggggactcgcgctcggcccgctcagtgtccgggctggcctggccgagacggcgctgggctccgagaacaggggacgggcatggccgggtccgggaaccgccgctacctcatttcttccctccgaggcggtgtccagctccgctcccgggctctccacggtctgctgcccgcctttgcagtgcgccctctccggtgctgcgagcggcgtccggctcgcctgcctcacatccttgccgtccgggaggaagatctcgggtaaatataggccggcgcgaaccattcgccgcgcggggacaggggaggagcagagaagaggatctgttttgggctccgactccgggcggattcctggtttcttaaagggaccgcgtgacagccattggtcgagggagcggggagaccggtccaatcctccaattacatcccaaatttaccagcatctcttttgtctatggaaatcactgggacctggggttaccccgcagcaaaaagatttgaatcctgacactccaccccccaggctgaattgccactcactgaatacatgtatgtctagatcgaaacttctgagggaggtggcagaagatgagattacagattataatttcctgtacaaaaagtttgggaaaatagtggtttcttccttgtgtgacggctttctgagaatgactgggtgctgtttaatattattttcagaattgtattccattaaagaaaagagagaggcacagaaaacaccaaggcttatctctcactatcttgagctcgtattcacaggtaagcagcagacagtgtaaagtgaggtgagtggtaacatgattggggtgactactgtagaataccgtcaatgaataaggcttttccccgtccgaaccccggcaagaccccctcctgctgtcaggcctcagggtagagcagttttctgagatacacacaatttctaatgctcgtgtgtcgttaggacttagtttactttggcaagccggtcatgcggtttcattctatcattgacatattttggatgagaattcctagtaaaaattcaaatgacgttttttatttaagtgacaaataatgccaggccaccctccaatgggagtgataattgcatcagtattgcttttatcatgtgccaactggacagtgtagttgtcttctgaccggcttgacccttagccagtaactcatttctgggcccttgaaacagcctgcttgcctctatggtatggtcagtcaaagcaaaaagacgtatggctggagtgggatcaatgtccgaatgatcctgcatcaaactcccagcctggtcctggaggaggacagtgatcccttcccaccatcccagtcccctggggatctttgatgtctctggcttccacgccaggtcttcatgccagagtcactgcaaccatacctggaaattcccttgggatattccaacaaaataaaactgacccctgcccaccctctacctttgccaacttttaaccttcctttgaaatctaactcaattttctcagagtcgttgatgctgagtttccatttaagttactttgctgagtttccatttaagttacttttctgactaccttttggtgcccggccctgagctaggagcagacgggattcctgcctcctagtccaatgaaggttgtaaactctacccaactctgggtttccactggactgtgggttctctgcaagtaccctgtatccccaatatggtacaaataggcactcagtaactagaattaatgagcaagatatgcatgtggacaagaagacagagtgggctaaatgctatgagaaagactcaaagcactatgagaagctggaggaagaaagcattcattgtgactaggaaaatcagaaaaggcttcatggaggtggtgacctttgaaagataaacagaatttatccaaataggaaaagactgaagggctttatgggtatagagggtagcaaaattacagaagcatgaaaatgcatgcataaggccaggcgcggtggctcacgcctgtaatcccagcattttgggaggctgaggcgggtggatcacttgaggtcaggagttcaagaccagcctggccaacatggcaaaactctatctctactaaaaatacaaaaattagctgggcatggtggtgcacgcctgtaattccagctacttgggaagttgaggcaggagaatcccttgaacccgggaggcggaggttgcagtaagc

SEQ ID NO: 315651 - DNA, 4001 bp, Homo sapiens
tacctctttaggcagactacttcgctgttgctgaaggataaaacccatcactctccatctgagattcaagaccctccattatctatccccaacgtacctgtcctttaattcatgatttcaatactatatgttagggactgtgctaggtgctggggttacaactgtgaactagacagacatgatccctgtcctcagggaatttacagtatggtaacaaatagccttaatgtactgaactacagttatgtaagtgctataaaagtacaggttctatgagggcttactaggaaatttagtctagttgctagtaagggtggtaaagagaagcaaggaccatttcttagggacaatctccttgaatttttttttttttttttttagtagagacagggtttcaccatgtcggctaggctggtctcaaactcctgacctcaagtgatccacccacctcggcctcccaaagtgctgggattacaggtgtgagccgcccggcctaaagaagtgattttttttttttttttttttgagacggagtctcactctgtcacccaggctggagtgcagtggtgcagcctcggctcactgcaagctccacctcccgggttcacaccattctcctgcctcagcttcccaagtagctgggactacaggcgcccgccaccacgcccggctaattttttgtatttttagtagagacggggtttcaccgtgttacccaggatagtcttgatctcataacctcataatccgcccgcctcggactcccaaagtgctgggattacaggcgtgagccaaccgcgcccggcctgaagaagtgatttttaggcagggacttgagggctgaaacagcagttagccagtagaaggggtaggagaagaggagtccaggcaaatagatactcatactgaaacaaggagatgtggagttagaaatcagacagcagaggtgggggaagtgcctgaatcacatgaccttttaatcttgtaaatcagaaccttcgtggtctcagtgcctttgcacaaaggtgttcttttcatctgaagtgctcttatttgcctggaaattcctactcagatctaaacattcaatcgaatgtcatcttccttgaaaagtgttcctcctatccctaagggagtttgctactgcagcttccctgctccacagggtatacctaggggcccttacctcacactagactggggctctttgagagcaggaacccagtctcacttactcaatgtccctaatgcccagcatagttaccggcataaggaaaatttctgagaatattcagagtgaaaaaagctcgcagtgcaggggaaatgctaaaagctaacaagaactgtttcaagtgctttatatttaataattcatttatttcccacaaaactttttgaggtgggtaccattattctcatcatcacgggcagaactgggattctaactcggagtctggcttcagcacctgcgctcttcaccacctatacttactcttgatgattataatgacttctaataatggttaacatttacgaggtaccgggccctgtgctaaactttttatttatcgccgcttcggttaatacggataaccattatcagccatcttgcagatggaaaaactaagtcttgtcagcacgtccggcttccaggcacccgcctttaacacgtgcgataccatctggcttccagaaaagcccaacagaagtgagatgaggccgactgcctggattagttcatcgggaagcgggtgagggtaaaagcctttctcgtttccgcattttaatgacgcagaaaggtacctgtggggattatcccatctcagggcagatgaggaagccaaggttcggggcgcggagccccagaggagaacgccgaccgcggcccggacttagagattaggccgcaggggagcggggcctcgagagactacgaccattgctccacttactcaccgagaagccgtcgccgcccgtagttttcgactttcccgccaggcccgacgccgctctgacgccaccgaggcgcgccatgacgtgacgccaacttccgcgccggaagtggaaggccgggcagcccagctgaaggcaataagctgggctcaccgctgcagcagagttctgtgctagccgggcataggggcgagagaaggcccagaggcgacgtcagagagaagcaactgcgccccggtgaagagaagctcgcccatcaccggctgggagccagctttcagtgaagatggcagggccagaactgttgcttgactccaacatctgcctctgggtggtcctacccatcgttatcactcttcgtagacatgatccgccactacgtgtccatcctgctggagagcgacaagaagctcacccaggaacaagtatctgacaggtcagcgccctcccttccccagcctacctcacaccgccgtgaccttggacaagaaagtgcaggcgttgtgtcagtttgcctaggttcacgtctcgcccccactggcaaggtgaccttacccgttacctctgtgtttcacttttgtcctctgtgaaatggggataataacagtacctccctcatagacaggtgggaatcaaattagatgatgtctgtaaatcccttagcacaggatctaggacgtattgagtgttaaaaacaaaaaacaaaaacggtgctgttaatcctttaggttagtcgccaaccctcggtgggtttacctatgaactatcccatcccaccctttcgttgggaagagtgcctggtgctttatagcttttagtatttgtaacatccagtcaagtgagtgtgataatctgcattctaccaaattactgttccaatggttagctgagatgctaagcaccaaagcgctttgcaatctgtaacactgctgttagacatgtaaggaattgtaattatcatttcccttcctagggtggaggcaacttcctcacatacttcattgcagtatttatttatttatttaatttaacttaatttaatttttgagacggagtttcgctcttgttgcactagattaagtatctattatttttccgtttgcatattttatcacttgaacagaaactctgagcgcagggtcatgaccttgccttactctataccccatagcatgcagcagagtgcaaggcacatggtaggccatcaaaaaacttgttcacagccaggcgtggtggctctcacctgtaatctcaatactttgggaggctgaggtgggaggatcgcttgagccctggagttcaagaccagcctgggcaacacaatgagaccactgtctctacaaaaaaatttaaacattagccaggtgcagtggtgtgtgcctgtagtcccagctactcgggaggctgaggtgtgaggatcacttgagcccgggagttcgaggctgaagtgagccatgatcgcaccactgcgattgcagcctcaatcactgcagcctcgacctttttggtccagcctgggtgacaaagcaagaccctgtctccagaaaaacaaacgaaaaaacacttgttcagtctacgataattcaagacttttccaggcagtgtaatcaaaagaaattcatctagctctcctatatttacgctgctgaatagttttgtagaaatggagttgaatatcatgaccctgaggtattttaagaccctaaataagcaatcttaaattatcctgtattttctaaacactcaatatctgtgttatctgaagtttgcaaattccgcaagaaatttttaattttgtatttttatttttgtgaatatctaaaaataagtccttgtactgttataaagataaagctttgtaatttgtaactgaaagacatctatttatttttggcagagacagggtctcactatgttgcccagttggtctcaaattcctgggctcaagggatcctcccatctcagcctcccaaagtgctgggattataagtgtgagccactgtaccaggcctaaatgacattgtcttagaataaaactttaaactcgg

SEQ ID NO: 315652 - DNA, 4001 bp, Homo sapiens
tgatttgtttgttttccatctatggaagacctactggttccataagaccttaattttctttttcctttgaagattaaaaagggctgtgaggatattgctaactgaaaatttatgcaagtaaaattagaattttccatcattctccttcaacattgccagtatataagaagttttactaaattcagaagctaattttttttagcacgtacctattttgttagtgggcatagcaggtcccttttctttctagccaagtgtatttctctgccccttcttctcccacagaagatagcagcagatctcatcctatccagtaattgccccagaaatactgtgaaaattttgacaccttcaccgccgtttgtgagatagaaaagttcgttttaaaaaaagaactgttggccgggcacagtggctcacacctgtaatcccagcactttgggaggccgaggtgggtggatcacttgaggtcaggagttcaagaccagcctggccaacagggtgaaaccccgtctctactaaaaatacaaaaattagccaggcgtggtggtgggtgcctgtaatcccgggtactcaggaggccgaagcaggagaatcacttgaatggaggctgcggtgagccgggatcaagccattgaactccagcttgggtgacagagggagactccgtctcaaaaaagaaaaaaacgttggtgacatttcagaccagaagacctgctcctgacaatggttagtatagggggatttgttgattttctccaactagtatgtttctcatgatctatgtaggctctttgcaaagtactaagtgttcaaatatctgggctgccttagaatgagaaagggacacccaagggacagttatctattccaaacaccctgtgaaaggcttctggtgcttgatatcttgaccttcagagcacatatccaagagagggactactgtggtacaccaccatggcaaggtgggcggagggtatgaatgctgtcaagcatatttttaatcccagaatatgggatttaaaaaagtatttaatcccaggatccttttctttctttctttcttttttttttgagacagagccttgctctgtcactcagtctggagtgcagtggcgcgatctccgctcactgcaagctccgcctcccgggttcacgccattctcctgcctcagcctcccgtagctgggactacaggcgcctgccaccacgcccggctaatttttttgtattttcagtagagacagggtttcaccgtgttagccaggatggtctcgatctcctgacctcgtgatccgcccgtctcggcctcccaaagtgctgggattacaggcgtgagccaccgggcccgggccccccggatccttttcttgccacatcttctaagaggaagtagaggtagaagtaaaagtctttgtcaaatgtccagcctaggtcgcggcgcggtggctcaggcctgcaatcacagcactttgggaggccaaggcgggccaatcacttgaggtcaggagtcagcctaaatattcggcagaaccaacatgggacgagagcgcttctaaacctaggtccctgcacctcttcgcacaaagtttaaagatggttcaccccatccccaccgcccagaagtcactgtcaaccactccagaagggcttgaacctacaaagtctgctcaagctgctcaatagctcccagatatggaacacctgattctcctggccaaaaaggtttccccttcacaccccacttcccattccaaggaaccccatctcttgatttccccacctgggaaacagggcgttagcgccaaagtgcagctgaggtcctgaactgtaaacggagatcccgagggtctggagctgccgagagtgcgagaggctcccactccccgccggaagaaggggcttgggcctcctgggtccctatccgggggcggggaccagaaggttctggctgaggcggacgatgcggtgggaacctgggcccagtcccaccatccgggcccggggctcacctgctgaactctgagggtctcacgctccaaagtggcggccgctgttcgtggcgcctggcaaccgcctttgtgacccaggacggcagggcagcccgagccgcggcggggatgggggctcgaggcgccctactgggaggcgtcagggccacactccccgcccccacctcattggaatgccttgtccaggacttggccttcaggagggctggtccgaatcctgtcccctccattgtcctcctccctaccgtgccacacctgtgtacctgtgtgcctttgatcaagccacagaggacaggcgacccctacttcaatggccatggtcagaggcctgcataaaagtcccaggacctgtagttagtgttaaaagttagtcccaactcatcacactctgctcagtgggtgctcaggcagagtgacccagagctctgtcaggttttgttgctctatttgaatgatcccagtggcaaagaaagagaattaataaatgttcacctgtcaagagcaggaggaaacgcacgtctttccttgatttcctgacagaaaacctttctcagccttgcgttaaacctgagagtacctgtaatcccagctatctaggtggctgagatgggtagactgcttgagcccaggagttcaagaccagtctgggcaacgtagtgagattcccagctcaaaaagaaaacaaaaaaatctcaaaaagaatgattttgtctcattcttataatgcagaaatacactttcgccatattagtgaaggagtgatttgacaactttgtaatcatcacttaaaataatgaccctggatggctgagggaagggaggagtctacccagctgatgtctgtattcccagtacctggctattgccatgtctggcagtgtgcagtatttgtgggaggaagtaactaatggcctacttggccttcccttgtacacccagaattgcccttgcattttacaaactatagaacacacaccacaaataagacttgtcacctttgttctggttttttgggtaaagctgatggagaaagactgagggtctgagaatagagtcaggcaagatcctgatttagaagacacacacccactgtgtgtacatgtgcaccttttggaagaagaggtaagtggagaagagtctggagggcatgtcgggtcagaacatgaagagagaggcacagaatagtgagacttggaagagacacaaatgattttgaattacaaaacttttttccccagttagttcatttttatttccctctttttttttctttctttttttgagacggagtctcaccgtgtcacccaggctggagtgcagtggcttgatcttgggtcactgcaaccttcacctcctgggttcaagcgattctcctgtctcagcctcccgagtagctgggattacaggcgcgtgccaccaggcccagctaatttttgtgtttttagtagagacggggtttcccatgttggccaggcaggtctcgaactcctgacctcgtgacctgtgcacctcggcctcccaatgtggtgggattacaggcgtgagccaccacactggctttatttccctcttgaataaaaaagacttttttttttgagatggagtctcactctgtcacccagactggagtgcagtggcgtgatctccactcattgcaagctctgcctcccgggttcacaccattctcctgcctcagcctcctgagtagctgggactacaggcaccagccaccacgcccggctaatttttttgtatttttagtagagacggggttcactatgttggcgaggatggtctcgaactcctgacctcgtgatccgcccgcctcggcctcccaaagtgctgggattacaggcttgagccaccgagcccggctgacatttttattttaaaagaaaacagtcgttttcatttaggttttaattgcacagtggtttttgttttgttttgttttttaaatgaaagtcctcaatgcaaaattgtatgttt

SEQ ID NO: 315653 - DNA, 4001 bp, Homo sapiens
aaggccacgcaggccaggcaggagctgagaaggcatgagagggccaggtggggacggggaccaaacagcgcccctgccccatcccctgggttgggggtgggcagcaccagccaggagatgcagatcctgaactaccagaccttgtgacttttcaagagaagacggaaatccggacttttacgtgaaaactgccaatttgtaaatgcaggcagctaattaattttttaaaataataataacatggtgagagccaaacaaaacatgcagggccagccacagccggggctggcaggtttgtgcctccagaataagattctttgacttcatcccctgctcacccccatcacacagctcagctgcagaaggggagggcgggaagtcaagggtgcaccccaggggagtagctccccctccctctcttcctcctgctggggagtcttcaccccatttggcatatggggaagttaaggcccagagcccctatcagccacaaacacacaccagctcccaatccatgccaggctgagggaacacttctcagctgccacccaattcatcagggctccctctgggagggcccggaccagcatctcaggggcatcagggtagacacaagcacccaaaccatcctgtttgacttccctttttctctttttggcctgtcaggggacgcctgctggctcaggcctgcttgggactggcccaagtgatcactgcaaagctgatatgggcaactccttgtggcagcaaaaaagggagggagggcacccctatttcggagactggagcaggggaagggagagaggatgcacggaggtgaggagtcaggcccagcctgaggctgagccacccccatgctccccacagccacccaggtcccatggtaagcagcctctgtcaggaggaaccacctccctcctccaaaatcggctccccaccccctaggacaggggaggactgcccatggagtgccaggggggctgggactgtgaagtcgtgggggtctgtgactcgtatgtgagactcacagtgtgtggcactcccagtgtttgtgattccaggtatttgaggagcacacgcatgtgagagacacatgtgtgatacatatgatggagatatgcatgtgatagctacccctgtgtggcggacgtgtgtgcgtgtcagagggcagtaagggcacatgtgtttatcagagacacaactgtctgctagaggcatgcctcggaggggtgccaatgtgcaaggcatgtgtgtgtggagcattgtgtgctaaggggacgtgagatgagtgtgagagattctggcctgggggagctggcggggtgagcatggggctgggagagggaggatgtggtgacaggcagggtgggcgcgccaatgcagagcgtgcagaaacttctgcttgtgtgagtgcgtgtgtggcggtgagtgtgacttgggggtgatggagggggtagtgttagaccagggactctagtcttctttccccgagggggttgacccggccctctggactggaggggcggcaaggtcctgcggtcggggtgggggtgggcagtgggaccagaggggatgactggtgggagccggcccaggggggagaagtgaaacccagagcggaggaagctgcggacctggggtgggggaacccgcccgcggacccctggcccccaccccgcgccggcctctgtgcccgcatctgtacactgggtcgcggcgctcgcgggccgtccccgcgctgggaccgggagagcgagacccggtcggaccggcggcgcgggtggaggcgcgggcagcccgcgaggcgcgtccgagggtccgccgagccgtcggtgcgtccgagcgcccccgagtcctgagctgcgaggcgcggaccgacggggatgagtccgggcgggaggggccgcgtgcactcaccgcggggcactgcgctcggcgtccgtccgtccgtccgcccggccgtcggcgcgtcgagagcccgggcggcccctggctgtgtgcgcgcggggcggggcggaggcgcgagaggcgggaccagccggcccccggccccctcccctgactccgcctccgcctccggggcggggtctcggccgcccgccggagagggggccgggccggcgccgctcgctcagagcccagactcgctgacccggctcctagaggccgcccggcgcgctcgctgcggagcccgcaccctccctgcgcccggcctaacctctgagtgccagacctggcactgctgcccacagggcagggccaggggttggggtccggccacctcagccagcctgagcctcagtgatcacccctggaagatgggcccagcagccttgggcacattgtgagggcctgaggggcccggctacaaaactgcccagaggccaggccctgcctcccacccgccttgcttcctaccctgggggcctgcctgcagccccactgctgctgcatgtgcctgggcagacggtactgagcccccagctttggaacaggttcagtttgtccttttcctcagcccagctctgatgcctgtgaccactgtgtgacccccggggtgtctcttcccccagcccacaccgatccctttctgggtctctttcggggtctccatctctgatctaatgtcatctctctgtctcccttggtttgtccctcttggtctctgcatctccctctgactttatctcttggtctctgtgtctctctgagtctctcccatccctgtccagagacgtatggcctggtggtcaccacctcacatctgagcagcagccatgggcccaaagtgtgcctgcccccacccccaggggtctccctgcagcccaggacaggggtgaggcagccaagagcaaaggcacagggcagggcagctgcctgcccagggccgcacagcagagaggaggtggagccaggaagggcccattggcttagatggggccacccacagagaagccaggagcggatggaggggccaaagcctgagctggcagcctgtgcctggcctgccccaacttgtgtctaaccccaggcaggtgccttccctctgggcccgtttccccattggagctctgtgcttgctgttccctcagggcctttgccattgctgttccctctgcctgggatgctcttccccagatccaccgtggctgactcatccctgcattaagatgcagctgaaatcccaccacccccagagaagccctccctgagaccccagcagaggtagcaactaccactctccaccctgggactcggccgcactgttattacagtacttgtcactggctgatttctcttattcatttataaatgactataggtaggatcacctggtcattaagaaagtcaccacacaccagctgtgtgaccttgggcaagttacttcacctctctgggctttatttcctcaactgtaaaatgaacataacgacatcaaagcctatcttataatgttattggaaagatcaaatgaaccgaaatgagccaaaccgaaagtacagatgctcctcgattataatgggatcatgtccccataaacccatcgtaaatcgaaaatatagtaagttgaaaatgcatttcatccacctaacctacagaacatcatagctcagccaagcctaccttaaatgtgctcagaacacttccattactagcctacgggtgggcaaaatcatctaatacaaagcctattttataatgaagcattgaatatctcatgtaactcattgaatactgcacagaaagtgaaaaacagaatgattgcctggggattccaagtagggtttctcctgggtgtgtaccactttctcaacatcctaaattcaaaaaatcctaaatcgaaccatcgtaagtcagggattatctgtactttggatgggacttgacccaagggagtgctcagtaaatatctgatgagtaaatgacagattgaatccttcctcctgtgggggaaggaggggcagtggcctggggtgatagagaccctgggcagctgctaa

SEQ ID NO: 315654 - DNA, 4001 bp, Homo sapiens
cagccaccactacagcctcgatgcagttgggcggcagctccgggcacagcatgaactggcagctgatcttgccgccgcctggtgggcaggagcactcagtgctcccgaagtccacaaaataggactgaccggcgggcacgcggccgcgcacgaagccaccctgtaggcagtcatagtactggtagccctcgcaggcgcagccctgctgcacacacgtggcacagcaggcacccggctccagcgcctcctcaatgcagttctccagcggcgggcactccacgcccgtgcagtcctgccgaggggcagctgcggccacgctggggcccagggccagggccaggcccagagcaagccaggctcctgcaggctcccagagcagcaccatggtccaggccagcccaggacggtcccctctcctgtaagaccctgggggaatcagaaaggaagcctgtcagtactgggtgtgcacacacagacacggtgcacaccggcacgcacgcgggcaggggcccagcctcagccacctcacacgcatgcgctcatccccaggagcacactaagcactgcctcacacacacacacaggctccgccacacatgggtcagatcacacacaggtgagtgtctagtcgctgggcgccacaggtgttgacctggagtcgctgacagccccacacgtgtttgctgggccactccatcctccatcctcacctgcattctgaggcaggtcctctgagtgagccctcgtgcccacacacacacatgcacagccccacacccactcggtcacactcaccagggcacgtcaggcaatatgccccataatcctctatgcagttacacacgctgtctcacccacagcatgcccacgtgccagtacacaccctgggcggtctcacacgcacagtcccacgcacacacccgaccaatccctccccccagatccttgactcagtccccagccacgcaccacagctgctggccagaaaatacagtcagtggggaaatgctaggcaagaacaagacgccccctacagccccagcccgcagaccctaggactcaggaacacacctctgagaccctcgggactgcaggcttagccccaggggacgctcctgtccccctccccagtagcactggcaaatgcatcctgatgccttgctgtccctaacaccccaccaactcccccagtcatgtccattctccccgcaatctgtctccactccctccccacggtctctaccccttccttccatctctaggccctgtccccactccagtctcagctctgatctccactggaacagccccgccacctccctgcccaccactcctcccctttcccagggaacccagtctggcctgagagcagctggccccgacatgccacggccccacagcccgccccagtttcccatggccagaaaggaaaggtctggattcccagctgagcctggcactcaaggccctgcaggagccatcccaacccgaccctcccacaggcccttaggcctgaactcccccaagggctcttctcccctctcatcttgcacaagccactcaaatgccaccttctcaccagtcctcatgcctcctccctcctccaccctggcccaagtccccagtgcctgtagccccacttgtgacccagtggccgtacctgactcttatagacagcgtgctccccaaagtcacaggcaagagctccttctccgactcccagcctaaagcgcagccccatagggcagtgacagagggacagcaggactcgttaccacagcagtggtccccaagcctgccccatttctaaaggaacgcctcctctgcacccagcccctctaggaaccaggggtttatcagccagcaagacaggttcccagcgtcctcacagcactgacaccctcaggggtggaggggcagataataaacccaagagcaaatctgtagagaactgaacgccaggcaggcatgagccccatgatgaaataaatgaagggaatcaaggagacggaaggaggacgtggcagtgtcaggggagcccgtgtcagtccggcggaagaggagggcttctctgaggagggcgtcaggcagggagtggcagggccaaggggctgaggccggaccagcagcagaaaggtgaaggacagagagggcccccagggctgagccacatcagcacacgggtggtaactgcagagcaacgggcttccagcctgctgtgagggcctctgggcgtgcctgtaagcgctggagcctgggactctccagtgcaagggacccacccagctgcccactgcgctgagacacgggagccagcagggagcaggtgagagagcccagggcagtgagcgaagagaggcaggagatggtggcacaggggatctattttgaaggtaggacccacaggatttgctgatggataggatgcagcggacagaagacagaagtccaggagcgcctggaagggggagttgtgtgaccgaggcagggaaggctgcggtggagggccatggacgggcagggagatggaagcccatgcccagaccaggctcagggccggcggagtgctagggagcctctggggcctcgagggctgacgcccctgccctcacactgaggtgccacctcaggaagctggaggactccgtaaagccactgacattaggaatgggcccctgggagaatcagggcctttactcccagtcagcaaaagcaaggaccctccagactgcaagggagaggccctcaggtccactctcaacagttctttctgtttgtttttagagacagggtctcactctgttgtccaggctagagcacagttgtgtgatcatagctcatcgcagcctcaacctcccgagctcaagcgatcttcccacctcagccttctgagtaggtggaactacaggcacacaccactacacccagctaattttttttaacaagggtctcactgtgttgcccagattggtcttgaactcttgacctcaagcgaccctcctgcctcagcctcctacagtgctgggattacaggcatgagccaccgtgccagctgacagtgtcttttaagaaaggaaatctttggccaggcgaggtggctcacgcctgtaatcccagcactttgggaggccaagacaggcggatcacttgaggtcaggagttcgagaccagcctggccaacgtggtgaaaccctgtctctaccagaaatacaaaaattagccaggcatgatggcgtgtgcctgtaatcccagcaactcaggaggatgaggcaggagaactgcttgaaccccggaggcggaggttggagtgagccgagatcgtgccactgcactccatcctggggaacagagggagaccccgtctcaaaacaaaaggaaatctttggtgaactgagacccaagctccctgccctcctgccttcaggtgcatcacacacctaggcatgaacgttgtgtcctgagaggacagtaccccagccacaggacacagggctgtcctagaacttcttccagaagaacttccttcccagcccaccctgccccaccacccggtccaccaagtccatccccttgctctgctcaccggcacagcccccagggtgacctggccccttggccccccaggcccccagcatcacattctgtccatgcttaagcaatcccaaacctcaggcttgcccatctccccactccaggcccagggcaatgataaagaacatcaggcccaagcctgactctgcattttccacatttgctgcgcaaccccaggcacggccctggccctctctgagccctggttctgcatccacccagtgaacgtgttccaccatacctcaggtcatagtcgggggcccaccagcattatctggcccataagtgctttcgtttggctcacacagtgggtttctcattttaaattggttaccagcatgcataaattgaaaacgttcacataaaaattcaggtttccaactcctgtttcaagccacagagctctggcc

SEQ ID NO: 315655 - DNA, 4001 bp, Homo sapiens
tacaaaaattagctgggcgtggtggcactcgcctgtagtcccagctactcgggaggctgaggcaggagaatggcgtgtacccgggaggcggagcttgcagtgagccgagatcgcaccactgcactccagcctgggcgacagagcgagactccgtctcaaaaaaaaaaaaaaagaatacagttttggggatgacatatatatgcagccgcttcatccctctccctcctgtaccaaccattccccacttccatggaagcctggacaccttatcaatcaattaagctcctgtgagttaaattcttaatgcttaaagacaaacaaaaagcaaagcattattaagttcagcaaagcaaccactaatacaaaactacagtaaatgcttttattttaaagtaaaactctaaaattcacaatagtgaatgagggtgggctgtgggtcagaacgaaagaagtggaagaagtaaaaataaaggaaaatggatgacaggaggaatatgagacttcagagagctgtgaaaaattaattcctggatattctttctccttgctacaattgttagggcttttctcacatataacatattacagtaaattactgcaatatttgaaacacttatatcttcataaaattcagtttctgaaactcttgccagctccattaatttgtcacttaaaaagcaattcgcaatttaaaaaagaaacatacacaaaataaaggcattacatggtactgtgatttatgggtgatgtttttctcctgccagcaataatgccacacatttggaagttgcttttccagagtcaatgagagacaccatccacctcccaccaccatccctctccttggttattaagaaaaaaactgagccagccaggattcctaatgatagttttttctccatgaggccagctggcactcggggagcaccctgcattctcagctcatcagcacttccactaaactcctgcagataaggagaaaatctccacttaattactcatggttaaaacaaaactaagtatttccctattacctacacctaccgccatacctcctcaagtattctataccaagggtgtgtccccaagcaaggagtctagctcctctcttctcttacaccccgtgaaggcctctggagaattatgccttcggttggcaattctctgaacttgtctgttcaagccagcacctccgccgagtgaaaccgagcaacgtttttaaaacgagcttaaagggggccaggtgttatgcccacgccgtctgaagttaactgaacaaaggtaatgatttaagacgtttacaatgcactaattatgaattaattaaatcccttagtgagggtgcggcactcagaaaaaaaaaccctccagcttaatgccctctattttttagaaaggaggggaggggtctctaaaatcaaaaattttaatttccacgtgctaaaaaacctatcagaatgctgattttgaaaggaagatatatgtcttatattagttacacataactgcatagaaacaaaactggaggcatatagactgctttagtgtaaatataaatacatatgatatccatatacaagatttttttttttaaccacaccctccttgggtggcttcccaggctctctcgggccaaacagcgtcacgtcgtccggcggcccactgggtgggggtccgggctgtcaccccgactccagcggcagggaacgctgcatcgcggtcgccccccggcaggcgggcgctctgaatcccccaggttacccctccccgggcccgcccagccctgccctgcccagcagcctcgcaggccgcggcccggcctctccacgacccctgcgccgcctgcccgaccctagcgggcggcggcgtgcggacccagcccggtaggggtagggcggggcagctaggcagacgcgggtcccagactcaccatggccgaagagccgcgagcgagcccacagcccgaagtcacacggcgccggcgacgcccgttgtcctggtgacgccagccaggcgccccgccccgtccccaaggtgggctcggaggcggccattggtggtcggcgagcacgtgacccgcaggggcggtgccctttggaccgcccacccctcgcccccggccctggaactgggcctcttcgcctctcccacttcgtatctggtccatcctctcagtctgatcaccttgatgtccctcacctgacagattacccagccgcagactgcccagctgaaagagaccatggatttttttttttttaaaaaaaacgttatacaggtaatgcatgattattgaaaacattttaaattaccaataacaagaatttaaaaggataaaacgacactcaccccagcacctgaagtagctactgctcagattccattctatctgcttcaagcttccaatgagttgttataatatactgtattcttaaaaatggtggcaaaccataggtaactgttttataatctacttttttagattaaaaatgattatcttggggccaggcgcagtggctcacgcctgtagtcccagcactttgggaggccgaggcgggcggatcacgaggtcaggagatcaagaccatcctggctaacacgatgaaaccccatctctactaaaaatacaaaaaattagccaggcatggtgggggacgcctgtagtcccagctactcggcaggctgaggcaggagaatggcgtgaacccgggaggtggagcttgcagtgagctgagatcacaccactgcactccagcctgggcgacagagcaagactccgtctcaaaaaaaaaaaaaaaattattatctttgcataccacttaatggaatagcattctatgcatgttgtctaattcattaaatcaactggcaatttgttgaatgtttttaatatggttgaagggaactctagatatcctgaaatctagtccattaactctatgaagaaggacccagtgcgatgggacacttgtagttccagcactttgggaggctgaagcaggaggattgcttgaggccaggagtttgagaccagcctgggcaacatagcaagaccctgactcgaaagaaagaaagagtgagaaaggccgggcgcggtggctcacgcctgtaatcccagcactttgggaggccgaggcccatggatcaaggggtcaggagattgagactatcctggctaacacggtgaaaccccgtctctactaaaaatacaaaaaattagccggcatggtggcgggtgcctgtagtcccagctacttggaggctgagccaggagaatggcgtgaacccaggaggtgaagcttgcagtgagccaagatcgtgccactgcactccagcctgggcaacagagtgagactctgtctcaaaaaaaaaaaaaaaaagaaagaaatagagagggagggaaggaaggaaggaaggaaggaaggagtgagttttggtgtgttagaagcagaaaaaaatgacaaaataaaaacaacaacaaaaaaagttacaaaaaagagaaaaagaattttaaagtgtaaaaaaaaatctgtgaagaagaatcatattcaacagctgacctgacatctcccccggagtgcctaatagacatcacaacgtaatatggccctaattaacctcttgatccaagtttcttactccccagtcttctcaaagcgaaagtccctactatccccttgattgttaagacaaaaacctaggaattgtccctgattccgctgtttcctcacacctcacttccagtccattatcacatattcttgactccaccttaaattctcaatctatccactctacaacatctccacctcacaaccactattgtctcacccaaattcatctccatatgtgctatgatttgaatgtttgtgtccccttcaaactttatatgaaaacatataaaatgtgacagttttaggaagaggacctcaaggaggggagtaggccgtgagagctctgtcctcatgaatgggattaatgcccttataagagagcctgag

SEQ ID NO: 315656 - DNA, 4001 bp, Homo sapiens
aaaaattagctgggcgtggtggcactcgcctgtagtcccagctactcgggaggctgaggcaggagaatggcgtgtacccgggaggcggagcttgcagtgagccgagatcgcaccactgcactccagcctgggcgacagagcgagactccgtctcaaaaaaaaaaaaaaagaatacagttttggggatgacatatatatgcagccgcttcatccctctccctcctgtaccaaccattccccacttccatggaagcctggacaccttatcaatcaattaagctcctgtgagttaaattcttaatgcttaaagacaaacaaaaagcaaagcattattaagttcagcaaagcaaccactaatacaaaactacagtaaatgcttttattttaaagtaaaactctaaaattcacaatagtgaatgagggtgggctgtgggtcagaacgaaagaagtggaagaagtaaaaataaaggaaaatggatgacaggaggaatatgagacttcagagagctgtgaaaaattaattcctggatattctttctccttgctacaattgttagggcttttctcacatataacatattacagtaaattactgcaatatttgaaacacttatatcttcataaaattcagtttctgaaactcttgccagctccattaatttgtcacttaaaaagcaattcgcaatttaaaaaagaaacatacacaaaataaaggcattacatggtactgtgatttatgggtgatgtttttctcctgccagcaataatgccacacatttggaagttgcttttccagagtcaatgagagacaccatccacctcccaccaccatccctctccttggttattaagaaaaaaactgagccagccaggattcctaatgatagttttttctccatgaggccagctggcactcggggagcaccctgcattctcagctcatcagcacttccactaaactcctgcagataaggagaaaatctccacttaattactcatggttaaaacaaaactaagtatttccctattacctacacctaccgccatacctcctcaagtattctataccaagggtgtgtccccaagcaaggagtctagctcctctcttctcttacaccccgtgaaggcctctggagaattatgccttcggttggcaattctctgaacttgtctgttcaagccagcacctccgccgagtgaaaccgagcaacgtttttaaaacgagcttaaagggggccaggtgttatgcccacgccgtctgaagttaactgaacaaaggtaatgatttaagacgtttacaatgcactaattatgaattaattaaatcccttagtgagggtgcggcactcagaaaaaaaaaccctccagcttaatgccctctattttttagaaaggaggggaggggtctctaaaatcaaaaattttaatttccacgtgctaaaaaacctatcagaatgctgattttgaaaggaagatatatgtcttatattagttacacataactgcatagaaacaaaactggaggcatatagactgctttagtgtaaatataaatacatatgatatccatatacaagatttttttttttaaccacaccctccttgggtggcttcccaggctctctcgggccaaacagcgtcacgtcgtccggcggcccactgggtgggggtccgggctgtcaccccgactccagcggcagggaacgctgcatcgcggtcgccccccggcaggcgggcgctctgaatcccccaggttacccctccccgggcccgcccagccctgccctgcccagcagcctcgcaggccgcggcccggcctctccacgacccctgcgccgcctgcccgaccctagcgggcggcggcgtgcggacccagcccggtaggggtagggcggggcagctaggcagacgcgggtcccagactcaccatggccgaagagccgcgagcgagcccacagcccgaagtcacacggcgccggcgacgcccgttgtcctggtgacgccagccaggcgccccgccccgtccccaaggtgggctcggaggcggccattggtggtcggcgagcacgtgacccgcaggggcggtgccctttggaccgcccacccctcgcccccggccctggaactgggcctcttcgcctctcccacttcgtatctggtccatcctctcagtctgatcaccttgatgtccctcacctgacagattacccagccgcagactgcccagctgaaagagaccatggatttttttttttttaaaaaaaacgttatacaggtaatgcatgattattgaaaacattttaaattaccaataacaagaatttaaaaggataaaacgacactcaccccagcacctgaagtagctactgctcagattccattctatctgcttcaagcttccaatgagttgttataatatactgtattcttaaaaatggtggcaaaccataggtaactgttttataatctacttttttagattaaaaatgattatcttggggccaggcgcagtggctcacgcctgtagtcccagcactttgggaggccgaggcgggcggatcacgaggtcaggagatcaagaccatcctggctaacacgatgaaaccccatctctactaaaaatacaaaaaattagccaggcatggtgggggacgcctgtagtcccagctactcggcaggctgaggcaggagaatggcgtgaacccgggaggtggagcttgcagtgagctgagatcacaccactgcactccagcctgggcgacagagcaagactccgtctcaaaaaaaaaaaaaaaattattatctttgcataccacttaatggaatagcattctatgcatgttgtctaattcattaaatcaactggcaatttgttgaatgtttttaatatggttgaagggaactctagatatcctgaaatctagtccattaactctatgaagaaggacccagtgcgatgggacacttgtagttccagcactttgggaggctgaagcaggaggattgcttgaggccaggagtttgagaccagcctgggcaacatagcaagaccctgactcgaaagaaagaaagagtgagaaaggccgggcgcggtggctcacgcctgtaatcccagcactttgggaggccgaggcccatggatcaaggggtcaggagattgagactatcctggctaacacggtgaaaccccgtctctactaaaaatacaaaaaattagccggcatggtggcgggtgcctgtagtcccagctacttggaggctgagccaggagaatggcgtgaacccaggaggtgaagcttgcagtgagccaagatcgtgccactgcactccagcctgggcaacagagtgagactctgtctcaaaaaaaaaaaaaaaaagaaagaaatagagagggagggaaggaaggaaggaaggaaggaaggagtgagttttggtgtgttagaagcagaaaaaaatgacaaaataaaaacaacaacaaaaaaagttacaaaaaagagaaaaagaattttaaagtgtaaaaaaaaatctgtgaagaagaatcatattcaacagctgacctgacatctcccccggagtgcctaatagacatcacaacgtaatatggccctaattaacctcttgatccaagtttcttactccccagtcttctcaaagcgaaagtccctactatccccttgattgttaagacaaaaacctaggaattgtccctgattccgctgtttcctcacacctcacttccagtccattatcacatattcttgactccaccttaaattctcaatctatccactctacaacatctccacctcacaaccactattgtctcacccaaattcatctccatatgtgctatgatttgaatgtttgtgtccccttcaaactttatatgaaaacatataaaatgtgacagttttaggaagaggacctcaaggaggggagtaggccgtgagagctctgtcctcatgaatgggattaatgcccttataagagagcctgaggga

SEQ ID NO: 315657 - DNA, 4001 bp, Homo sapiens
atacaccttggagaccttggtgctgtggaggccctggaaaaattaaatgaagttaggtgattatacacagtgaatttgcttgtgcccaggaaacaggcataatgataacccagacacctatagcagagtcttggggtacatatggaggttacagagacaggcaggaaggaaccaggagttaaggtatctgaatagttagtttaggtctccttttacttggcatcggtggctttagcctgtacacatcaaaggtcagagtgtacagaatcccttttgctgcataggccacttcccaggatgtccttagctgaactttgaaccagtgaaaaacaagaaaataaacactgctcccttaccttgccaatttttagtgcatgcaacactatacagttattccagaagcgagaaactatctgtctaaagttataacttttgatacctcaagtatcattagtcattttacttttatccctctgaatatgcaaaattgttcaagcttgtaacaatctttggttttggtgcataagcctatataagtttttcaacttgagaaatatttcacttatatttcatggatgcattttggactcaagagagctggggagaagagggccacacttagagaatattgttggcgaaaaaaaggtgttaaactctgcggagtttgaatagtatatacagaaaatacagttgtgcttattaaccagtagtatgacacagcagacgaaattttaagctacatgagaatgacttgcaagcaaacatagcaaatgttgactggagaaaagatcacagcatttagactttagaaaacagaaattctgatcaggcacagcggctcatgcttgtattctcagcactttgggaggccgaagcgggtggatcacttgaggccaggagttcaagaccagcctggccaacatggtgaaaccccatctctactaaaaatacaaaaattagccaggcgtggtggcacaggcctgtagtcccagctactcaggaggctgaagcaggaggctctcttgaacctagaaggtggaggttgcagtgagctgagactgcaccactgcactccagcctgggcaacagagtgagactctgtctcaaaaaaataataacaatgaattaaataaataaataaataatagaaattctgggccaggcacagtggctcagacctgtaatcccagcgcttttggaggctgaggtgggcggatcatttgaggccaggagttcaagaccagcctagccatcaaggtgaaactctgtctctactaaaaaaatacaaaaattggccggatgtggtggcatgtgcctgtagtctcagctactcggaaggctgaggcaggagaatcactagaacctgggaggtaggggctgcagtgagccaagatggtgccactgcactccagcctgggtgacagagcaagactgtctcaaaaaagaaagaaaagggaatagaaatcctggattctaggccttccacttgtttcctcaccacctcctccacttccccagatccccccacccatcaccatgttgtaactttacagatatcataactactcttgttgattatagaagaaagaacctaagctgtcagaaagcaagtactctacctgctcttgaaatggaaacagaaatttacacacggctggatctcattctcagtgccagcctttcccccacatctttacataactaatttgcttaacaatcctcttccacaggacacaaaagtgatatgcggctcagcttcatctgcatattcaccactgaatgtcctcgtcatggtgcacctgctcctgtttgaatacttaccttaatggaacaggctgagtcagcatctgcttgcacctgaacccttgattgcaagtaagcggattgccgggaggtggctgggttgcatcagctgcagtagaggacagcgttctgttgggaaggcagggaaaggagagaaaacttcaacagaaatagtccaagtgttgcgaagttaaaaataaaacgatatcacaaggggcaatgtgaccaggctcagcttacgactttttccttcccctgtatttatcaacactcagtctctactggagtggcatttagcaggggaaactgaatgggaagtgaagttttatatcaataggttttctttcccttgaggaaggaggaaaatccttttaagaaggatcattttcaaggccagaacagcctctcagattcctgcatgtgcagtcggcaggcccagctgtgctgaaggaggctggcacagccttcaggactggctgctgctctaattataaccatgctcctcacctaaacccatcactggctgaagcagcaacttgtgcaaatgacatggtgtcctgcttcagtttctcctatctcttgtcgtgacaagtaagtgtctgtcctcccctggtcctttcatctttcctggaaaagggagagtttgtaattcagataccaggtgtagagtaaatccagtgtgagagaattagaggttgtaggaggctttagctgtcatttagtccagctccctctttttacagatgaggagacagagattcagaaaagggaaattgctcatccaaggtcacacatctcgttagtggaagagccagaggaaagccccagagagcttgtttaactctcagtctagcgttctttatcttatcatcttcagataaactcattcaggatcttgtgagtgaaaaaaatatagaatcccggctttggtgttttctttttcttttttttttttttgagacagagtctcgctctgttgcccaggatagagtgcagtggcgtgatctcggctcactgcaacctccacctcctggcttcaagtgattctcctgcctcagcctcctgagtatctgggattacaggcacgtaccaccatacctggctaatttttgtatttttagcagagacggggtttcaccatgtttgtcacgctggtctcgaaatcctgacctcatgatcctcccacctcagcctcccaaagtgctgggattaggtatgtgattttgacaaatttacttaaccattttctatttcagttttccccattgtgaaatggcgatgatacttggtgcgaccacaggtaactgtgtcagtacacataaggcacatgaatgatatgtaccacatgccaagtgctccacaatgccagctgttatttgaatgtatttgaatgtattttgactaacagcagatgtgctaaatttggctgtgattaacagccatcgaattaacctttcccctggattcttcatacatatatgtccttggaggtaaacttatttggaatgagcaaatagcagttgaaaattgtaaaaaatttctacactgatcttgtatcttgaaactttgctgaactggtttattagttctaatagttttcttgtggattccttaggattttcaagaccatgccatctgttaacaaaaatattttaacttctttctttgcgatttggatgcctttaacttccttttcttgctgtttttccctgcctagaacttccagcactatgtttaacaagagtggtgagagtggccacacttcacttgttcctgatcttaggggggaagcattcagtcttccaccaataagtacaatgttacctgtggatttttgtagatggcctttatcaagttgaaggagaggagtttgatagtttgttctagtttgttgagtgaatcaagaaagagtgtggatcttcatcaaatgctttttctgtgcccagcaagatgatcatgtggtttttgtcctttattctattaatatcgtgtattacattgatgaatttttttatgttgaatcaatcttccattcctgaataaaccctacttggtcatggtatctatcctttttatatgttgctaaatttagtttgttagtattttattgagaatttgttttttcaagtcagatgcataatgtgccaatgttgaaacaagcttcgagggtagcactcacacatccacgtgaatgccca

SEQ ID NO: 315658 - DNA, 4001 bp, Homo sapiens
ctgtaatcccagctactcaggaggctgaggcaggagaatggcgtgaacccgggaggcggaggttgcagtgagctgagatcccgccactgcactccagcctgggtgacagagcgagactccgtctcaaaaaaaaaaaaaaaaagaaaaaagaaaagagaaacaacttgatagtttacatatttaatggcaatgttccctatcttctataactaaaaccggttttactacataagtataaattttacatgcttcacatgaaaaaaaaatttttacttcttactccgacccctgttggcaagctagcattaaaaagggggtgttatcgcgcggtggctcacgcctctaatcccagcactctgggaggccgaggagggcggatcacctgaggtcgggagttcgaggccagcctaaccaacaagaagaaaccacaactctactaaaaatacaaaattagccgggcatggtggcgcatgcctgtaatcccagctactcgggaggctgaggcaagacaattgcttgaacctggaaggcggaggttgcggtgagccgagatcacgccattgcactccgtctcaaaaaaaaaaaaaaagggggggatgttatcgttttagttactaatgcattcattatgtttaacacattgcaatcagactttatcttctcttatatatgatcttgattgactgctatactgaatagctgttaaccattcaactcaactcaagaccaagaccctttgtttattcggcctgagagtcctttcagccgtaccacaacttgttccttgacatttttattttgtatatgaaggcgggcggaatatgcaggaaggatgcagcgaaactgtaatcagcacgttagatgacaaatagaaaaagagagacaccatcaatgtggaactattaaaaagttagcaaggaaacagccaataacagcaggacaaagcagtatgttaggtggtgcccgtggacgttctataaaagcctgtatcttgtaagtgagcaggatgactagaactacactcacttgtaagcctccaatatagtggagggaactaaagagaacttgggggaaaataatgaaaacaaatggttaaaaatcagagcttggaaaagatgagataaacgtggagtgaaagcaaactagaaacttagaaacttagaaactaagcccatgttaaggtggccgggattatttaatataatgaagtctatctggaggccggggagaaaagtaggatgagggcattaaaaggtacaagagtggtggtctgtctttaacggggaaaactgtcaaaagttgaatgagtgaggcaaactacctagttgtttgaaaagtggatcacggaagtgggatgggttaaggagcagaacttcgatccaaagaaaagagaatctttatcttggggggaggtgaggaagatactgactggagccgtggaaaggcgggctggtgaggcgaagcttctgactcagaagctcggatgagaaacaccgcgaacgacgccggggagcgggactgggggcagcggtgtggcccggggctctctcaccttggccttgtagctgggcaggttgcacaggatgtccgtgcgcagagcctcttctgccaggctgcgggcgcacaggctccgccacacctcgctgttctcatcgccgtgcaggcagcggtaccagtgcttgcacaccagggcgcagctccgcagctcggacagctccaggtaagagaacaccaactccagcacccggctgggcagccggcccccggcccccgcggccccagagcccgagcccgcgcccgcgcccgcgccgccgccgctacagccagcgccgcccgaggctgccccagcccccggggccggcgccgccatcgcctcaccagccggccctagggccgccgctgccgccgccgcttcccgccgtctctgctcggaaggccaagcctcgcccggagaccggagcggctcgctcaccgcccctgtcagtgccaaccgccggcgcctccaccactcccgcccctgcccgggggcgtccgccgcgcgccccgcctcactgagggcagacgcaccggctgcaggggcgtcctccgcccctcctccgcggctcagcgcgggcgccgaaaccgcccgactcgcccggcctctccgcggcgcgccagcggctccgccatgcgggttgagggcacgaagcaagggcgcacgcccagctcgttcgcggttcctctcggccccggatgtgactgtttggctgcgccgcctcacgcctgacgctcgacgggattgggcgccggcgggtgaggttatcactaggcgccgaggaggggagcgggaagcgcaggtatgaggctggcgccggtggcttcgatgctgctttccggtgacttcgatgctgttttccagtgctttttcctttttctggtctggtggctccgcgtctgctctcctgggctccctttcctgtgacgtttccctgtgtccgttaggtccttgcttcagactccagctcaacgcatgaaacttttctctccttgcttgccgggtcctggctccccaacctttttgtgtagcttgggcagcggaggccgtctttacctggtcaggccctctcgttctccctaagtatcggcacttagcgaacgtctgtccctgtgtgccttcgcaaagtaaggtggctgcgactgaacaccccctcgcccaaacgttcgagtgccatttgagcgctaattaagtgctgccgtcttttggacaagatgtggtctttactggatccaccgcttagtaagcagatgaaggcaatgtagttttagtcaattaaacattccaatagggagaatgacgtggaggctataattatagatggattcttggaaggggaagaatttcagcatcccagcttgggcaacattgcgaggcagtgtcgctacaaaaaaatagaaaaattagccgagggtggtggcgtgcgcctctggtcccagctacttgggaggctgagcccgggaggtcgaggctgaggtgaaccgtaatcgccctgctgtgctccagcctgggcgacagagtgagcccctacctcacacacacacacacacacacacacacacacacacaagaatttcagcattatttgattatactacgatttcctaggtggccccaaagttttccgacagcctttaaagcatgcttagtaagagaataataataaccatcatttgagccacggtgtgaaccaggcactgtatactacgtcatttacgcagatttttatatacgtaatcctcaaaacaactccatgagctgagtaattaaaataatagggttcacagactcccttggtcaactccaatgtcttggaacctttatgtagtaagaaatcttttctgaagcttcttgctatgtataatccatttcttagtctctagtaaaagcaaaggaacggtggctaccttccctaccctctgattcatggtgtttgattattatttgcctgtcccttctcctcatgtctttttcaccaagtccagtaaccctaattcttttcattcttaccagtgccagcgccacagcccttcaatcattttggttgctatccagcttctccacatcaagtccaacttcagaaaccccaagcctgtagagaaaagttgacctgtgctgactctggtgatggtgactgtctctcactaatttctttgaagtcttcaaggataagcagagttgatccatctgagaaagggatcatgaactagacagaatgaacagccttagaggcacagactcttgaacgggacggtggtggtatgactagtgcagagtgtttagagatcactcagtttttaaagactggcctttatcgtgtctcagtgcagccgaggcagagcctttgaaggatgcgatgttgtcattcttactaatctagtccagccgctgaggtgactttcaacggcagaccgtctcctgagcgccccaggtagaatttcaaagtaagattacccttctcaacccc

SEQ ID NO: 315659 - DNA, 4001 bp, Homo sapiens
catttatttagagacagggtctggccctgtcacccaggctaattttttaaattttttcatagagatggagggggggtctcactttgttggccaggctggtcttgaactcgtgggctcaagtgatctgcccacctcggcctttcaaagttctgggattacaggcatgagccactgtgcccagccaagcctctgttttttagagtttcccattaattttttttttctgatttttattctgggagggatgagaagccttaggaaaaagggagtaacaggacctgattttatgttgtgaaaaaaaatcactctagtttcttcattcagcacagatggtggggacaagagaggaagcagggagatatcacatggctatcacggcaacccagtctggttcaattttaattccttttccctttactgaatgagaatacacaactgcacacagcaaaaatcaaatagagtggacctctgaaaacaagctgctcatgttcctctagggcacctatacccataccgatgttcttagttactttgtagataaagttatgcggctgtgccaatgccaaccgaagctccttccttctttgatgcaggaaaaattgcttccatgtgtgtgtgcccaggtgttgattggtgaagttgctgcagtcccatctctgcagagatagtgacctggaaacagagtcacagtcccatcaggctgttctcagtcagttcacctcctcagagccccggttatatcacaaccccctactcacactaactttcctgtgtatatctcacaacacagccacacaggccttgggacacagcatgggtgcgcagtcagatgatctcctctccccttccctccttgccctttcccttcccttacctccacaggtaatcactgtctgcaatcctattccaatgctatgggagagaaaggaagagacaagcaggcaatcagttacatcagagagcaagggtaatcctctgctattatttgttctgggagctgggcccgcacaggttaatcagatgggattccagctctcaaagcactctcagtgtggggagataaggaaatggtaacaacagagacctatcactgctaatacaggcactgggtattcccatgaattcacaggaagaagtgttgatttcctagggcttgaaatgggagcctcaaggactgtttagtcagcacaactcctggatatcagcttgtccttttcgtttaacagaatatgaggccctcagtatgaagaatgctaacccccaaagcctcagtgtaaccctctgctattctgcaaagtggtgctcaaactggtcgagagaagcagcgggcttggggggcagtgggaggtggaaggcctttaccttgttcacctgggaaacctgcagcaagccgaacaggtccaggaaagagaagattcgcttcaaagctaagtcaggcaatcggatctccatttcatgcggcctgaacccacatccactttcctttctcctctccgggctgctctgaatttataggctttgccaaagtctgcagcacttgtaaagattttcacccatgcccatctgtgtgcggtagaaacaagctgcaggtgtgcagactcccgggctgacctccaccccggcctctcccctggggcctgatccacacagctggcaggcatccctacctaaacccacttgttagtgctgttcattgtttagaggagctcagcaacacctgtgcgctgtgagctggaggtgcagaacctggggcagccccagttgcagatgaagttgtcagaaccctttaggaaatgtcaccgagtgcactcactttgatcagatctgagtgtctctatgactctatttaagttccaaactcctggaattggagtctgcttgccctgtgtctgtgcctaccttgggatcttgaatctggtgagtggggctcatctctcagcgccagcatggcctctgggtttctaccttctcgcatttaactttgcagtggaggagaaagaacgtgccaagctggcttctccacagaggtccgcccaaagggagcaggccttgtctgggatggctctcccagctggtggctttccctgggatgtgacgctttcccacagttacagatctcccaagaacctgacaactcattctgggattttctaaagaccgtgtcatagcctgggtgtttgtgtcctctcaaaattcctacgttgaaattctaacccttggtgtgattggaggtggggggcctttgggaggtaagtgggtcacaggcagagtccttatgatgggaccagtgaccttataaaagagaccccagaacgctctctagccctgttcatatcatgcgaggacatgagaaggtgtcagctgcaacctggaagaaggcccacaccagaacctgaccgtgctgacaggtgactcttggacttctctcctccaaaattgtgagaaataaatttgtttgtaagccacccagtctatggtactttgctgcagcataagacaggggtccctctgtgaggctcagtggccaacccttcttaaaactgctgcctccaggcagacacacgggagtggttgtcgggagtcccatttatgatacagtagtaagagagaggaaaaatacaaattgacatggtgaggaaataaaaaggaaaagcaaagaccaagaagcacctagaggggcgtggggaaaggcgagtcaaggggtgtgtggagaggagtgagaaaaatacaagggtaaaagatttgtattccataaataggaaataatgcagagagagccagagccgtggaaggacacaggaagacagaaagcttggaacggactctattgtagaggaacagaattaatgcaaagatatagaaggctgagaaataaaacactttaaaatatgacaagggaagagaagaaacagtaaaataaaggatattttaaaagtattaaagcacaaatattataaaatacacagataggaaatataactgtaagtggactgagacagagtaggaataaaatggaaaagaggacagatgagaaagaggcaaacataaggaaactgaagcaaattgccgaatgagtgaatgaatgaatttgaaatagaggaacagaggccaggcacagtggctcatgcccgtaatcccagcacttggggaggccgaggcgggtggatcaccaggtcaggagtttgagaccagcttggccaacatagtgaaaccctgtctctactaaaaatacaacaaattagctgggcgtggtggcgggtgcctgtaatcccagctacttgggaggctgaggcaggagaattgcttgaagctgggaggtggaggttgcagtgagctgagattgcgctactgcactccagcctgggcgacagtgcgagactccatctcaacaacaacaacaaaaaaaatagaggaacaggaaggtgtgttggggggtggtggtggcggggtgctaccagaaaagcggcagagaaagacacattgcaacaatagatgaagacaaatctaaatgtcacaagagttaagagatgtaaaatttgagagatgtgaaatggtaactgcgtaatagtctaagcaaaagataagatgcaggtgagagaatggtccggacattgtctaggagaaagtagattaaagcaggcagctggggaaacctgagaagagggatccataaggagttgggcagcctgagagtaggacagagagggagggacgacacagcatgggaagtaaagggggcgtagcaaggggagaagtaacagcacacctttcatggcgccttctgcaggcaaggcacccgtctaaacaatttacaggggctcatctatttaatcctcacaacggctagatgaggtaagtcctattactggccaccttgccagggtgctccgtgttctcttagattctgaatttgtctggcatccatcacagggccagttgtattctctgtatatttttaattttctgtattcttgatgctctggcatttgtgatcttgctga

SEQ ID NO: 315660 - DNA, 4001 bp, Homo sapiens
tcaaattctgtggttttggctgggaggaactgcagttgatgatcaaactgtttaacctttccctaggacacagctagaatatgtttccaagcctccccaacacgtgtgactgtgtataattgagttctaaccacaggaaggtgagcagaagtgaggtgtaaccatttccagatctggctcataagggtctcccacgttctcactgtcctctatgctctttctctgtgcacagcttgatgcagatgagcaggtaaccatggaagtcgtgagctgaggctgcagagtctagagccagagtgtggaataaacttgggtctcaaatcacccctggagcaaagcacccatctaatcaggaacttctactttcaactttacatgcgtgagaaatgaacttctatcatgttagagtgagtatacagtttttgtgtctgtgttttagtagctagtgtcaccataacaaatataattcacaacaggatattcacttttcaaaatcaagttgggtacagtttgaccaattggctacatgattaggaaaatatcttgatcaaatagttttcttctaaacacttacatcactattctgtactcacactgtaaagttttatatcaattactgaaaatcatcccaggataattaagaatgaaatgaaatggattatctattttcaagtctcttctatgatcatctttagaagattaattctgaggccctttattatgctctgtggtttcaggaaatccttacacggcgcccttgagagctttcatactgcaagtcatccattttcctcccctcaaacctggcatcggagtttattgaaacaaagcaaaataaaacaaatagacaaagctctacctccatcacttctgcagtctacattaaccccacgtccagaatattcacacctcaggtctttttctcacaattgaaacactggttcagagcctaacggaaggtcttggaggtaaaaacacaacttggggcaacttttccattctgttctgcatgaccccaatgggacttctcagaaacccctctcatgaattaaactttgttctgtctagagcattagaataagcttatgggcacctgccaggagattataaagtgggccatttaaaagatgacagatattgagcacccttgaccctgtagaaagagtgtacctacttgctttccctagggcccttaatggtttataaaaacaagcactcactgattcaaaaaatatcctcattccacagtcttgccatgccttctttctgagcacatggcagtcagtctctagcacatccagtgtaagatagaacagagatcccaggccaccctgtgggaaggggtagagaaatgcaatacatttcacaggaagtagaaacctagaaagaccacacaaaaaaacccctgctttatggcaaagccaaagaatatttgtgaagattccccgtaaaccattaaatctgacacaagtgtcagagtaggatcactgttaacacttgtttttactaacaataagtgcgttgttgctgaccctggcagaggagaacagagagttctcggcagggcttccaatacagaaaacacctgccagggtgtctctgggttccctcaccctggccagtctctccagcttgcccacatccctgccccagagtgggaactgtccctacttgcccgtctgtattcctgggcgtcgttcactcggttgagtctcagcacatagccatcctttctgtctttgttaatatcccgcagggcaaagcctgcaactgccagcacatctgagtcattgcagccccgggagagcagagccgaggggttgagggccagctggggtggagacattgctccgcagcacaggactaggatgcagagtgccaggggaaggagcagacccattctgtggagaacaaggcccaggatgggtcagtttgtggagctgcagggactggctggcttgtaaggctctttaaggcagacttgagcggttttgttacaactggaagggctaaccaagttcaccttgaattctgaacttggattttcctaagtcagtactttggatagcatttcccaatgattctaaccttagacccttgagcaacctcatatccacctgtacatacaaatgaatttaagtttcccaactgtttcctgagaaatcataacatttgttcaaggctcttatgattagattctgatttgcaggtcccctcctgaataggaatatggaggactgtcccattctccccctctcccctaacacctttgctgtggaggtctccttggccactctaatagttatcttatgtcccagtggtgcttggtgaattcagacttcctggctgacactctgtgtgcaaagcccttgttagatcagggaggtagttgaaccccacagtcatctgccagaagcacagttgagattccttaagcactttggccatctgggtggaaaatgttctacttatcatcatttaagttatttttaaacaatgactttacttaaggggaaaaagtcaaagagatataaaaagttctcacattgtatttcaagcctattcttccttttatgcatatgtatggaagcaagctcattaagagactaaagccccatactcttgctaaaagaaagatactgaagggcaggtgggtggcaacacattggttgggactcttgccttctttttttttttttttttttagcttctatttgtgattcagaaaggttctacttattgggaccatacaaaagacaattatcttttaaaaactgtatttcaacaaaaaacacatatcagcagtagtttgtcatgagagaaaagagacaaaatgggaaagaagcctctagaagaggttatcatgaagggcattctataaagccctagtccatgaggtgagtaaccaccccctaactctctccctactcctagcccttctcttccttcctgtccctgtccaaggattctgcattcaaataagtttaggaactgctgaatccttctgtgtgcttgctggtacacagtggtggctattgtgtaatgctgagaggattatcctatcctgatgagggctccaccctcatgaatggaatatgccattatcttgaaagtgagttcctgataaaaggatgtgtttggtccccttctctcttcctttcacctgtgtgatgccttccaccatgttatgatgtagcatgaaggctctcagcaggtatagcccctcgatcttagacttcccagccccccaaaccatgagccaaagtaatttctgttcattataaattccctggtctctgatattctgttataactacataaaactaactgaggcacagccctaattaatttctggagagaaatagtttttgaggattgattgaaaaacccaaatctaaagatcccagctctgtggatgtgggctgtaggcattgttttcaaataggaacgatactagcaaaatgggtacagaaaccagacattcagattctggggcacaacaaaggtttagcttcagccagtgaggagacaaacattcattgagcttgagcaacgtacagaaagaggttgagaaggatctggggcctgaggatgcagaacaaagaggaggagaatggtctgggacctgaggaatatattagacttatataggtgaaggccatgagtgcaactaaaataaaaggcaggactcaaacagataaaaagatccaataacatggaaatcgtgcaccaccacttatgcacctgggtttcaacccagtctcaaacaacctgagctggccttctcctaggctgtggagtatgggagccctgggagaggaagcaggggaagagtccagcctttggtgtcaggcagtcttgggtttaaattccacctcttccactgcacggtaagagggcctgtgacactgggtgtgccacacagcattttgtttccttattcataaaacaatggcactcccagcatatgtatacatgcacagttgcacctgcctgtagaa

SEQ ID NO: 315661 - DNA, 4001 bp, Homo sapiens
acccgggggccacgtacctgggtgtggataattttgtgcctgcagagcgtgctggcctggcgaaagcctttgccgcagactttgcacacgaacggtctggctccggtgtggaccggcatgtggcgggtgagattatagtgagcgttaaacacctatggaaagacatggggggccttgtggtgcgtctgtccgagggcctacaatcagccccgggggggccacagcctacctcccccaaccaacacccccttcagaaaccagagcctttttcagtttgtaaagtgctgcccaaactcctgcttacaccaatactgtgtggccgctgacaagggcatccccattttacagaataggaaactgaggcccaacgaggctcccagtttgggtagtcaactactggggagctcctcagcttgaaaaaggggcattccaggctgccccaaggaagccgccgccgccgatcgcccctcccggcccccctcgccgaaccctgggcctcaccttgccgcacacctcgcaggtgaagtttttgggcttgccatctgcggagcctcctggcagcttgctgtggcccttgacgcctccgcgctcggcagtcagggccgagttttccttcagtacctgctccagcggcgccggcaagcgctccttatggggatagggagccgggtgggggaacttgtccgcagccaggccggccagcttggcgttctccagcagaaagagcttggggtgagcagccagggcggcgggggcctgcgcattgaggaggccagacgggaagaggtggccgctgaggagctcagacggcgggtacgcggtcgagtccaggtagttgaagtagtagagcgagccgctggccggcagccccacagcctggttgatgacctgcggcttgatgaccctgcccgcgggcagcgcggacggcgccaggcccagctcggccttgcagcacacgccacagttggttttgcacaagccgctggcgccgcacactggggcccccccgccgccgccgccgccaccgccgccgccgcctccgccgccgcccgcccggaggctgcttttccagagctccgagtaactgagcagtgtctttgacggcacctcgtagcctaggggctggagggggatcatacagggcagcggcgagcagaggttgagcagtttcttgccctggctgccgtccgcctctagcgctccaggccggggctcaaagggcgcacggggctccgacgtcttggccatgatgcgctcgatggaaaaggccagtgtcttggaagtggccggcgacgctccggcgcgcgggcaggccgggggcaccatggtctccagggaagccgagcttgccatggcgcgcggagctgagccgagccaggctgggccagggcgcagcctctctcctctaagtctgcattccggaaaaggcaggggggaaaactgcaatttaataagcacctagtcgggcccgggtcacccatttgcattcaaatgaacaggggcaaaacaaagtgcacccaagggtaccaaattaccgcccattaacccggcgcgcaaaggaacccaccagcccctgccctgggactttgaaagggggaagaagggggagggtttacaaaagaaaagggggggggcggtgagaaaagagtctcaaattaacccccctgagcccttccctggacccgggcctctgccacgcgtgctgggagctggacagtgaaggggcaaagttaaagaggaccggagagccacctcgcatttacctctttcccccaccaccaaggagatgcgttccgagccatgcagcgtgtctcttctgtcacattttgatggcaaacatcttcccctccgcgtgagatcactgtcttttacattcagctgacatcacatgaagtcacttgaagtggaatgacatgggcggcggcgcggctcccgtagcggcccctgtgttcccccgcgcctgccggccgccgccaccaccgcccctcaaactttaaaaggaggcaactggcgcccgcgctcctctcgggaaagtgcgagcggtttgcgaatagggaaagagggaagagacgggagggggagggggaggaatcgtgatggttttgccggtggaaggaaagggggggggggacccaaacccaaacctaggcagagttccgtgcgtgattcacaactttggaggcctgcaggtttgggggacgcggggagggcggagggtcccggacgcggcgcccccaaagggcccctgggtatcagtctagtagccgaagtatcccttagccctccgcagccgagctgggcatcgtgctaataaactgccatttacccacggaaccggcgccagccccgaacacgcgcaaatgataattacctcattaggatgtggcgcatggacgcgggcgccgcgtttggaggggggaacttgttaatggggaaatattaatttatgcaaaagcaatgagctcgccttggctggcgtcggaggtcgggagaaagctcccactgactaaggacgaccccgaagcgtcacggagagcaaggccgctcgccggcatctcgggggcctcggcgccgcgcaggtgcgcctccagctttatggccagctctgggtctgaggctgggggagactaaaccgagagctggaagactttcggagatcctaatagatcagaattgttgatttatgatcgggtttctgaggcaaagccgagttctgcttctggtttagggctgcgtgcggggaggattcggagggcagctctcccagctgatgggtacttactgtttgtataattgagaaggtcccatctccacctgtttaaggagcagattgaaacagcagaacctccccctggatcctattaaaacgtttttcctcctaaggccattcagtcgaaccaattttccgaagtgattcatagagctgaattctgccaaggcagctctttcacttttagccactaaagcaccgcgtggaaccgggttttgtgtttttctaaaataaagagaaggattatcagagaggagagggagggggcctgaagggggacgggcagagacttagtgtggccagaggtacaagcagagggaagaaaagacccttttctagacaggccccaagtaagttcggaggaattcagcgttttgtgcctggcgcacaaaagcagcgcgctccgcgcttggtttggaggggctgaattcatctgtttgcagaccattccacctgcgtatcacaacaaactgctcaaagacgctccagcactttcaacaggccgggtgctcttggcgacaacaaaagtggtcgaggctgagggttcttacggaggggggtggtggtggctagcaagagagcgagcgagagaattaggtttaggaaagggggaggactgggtgcaagggttttttgaaaagttttggctggttttgttcgcgggacaattatatcttgctagccagcttttgcaagaccacgagctttgtagccgcaatcacagtttaagaggattaccgtggatataatatgagcaaacagggtttgatagtgaattccatctccaaagacacacgatcatgtgaagccagagaaagtggtggtagaggtaaaccctctgtttcttcacccaggaacaagtcttgagagggctgagtatcctgtcctaggcccctccatgctgcgaaacatccctggagaacgttaagggacgggggagaaaagctctagttttaacttcaggcaaatcgctccctttttcccttcaataaaagtctctttccttctgcccacccatccagttgcggctcctttgaggtgcaattttaggcaggatttggacatagcaggtaaaggaaggaaaagtgtacttggaaagaaaagagagggaacagagagaggtccctgagggaaagtggcttggaggtggactgcaataggctaatgctctcaccctgccaaactctgaaactgcccctaaattccgcaatcataagtctgttcccataac

SEQ ID NO: 315662 - DNA, 4001 bp, Homo sapiens
ttgtgatgggcttcttggtgatgcaggccaggtcgaaaggaggtgggatgtcgaccatggaagaaggcgtggaggtgccgctggacggaaggtggtttctctgggagaaactcccagaggagccaattacacacgacagagagagattgtcctctttcctctttatcctgtggtcatccaaccctgacccctcaggctcctggtacacggacactggaatctctcggccttccacggagaacgaccgagggtataaagtaaaggccctgggctttgctggcaaggccctgctggcttccaagggcttcccctccaatgacaaaagcgtctttcccacctcctctgcggcacctccaatgccaggggctgacgagcccgcctcaggtccggtttcttcagggacggtttctgggacatagccggccaccttcccagagtggggccggaccctcgtgctggtgttcttcctgtccgcgggaaccaggccaccctctgcctcacagttcaattcttctttcgagccataaccacccagggcgtccgatgcagcctgccctccttctccaggggccgcctgaccgggcaggcccactcccatcacataggggttggccagtgcatcatccaaggcctcctcctccagcacgaccaccacatcaggggctgcgggaccctcggccgctccaccctgtagggagccacactggccacacaaagcccccaccatggggttctcctccgcacgcagccccagctttggtgcctgctctgattctaaacctttcgctgattcagaaagaggagaacagctctcgctgcaaaaagaggtgctctcagttgggaagaactcataggggcttcctgtgagggaagtcacgaagtcctccatgcagtcattctcaaaagggacaatctggcagctctcctcggcggactcatcctgtgcatggtcctccagggtggcggctgccacttcttggttggttttcttctcgtggtcaggtggttcactgaggtcaacctgttccccacctgtgacacccgtggcctcttcacatccctcctcaagaacttcagggcagtctgtggctgtctctgcctcctggaccccggccagctcctccttctcagggggctcctcactggtgtcctcagcatcctgtcccatgtcctccgtgggcctgtcaggacccgaaccctcatctgcccctgctgggtctgtgctggcacagccttcctcatcatcctcctctgcctccccgggggtgtcggggggctcctggtcctctccatggatgtgaggcaggaggaggtcgctctggaagaccccctctccagcccaaggcccactgtcctccaggctgcactccctgtgtggctgcactagcttctcttcctcctcacttctggacacctgctccagtgtccctggctcatcagcgcagccctccccttcatcctcaagagcaaggtctgtgccttcctcaccctccctgctcagcgctcctgcacccggagcagcaggggccactgaatcctcaccagctcctgtaccctccaggccacatgcctcgcctccctcttcacgctcctcttcctcttccgcagaggactcgggagacaccagggctttgttccccacactgccctcgtccttgggttcatcctccctcagcggaaccctggggaccacgatgtaatcctcgtcggtctccgactcagagcactttgggatggaccggggcccctcatcaagccccctgtctacacagggcagccgcccgttgctgcatttgttcaagctgtcattcaggtacacactggctctccactcgtttggggcagtcagcctgggcttgggggcaatggggggcttcggacccctgaacatggagtttggactgtgaagactctcgggcctggctgaggaagggaatttgggcgcggtcactggcgtcagtggactggtagtctttggcttgggagcgacaggtggttttggtgaatctagatgacaaaaatagagaaaaggagaaaaagtacaattaactttattgccattcagagtctcctacacaccagttgcaggggacgccacagatggttccgtccatccatgtgaagcccacctcccgtgctttgtcttaggcttatgccctccaccagaatctttaaaaccccttgattttccactaaagattcattctgtaaacaaagtgaacagacctttcttctacacgcagcccaactaacgaaaatcaaccaaatgaaatcctgtgctcctcaaatgaagtgtccaggtcagtgcattcattcatccagcagctactgataaacactttctatgacccagcaaccatgggaaaaggctgaacttgctgtcaccctccctgctgccctcatggagcttacatccccccttctacagctactccattgggtacccactagctacacgcacagcactgcagatggcagggtctcctagggtcaagaagagaaaacagactctgctgagaactcacagttgagttacaacaactggagggtagagccggggacccttggaatattatgactgaatagctgccatttcatcccttcatgaatgacacgccaaaggtttgaaagagtgatgtgtgcttctgctgggggtcacgtctggaatctgcatgcttcaggactgtgtccagccaggcctacacccaaatttcatgggcatgcaaatttcatgggagaaattatatagtacgtgccaacatggatctctggaaaaggatgtacttgccacatggatatctgtggatgctgaggaccttctgaccatggcagaataaaagatgtggtgcagactacaatgcaactggaattagagaagcatgggctgctgtggccagggaagacctcttaaagaaggtgatattttagctaagatttgcaggataagaaggatctagagaaggggaacggtcaaatgagtggttgccaacttttgagctcagcatctctctgctacaagactgcccatgcctcctccctggcttccttgtcacctgcctggccccctaagctcccttgcatactgcgggcatagaatccatctccatcccaacatctctgcttcaaaagtactgcatggatccctgccacccatagattaggactcccacgtttctccttcagcctggtctaatctcccagctccattcccactaaggcttgggtatgacacaagtggcctcaaaataacagcctggctcctaacaggagggaagatgaagcagactgccgggagatctctgccagcaaactcttctcttcccactcatgttaggcccagtgttgtccctgaaacatctaacattactaatctctaatccagggctgtccctggaatgtgagccacatgtatcactacataggcaattttaaattatcttgtaggcacattaaaaataaataggtaaggctgggtgcagtggctcacacatgtaatcccagcactttcagaagctaaggtgggcagatcacttgaggtcaggagttcgagaccagcctggtcaacatggtgaaaccccgtctctactaaaaacacaaaaattagccgggtgtggtggcacacgcctgtagtctcagctactcaggaggctgaggcagaggaatcacttaaacctgggagacagaggttgcaataagccaagattgagccactgaactcccgcctgggtgacaagagcaaaactccgtctcaaaaaaaagtaaaagtaattttaacgatatattttattggactcaatatatccaaatattatcatttcaatatgtaatcaatatataaaatgtattaatgaggtgtttgacactcttttttcatactaagtgtcccaaatctaatatgcattttacatttgcagcacacttcaatttagactagctacattttacctgctcacgagccacatgcggctggtggctacggtactgtccagcacagctctaac

SEQ ID NO: 315663 - DNA, 4001 bp, Homo sapiens
gatatagcctctttttatgattgaacaggaattagtatacacattggaggcaaaactgttaccaagaacctttgtcaaataactaaatttagtgaccaaataccaggtgtcatctaagcaagaaaaactgtttcatagtaaaatgatattctttttctgttgttaaccttatgtcccagaaatacttagtcagctagaatattacaaacctttatatgttaaggactgcctttttattttaaaatggagtataatagagttaataatatatgcctcaaatatacttatagacatggattctctcatatgtgtacatcattgtcagacgtggagatgcccatcaatgtatcataagaataatctgcctgaactgaaaattgcctgctagtcttaatccatgttgattcagctctttttatactataaatgcttgcctaggttcaaatactttaaatctaccaattaaatacttaaaacactttattgaacatagaactgctatcattcaacactccagtttcattaatcagcccagaaataggtaactcaccaccattccctgatcctaagtacattaccacagtgactgacattcctggtttaaaaataaaatcttgtttcaaatatagcttcccgagttctgggtaatgaatatagtttcataaaagttgacatcatttcttctgatttcgccagaattaaatacatccagtatgcctcctggatatctgaccaccatatcactcaaggctctcacaacctggtgggcgttttaaggagaaggagaaacagacctgcatagatggggttaaatccaaaagatatctaatcttgtggttagaatagtcgttgtgtttatgtgtgttcaatatgccattcagaagttgatttttacagttcatttatcagttggcatgcatacattatgcagatttgcttatgaggagaacattaatatgtacatgtccagaactagtaaatgcattatgcttggaagccaagcagtactcccatacactgttcttcttagaggtcagttctaacgcatgctgttccaaatagacccaatttctctgctgatatatattcaaaatgcagtaggatgtggtcatacacacccagaaataccatcttcatgaggtgggggtggtgaaattcaaacattttttttttagcaatgcattattggatatcaggtacaaacgtgcctgtcagcaattctaaagcaaatgaaatagatttatttgagtccatccattatacagaaaagatattgctttactaacacatacctcctcctcctcctccattttggggggactctccccacctccccccaaaaaactcatcacagttcactacgcaactgatggagtattaaacactgtcttccaagctgtgggagttaaaaagaagtcgccttcctgccacacttccccagtgctgcaatggacatagcatctcctcctctatcgacctagtatgatgctcgctccccaagcactgcagtcccctcgccgaggattgccttggccacacgcacatgcagcgggaagtcccccgatagggacaaccacatacctttgctctccatttcggtccctttcgagtgctgggaagttcaatggaagttggccggaagatgtgggcccgcttcagattcccaaatctgggaagccaatctgatgatttcgcccgtacttccttccttcccctcaggcttcctgaaagatgggatttcttaaaccttgaagctgcaatcagccaccaaaggacacttaggagcagcagcagattgcctctacaggggatacgttgcgacgcgcatctgatactgaaatgcatgcacagtgcccgctcagatttttttttttttttttttacctgggtctggaagctgcaggcaggagctgtcctccgagcgtggtgctgcaggtgtagtgacagatcatcccactttgctctctggatgcacagcagatttgcatgggcgctggcacgcatgcgcagggcgtcccccctccccttttcaccgcctcccgctcccccgcccccttcgcctccctccccaatacggtcctcagttatcccagctgaggagctgtagcattcggtcacagggaagcgctgctaaaaataaacgccggaccggattttcctctgcaaactagaaaatggattggactagtactgcgtgcatcaggacgaattactgaagtcttagaggaggctagtgtctccaggcagggtatggttttattcagaaggcagggaggagagatttacgaatcgtttttaatgttcacaatttgggtttctctttctacttgctgcagtaactttccagctgtctgcttccctctcctctccccactgacttcacattgcttgttatattcctgtatgtgttttgttttgtttttcgagagtggggtgagagtagttatggagctgtcaaaggttaatattctctcgcttctttgttactcaaactcagtgttttcctgcctgcctccacctcaaaactgttccatgagcaggctccaaggcttctaaagttcttcaaaaaagccactgaggatattttgaggtgctctttttagcttttttccaacaacctgcaagaagtccccaaaggtggggaggcgtcttattgataataagtacttccaaaagcaatacctaatcatttttgtgaagttgcagggatagagtatttttcttgtacagagctctagaggaagatgcaaaaccacaaatctcttgaagtgctactttcatatcaaaatatttctaaagcccacactgtatttcgtttatatgcaaaatgtttaacaggaaaaattgtgttgtatttactacctttttttttcaatagtccagattttcctgaggtgatcatctctccttgagaataataatcttattctccagaagtccagaaaactctgttatctgaaatggttaaggaaggagatgtgcagattagtcacatactctacttcatgaaagatccttccacagtaggcttctagtcccaattttcaaaacattgaaatataataaaatgtactcccaacaagaaacctggagttgtatctaatttaatctttttctggtgattcagagggcatcctttgatttttccaatgcctgagggccatgattacaaatattaaccacggatggttcagccagacatggacattattagtggaggactcccactaatgaactgctgtgggtcagcaacgcctggatccattcagcatttaggagtatcggattgcagaggccacaacctagggcctactaatttttaggttctccaactgtatgccaaagtacgtgtttggaagaatcataaaattcaggatttcttttcaatgttgaataggcttaggaagtaagcttagggtgggagtagtgttgctccttaagaacaatagtctatttcattgagataaataatttctgctcttaatactgcaccccgttacatgttctttccttctcaaaggttttagaataggagatatctttagaatgcatctctatgtactcttcatatttattcttttacagacggagaaactaaaggcaggggaggagtggcacttgaaaagagtcacatggtgaaccagatctgggctcagaacctaagtgtcatacctcaaaggcagaggcaagccatctatagtccagaatgatttttcatataactgccttcccattatctacagtgaataagaacagggagaaccttctagttcataaattatcattatttttattcataattttaagaacccagctgctttattaaatagaaagcaaatcaaatttaatgcaaaatttgtgttctgacattcaagatctttccattcttctccaagcttaactcctagacaacaattgctattatcctaaacaaacctcaagattgtttttaaaccaggggaaagtgggatcacagacccccactaccacaaattatgcag

SEQ ID NO: 315664 - DNA, 4001 bp, Homo sapiens
ctctccgcaattctgcttccattctctcaagctgggtacactggcctggcttgacctggaaatcatcatgtcaaaactttgggtatccaatttccctttgcaagtagagacacatccaaaagcaatcatctgcggtcggggctgcagaagagaattagcttcagaaagcccacgccatgaaaatctctgatcaagctgaagttttctttacactccttgaggccaaactgtgtatactgtcttgttccctcaatgtctcaaaagtgtgagtgtgctaagtatggtaataggacagaaacgttaatgagcagagtccttggaaacaatgagaggggttggaagaaaataataggaaaatgaagactgtgtaaaggaagtgaaagagcatgagggaaaaatgaagaggtgagaaattgacaagggcgtctgaaagatgcaatgccaagtgttgctggaggaagagttggaaaaataataaatttaagttcatctggtgtctactaggtgtctatcatggattatgagggataagggaagggctgtattaatctttaggtcctcagtgggcagcgtaagtactgtactctacagacggatggatgcatggacggatagatgcatggatggatggatgggagagcgggagagagagagaagagatgaatgaatgaattaatgaatgaagtggtcactcccctcaaggactctacaggctcttttggaataagtgcatctatacatgtaattcttctcctggtcaaaccccggactgatcaaagtagagtgtttttgctgaatatggggcaagaagctattaactgacagagtggttgaaagaagtctggaaatgagagaagaggggtcagaatgtaaaagaggaatcctggttcccttccacgggggtcccgaggtgctttgaggagggagaaagagggcgtcccctctggggagcccactctccgggcttctactgacctggtctccgcctcaccggcctcttgcggccgctgcagaagcgcactttgctgaacaccccgaggacgtgcctctcgcacagggagcgcccgtctttgctggggctggagcggcgcttggaggccgacactcggtcgctgttggactccctcgcctgccgcttctgccggatcaaggagctggctatcgccgcagccatagctgctcagcgagggcctcaggccccagcctctactgcgccctccggcttgcgctccgccggggcgagggcaggacctgggcggccagggaaagggcagtcgcggggaggcagtgctaaaatttgaggaggctgcagtatcgaaaacccggcgctcacaaggttagtcaaagtctgggcagtggcgacaaaatgtgtgaaaatccagatgtaaacttccccaacctctggcggccggggggcggggcggggcggtcccaggccctcttgcgaagtagacgtttgcaccccaaacttgcaccccaaggcgatcggcgtccaaggggcagtggggagtttagtcacactgcgttcggggtaccaagtggaaggggaagaacgatgcccaaaataacaagacgtgcctctgttggagaggcgcaagcgttgtaaggtgtccaaagtatacctacacatacatacatagaaaacccgtttacaaagcagagtctggacccaggcgggtagcgcgcccccggtagaaaatactaaaaagtgaataaaacgttcctttagaaaacaagccaccaaccgcacgagagaaggagaggaaggcagcaatttaactccctgcggcccgcggttctgaagattaggaggtccgtcccagcagggtgaggtctacagaatgcatcgcgccggctgcggctttccaggggccggccacccgagttctggaattccgagaggcgcgaagtgggagcggttacccggagtctgggtaggggcgcggggcgggggcagctgtttccagctgcggtgagagcaactcccggccagcagcactgcaaagagagcgggaggcgagggaggggggagggcgcgagggagggagggagatcctcgagggccaagcacccctcggggagaaaccagcgagaggcgatctgcggggtcccaagagtgggcgctctttctctttccgcttgctttccggcacgagacgggcacagttggtgattatttagggaatcctaaatctggaatgactcagtagtttaaataagccccctcaaaaggcagcgatgccgaaggtgtcctctccagctcggcgcccacacgcctttaactggagctccccgccatggtccacccggggccgccgcaccgagctggtctccgcacaggctcagagggagcgagggaagggagggaaggaaggggcgccctggcgggctcgggatcaggtcatcgccgcgctgctgcccgtgccccctaggctcgcgcgccccggcagtcagcagctcacaggcagcagatcagatggggattacccgccggacgcaaggccgatcactcagtcccgcgccgcccatcccggccgaggaaggaagtgacccgcgcgctgcgaatacccgcgcgtccgctcgggtggggcgggggctggctgcaggcgatgttggctcgcggcggctgaggctcctggccggagctgcccaccatggtctggcgccaggggcgcaggcggggcccctaggcctcctggggctacctcgcgaggcagccgagggcgcaacccgggcgcttggggccggaggcggaatcaggggccggggccaggaggcaggtgcaggcggctgccaactcgcccaacttgctgcgcgggtggccgctcagagccgcgggcttgcggggcgccccccgccgccgcgccgccgcctccccaggcccgggagggggcgctcagggtggagtcccattcatgggctgaggctctgggcgcgcggagccgccgccgcccctccggctggctcagctggagtgctagctccgcaggaaactcggggcccgggcgagagccaccgagatggcaggtgggacgcagagcccgcggcagccagagttcctcccgcacggcccgccgacccacggaagagcgaaagagcgcccaggtggggccgagctgggggccgggcccctggagcgctgggaagcacagcgcgctctagtcaggttccctttcctggagccctccgcttccagactcccttctttcctccctccctcccgccacccctctccctcctctctgtgtcttctgtctctccccttttctcctctctacgcaatcctacgtgattgaggtttggatgagaaattctcagaggcagagcgagggaactgcagcttgggtctgctccgtccggtccctcccacaagagaaacacaaccacagtgggagttaaaggaccctaggtgcgcaaagaagaggtgggatgggggagctgagaaaatgcagtccacactctctccaataagcttgagcacgtagaattctctgtttagttaggaagaaagtgaacactggagaaagtaaaaatgacctcttggaccttatcgtgggccccacctatggctcattttggaacaggaaaaagtgtttcccttcttcttggaacccagatttcttggttctgtctggaaagctgcaaagcaggctcagtccctaaaaagagagcccaaataagcagcctgcacagaggatgactccaggtgcggcgagggagtgatgtggacaaggacagtcaacaacaagctgtggaatgcaatcaggtctccagacgtgaatgtgacgacatctgatgttggagacactgggcagaggagttctccaagttaaaatgcagcatgaagcattaatcaccctccatttatgctaaagtctgggagcggctattggtttctacttacaatttctcttcatatatccctaatctctctccttcagacacttcacgaagcatctaggatagtgcgaaaggattaaatgtatgatttccaagcacag

SEQ ID NO: 315665 - DNA, 4001 bp, Homo sapiens
ataattaaaagattccaaattctgtagccagaaaggttggactcctcctcagctctgtaaggtaaggtctttctctaagcagagactgttaagcagaagggcttacagtctcagtccttttattcaccagtgttttaacttgaacaagttacttaactttcctagccttagttttctaatctgtaaagttgatataaaaatggttctcactctcatatagcttttaagaggattaaattataacacatatattttattgaatatatattatattgctagctgtgtaatcatgggctatcttctcaagttttttctcatatacaaatgggaaatgtagtattaaaaagagatcatgtgaacaggttctaaatggtcaagtgttagtggttttggaagcatgtacgttaatacttggaacaccgtatacaacaatcccatatctaacacttagaacagcatatgcaatcaataacaacacacacacacacacacacacacacacacacacacacacacacacacacacacacaaaccctagacttctttctttactaaatatttctagtccaggttgcagcaggtggacacaggccggcagccatgaacgcaggtccacatgggagttgtagttccgagtcaagcggctgctctacagaacggctagaagcgagacttcgtctcccaggagacatctcgccgtgcaaaatggcacgccacgaggtggagtacctgcccgacgagaaacaagaggcgggactgcaactcccagaagcctccgcggccaaggcctcaggccgcaggctgaagccaaggagggagagttcaggtagatccggcttaacatcaggtgcgagtagggaccacccttggtagtctgggcccggcccaggtcagaaccttactaaaacaaccactgtgagtattttctattggtcccagcacatttctgagagaccagaataataatagcagtaaatctgcaagtggtaaactttcacaagcataacctcaatttagatttcggcttcaggcaacatcctttggccacttgacctgggagcattgagctccttgtttcccagataagcgctgtgagtggctgttccaaggtaacacagcgagggcagaatgtgagcctacagagaaatctgcagatgcatctcaagttccactaacctgcctccttaccccccaccaccaccaacttggatatacctttaaaattcccccctttgacgctaaaaataaaaacaacaaccataaaataagtgtaagaaagtccgaccaagtaccgatgagttctcccacaacaataaattcgatgcctctttgcctgtttttgaagtagtaatgtaaaattatctcccaaaatgctgccttctctatactccggtttgctcctgtcctgggcacgtgttcagcaaccccttaggggaatccagagctgcgtgtttaacacagacctgttgggacggattttcgctacttgtctatgaaactgacgaaccatcccaaaacggcgggtgccgactacacccccagagccaagagctgtggcgtccccggacccgctggcgtggccccgtgcctcagtttccccaatgtataaacacggtggaggaggaacgggttagggctagggtcggtgcttgggaattggggggcccgagtccccaccctgagaccctcgtggggcggaagagtactcgggacagaagcccaccgccccgtgagcggcgccggccccactgggctccggggtgatgacctgacgcgcgtggaaacccagacccgcgccccagaaacagtattccacttgggcttgcctccccgcccctaccttccaggatgttgacagctgggaatgaaaggcagagggagggagcgcggggccggagcgccgcctgggagtgtgcccactgggtggccgcctgagggacccgggaacagagggcaaaaagtcctgtgaccggacagagcagagcggggactgcaattcccagaagaccccacggtaggggcgggacccaagatggccgcttgtctggggacaggagcggaggccaatacgcgcagagcatgcgcctacgccgggccaattgaaagccatagtgacagtaaccctgattcaggggcgggaaacactgaccacagaagacaagttgaggtgagaatccccttacaagggggtttggggcataaatcgcacaatctttggctttttctaactagaaaaagaaacatgattcttttcacgtgtaacgaaaggctgtaccgcacttttgcttttttctttcctcccaaaacgcgtttaactatcccttcacgacttcccactggctggatttcttttcgtttcatttccccactctggatctttctggattccttaagccttcttttctttatgtgtctctcagaaacacagacttgcagtccctggcttgatccatcaaataatgtggtcatttacgactacgctcagccctccctggcatcctaacaaaattgcaccacatgcgccccttctcttttcctttctgtcttttctgtgctgtttttctccttagcatttgtcgttacgaagcattgtataaaatttacgtatttatcttttttaccatcttactttctcactagaatgcaagatccctgcagatgtggatttttgttttggtcactgtagtctttctagcacctagaaaagtgcccagcacatagtaaatacaccgtattttcaataattgaacgaaatctagagtgacctttctcccctagtctccctttctctggtgcagatcaacccgtttctgaccaccatggttccttgtgcttgttcccctgtttaatccaaaatcattattgatgtattctgtgccaaatgccatgtgggtgctggagaaatcattgattcagacccaattcctaacctcaaaatgctctgtctagtgacgtatgaaaagtaaaattaattttacaataaatgcaattacaaattgcagaacacctacgtaattttcacaaggtcatgcagctcctaagcaaggactagattcctggctgcagactcttgccattacatcgggaaaaacaaagagcagttttctctcagacaaacactaagataggtccccattttccttagcaccatttcctttctctgtctctcacttttttatttggcctgattcattacatgcaggcaattacatcaagtcttagatctctcattatttctaatatttgaatcccatggagagtagcaaggtgtcctacaaagtgtcctggtgtgaaaatctgatgtccttggaagcttgactctcagagaatgtcacattggattatagttcatcacacagacaccatggccacataaaatattatcaaattgtgaataacaaagtgaaattgaaaaaaaaaatatagttaaaacagcaggaatgtgagcaatatatgtacagactgattttgtgcatagagattaaaacacctgttcaggcttcctagcctaatcttctgtcaatttggggtcatttcctgtaatacaattctttgttgcttttatgagcacagacttagctcagcagtcccagctattctcaagctgatcgacatgagagatttcaacacatgtgtcagcagccagactaaacgtggaagaaaatcagaagcatttgaaactgtaaagctcaataactttcctcctcctgagaaagcatcagcctataatcattacatcttctacttagcagtcaaaaggcaaatgtcatgaacatactcagggtctaaacagtggtgtctaatgattattgcactgttgtcagatagcctaatatgagcacataggtattacttcagctgtggataatgctgactgctgggctcaaggtcacccacgaccttgagcaacagatacattcacaaagagcatgaagacatagaacttgcattggattcaggaccttcaagtgccaagacaatcagtgggaggttactgtct

SEQ ID NO: 315666 - DNA, 4001 bp, Homo sapiens
ttgctaatttattgcttaaataaagcttaagcaaaaaagacaattacacatgaactttaatagaaggtaaactctaaaaataaattgtcactctttaaataatgaatgcttttctttgctgcagaacttttacagagtatctttgtattggttagtataagaatccaaaccccacattgctttgggaaattactgagaaaattctcatcagagtagtagaccttaattacccaggtggaaagagcccatgaatattattgctgcctttagaagtttttattaacaaacagctcttacagtatttatgctgatttttaattaagcataatgagagtttcataatagtgtcaactgataaatgtagagaaatgtttacttggaatatttggctttgggagatagcagattgataaatcagaaaatgtcatcacaggaaaaacaagtttaactgtagctaaaggaacattgctgtaattgcaatgcattctctctagtattaactacaccatgttctcctttatgcatatctaatacacacgtggaatatggtagtgtagttaaacagtgtatgtgttgcacctcttctattccttcctgagatgtgaacagataatgaataaagaaagatatgtaatcattaattggtatggaaagaaaaaagaataactgaatatgtcacaaccattttaactgaacacatatctctcttcagtggagcgcctatatacaaaactgtgcagccaccctaaacattgaataatcctcccattgaggagtacagtgagcagaattttctgtgatatcatttggcagcagcctagcatcatttcccatttatatccagatgtgatgtgcccatggatatccagtcatcttctgtggggtgttacagaacaagttcttgataggtatctcccaagacctgccaaaaaccttatctcagaaacctgcttctgttctctggctctcattcattaaatcttaacatcaacagaaggtaaacaaacaaaagaaaaaagatacaatatagttgccatttgaaaatgttagtttcttccattaatctttccatgaaaagagaattcctcctctgcaatttaacctattcagtataattctccattttcaacacattgtgatgattttgacactgtatattgatcattcacatcagcttacaaaatcaagctattaagaaggaaagccatttatccaaacatactttttctttaatttttgactatccatcttactcttaacaggataacaatttaaagtttcattttggttttctttcatgtgtatcactatagtaaaacttacctactgtcaggatagttcctctattttgcaagcaactcttagtcattttagcctaaaagtcatcatctgtcataagctcttaatcatactacgttcccttgcataatattcacaagatcctacttttggagagtggtgttggccgctcctagctggtgaataacacagaaacatcccaaagcctcttctcagcaaggatggggacacttagcttaccgtgcaggtaccgtgcaggtgttgatcacacctggtaattccttcttctcatccccaccaaaatccaacagtggaatccaggaccaacaacaacgttttcttcttctctttttggacaccctctcagtttttgttttgtaggcttgaaagccaccgagagtttgcaaccaggggccagtgatagctctgcaaaggagaggcagtggggagcccaacaacaagtaggcccaaacactaaatattgccctcttccctctccgggcagtgtccttcatgctctgaagacaggcagccttaccaaaactcttaccccacagcttgccagtctctgtggaagaaaggttctaactggactgggctgcaggatgaggtgacccaaaagccaggaaccatctgcgcagagcagacaagtagaggcaggcacaggctccgtgagcacgtctgtgtgtgtgtgtgtgtgtctgtgtatgtgtgtttgcatgcctgtgcccagcagctgctctccagattagaagacaccactctttggccagcaactctgaaacaccctcttaggtaattttaaattcatgtgcacatcttggctgagagtagaaacttcccaagcacaacctgggtcccattctttgctgtgttgctaccccagatatattgtgaaccacagacagcagtgctagcaccttaggaacagatgcccagatggacattaaattgcacctcattttgtaccctgcagccatgagctgatgtaagccttgtttgtgatttaagtaacaagggcatgaccccttctttgacacccataacccaaggcactgtaaacattcgctattattaacgctgtgttggactcaaacttgaatgcctgcctgttccatttagtgtcacaggagacacgagggcaaagtgctgaggaaactctagagcaacatcggaatgcatggtggtatgtttattattattatttgacattttgttttatattattcaagtgttaagaaaaccttcatacttaggattgctaaaatttgaagcatctaattttctttaagtaggatcacttgttcagattgaggggttggatagaagggaggagtttgttcatttattcaacaaatatatatttcagcatccattatgtatcagatcacttaccagacatgcctaccacctgcccagtgctcaagtcatgcattatctaatttaatcctcacagcagccctttaaattagtcctactcctggtgatctaatgagaaaaccaaagatcagaataatttaataacttcctaggatctcacagatgatagatataagactgaggattcaaaattgaatctgagttactccaaagcccatgctctttatttttaatttttaacatcaaaataatttcagacttatagaaaaaatacaggaataataaagaatttccatatgctcttcactaaggttctccaatgtttaacattttaccactggttgtattctccctctctttctctttctctctctctctctctgtctctctctctctctctctctctctctctctctctctctctctctctctctctgtctctctctctcatcctcctttccacccgtgagtttattttggtgtgtgtatatttttttctgaattaatttatatactttagtgtgattatcttaaaaatgtaagtatactcttctacataaccacagtataacaattaaattcagtaaatcaactttactttctaatccatagatcccattcaacttttcaccaaatgtctcaataatatcctttatagaaaaaaaatggttttttagtccacgattatgtgttgcatttagttgccttgtctctacgttccttcaatcttgaacagttctgtaatcttccttttttatatgtgaccttcacatttttgaagagtacgttttgtagaatgttccttagtttagatttgtgtgatgtttcctcattgtgagattgaaattgtgtatttttatggcaggaatactacagaaacaatgctgtattcttcttaatcatatcaggagtcacataaacggagttagtcttgtaaccaaacccacttgcttaaggtggtatctgttagatttactgtaaaattatggtttttccttttgcagttaataaatattttgtggggagatacttggagactaggtaaacatattgctcttaaataaactttcttagagtgaagaagagcattcccttctcctcacttatttttgtgtttatttatatcaacatgagctcataaattgctgttttattgaatgagttataaatcactaatatcattatttattttaatgctcaaatgatctcagatgtggtcctcatgtttttctgagtactttcttaccttctggcacaagaaaatgttccataagcatcttgtactttctgtgcccaactctggaattagccatatcttcaag

SEQ ID NO: 315667 - DNA, 4001 bp, Homo sapiens
acacagctgttagaattttgatggaagttatgattttcaacagttgagttgtagtttatggtacagatggtactctgggtatacctgaaacaataattgatggtttctgtttgtctcttcctctgttagattcagaagagcagaatatcttttttccagagcaggaatttttcagtttccaattaccgcttatatcagataaacaactcttccattgcatattctgtacttctccacagtgacatgggtgttggccccgctcttctcattatggtgggcttccctaggtttgaaataatagtttgtggaaaatcctacttctcagtactaacctgcagtttatatagcctatcctcaggccaaataacatataatttttcttttaaaatatgaaaaccaaagtcgtgcattgctccaaacaaaattagcaaaaacaaaaaaactgctatgaggcaaaaatgataggcaccaatgtcatatacttttaaaaaccatccaacagaaattattagaaatatacagatataacccacattttgagtattttttaaatgctgtgtttcaatgataaaatctgggatctgacattttcttctgacaattaaatataaaaacatgagtttgtaacacacacatacacctcagtggttatagtgctctgctcctctgttaaacttttactgtacctccaaacagttatcttatatggtcattttagtgccaactaaaatgccagcattttaaaatctcagagtaaatataaatggcagcctatgaattctgagtttgaattgtatatacttataaaacatagagactgttttaaaagggacaattctgtcacatagttgttaaagttttattttacaatatatgtttagaccagataaggattgaatgatgaatcaatttttcatctcctattccagtgttctaaagttgacataacctttttatttttaattcctacgttgacttttagttggaaaaaatgaagtaaaatattatggagatttttctgccaagtgttcagttatcatactgtaagagttcattggtagcaatagcctcttcaggatttagatgtaactaattatggtttaaaatgttactgattaatacagttactctataagttttaccttttaaattggcattttttacataatatactactatccaaaatattactctagaaatgatagctgtaagtgaggtttgtcatttttccaatgcctggacttgaagcagaaagttagaactcaaaactatgatagttacttccttgtacaaattgacatatgcttttacgacaaaatagcgtttgtacgattttttgaagcttaaaaagattttactttttaagttagattcgtcttaattccaagatgtattcctaacagtgtttttctagtcgtttatattaacatttacaaaaagaggggaaaacctggcactaacaaattttcgcattctgctcatgtaagacaagcgagtttgagtccggaggagagatagggttgctgcagtacaatatagtctcccccaccctttccccaaagatttctcaatatgggcaggattcaatgtgtagctcacttggaaagcgtatgtaatacagtcacctcccacctctcaacatttaaaattaaatctctaatctgttttctcctccagagaaaacttctactttcaagttttgtgtgagttggaaacggttttgaacctagaattcattggatgcgctttgcgaaacctgtctgcagtttgtgatgctgagacagctttaacagccacccacagacttgctacctggctgtctgacagcagtgccccttggtggagcgaagttgctctcccgggcttacctgaactgcctgcgccggggccgggcgggggccgggccggggccgctgtagtgccgcgctgcgagccgactgtgcgcgctccgagagtcgcccgaacaatgcgagcggggcgctgagcgcgcccggcctatgggcgttacgtcactgttctgccttataaggcgctccgcgtgtgcggcgctgtcggcgggggcgccggtgaccgcgggaccctcggccgcggcggcggcgcagccacacaccccagctcccgcggatgttccggccgtgtgaacggaccgtggttcccggctcccagcggagggaatgagtggtgggccggtgggccggggcgccggcgccctcctgtcgggctaacaaagtcattgggaggcagggtcgatccgcttgtaacttttttccctctgggtccctaaagctgttgttgcttcagggacttcaatacacatcctgttattcttatgtaaacttttgtaaattcattatactttttatttttggttgctgggggtaggcgggagagggaaaggagaagtctggggttttgtggagacatctctgggggtgatttagacttcaaaccttctctttcctctttgtaatgagtaggggtcctcagaggatggtgttttatttcctgatgatgtaactaccaaacaattcttcaagtgatgatggaaaggccagatgaaatcttatttttttcagtgtttttcctgaaagaacttcctctttccccatttctgcatgcctgtgttttaacgaaagcagttaaaactatcattttttggcagggaaaaaatttttaaagaaattaaatgttttgtgctgtactttcaagacaatgtataaaattagaactttagagccagttttaatgtttgttctcttctaccggcaaacaaaataaagccaaaaataaccacgtgaagaaaaaagaaattagccaaatgtgattgaattaagaatattatcctctagtatggggtagatttacttgtacaaatcctacttcttgtgaatgagaattcacctccgaattataagagaagtcatacctaaagttctagcccaactatatgaatctgctaaataaattagggacgtggcattcttatttgcaagcttcagatgagtaattttagtagcttgagtccttttaaaacctcttttaaaattacattaaaataggattgcttcctattatgatgtacatatgtctgtagaattattgtttccatatgttttgtcaaacaagaatgacgaaaatagtctgctcgcttcattttcttagtgtggagtggagaaaggatgtttgcagagttgttagtggaaatggtgtggaataaagatgcagggcacaacattaaatgtatgtcctcttcactaaattgggagttcactttatcattattctagatcactctaagtacctactgagaaacctaaagtaaactcactcttgcttttcatatacagtatactaagagatgtgaattacacatactcttcagccgaacttaaaatttaatatttgatttgcaattgtgtactaacattttggatgttgagtttgtagttttgttggttttaactcttctgccctatacttgtgaattgcattgtaatctttttagtctcctgtgcttacctcatacttattaaatatcctttttgagacttttatgctgcattttttattacaaatgagattaaatgacttttatgaaagttgtatgatgcataaacacctgaatctcagccccaaactgatagcatacttttaccccaaagctaacagttttgtagcttgttttgcatctttttccctctgataggcaaatatgtttcctaacatttaacactaccatttgtttctttctcacatatccatactcaagttttgcatttattttcattcttttgacttgctggttcccatgaaatatgttagtattatttcctccttttctttagctatattctgaagaatagaggaaagaggattagggcttctactccttgtatgcccttgcctggtacactacttgcctggttacattactaatgtgttactcctgaaacatcagtctcttgacccagctatgactcagctttccaagtgaggtcata

SEQ ID NO: 315668 - DNA, 4001 bp, Homo sapiens
ggaagcagccttacctgccaggacaggtgtgggggaagggaagggtgaggccctaaggcccaggggaggctcagcctagagggaatcccttttccactggagaaagtcctggcagccacacccatctccctttcttcctgtcactagggtcactatagtgacctggtttcctcaggaagagacccaaatcacaggccagggccagtccctggttctccttaggaagagatccagacccagaaccctcctctgccccaacccacacccacccacccacatacacacacacacatacacacacccatacacacgtgtaggtggatacacattctctgcatacattccgtgtacatgcaaactctttgcatatgcacatgctatacacacatgctatgtgtgtacacacgttctctgcacaaacgcccacatgcacacacacatcacagcccctaccatcacagcccacactatcagtagccttgtggccctctgggaagcctccaactatctcagaccacaagggagacttcatccttattcttcctccccagaccagaaggcccagtccagcaagagacaccaattccctccctcctttcaggaagaccctggtgtaggtttgggagaggagaggaaaacaaagcctccttctaactgttgcccacttccttcagttctcagctgggccctacttgctgaccttggacaggtcaattaaccctccggacccccttatctgtaaaatgggtctagcctcaccccagatggcaggatgcgtagggacggagataacttagaaggctgacggtacacagtggacgctagttgggctccctacaagacagcaattactgttaccaccaccatctctaaattataacttcggcagcaaggagtgggttcaacctgcggcgcgcggccagagctgagctgggagcagagagagcgaggacacacacccgcgcctacccttgcaacctcggggcccacacccattccagcgacggcaggggaaggtaccaggtctctgtctccacctgggcagggaggccccaggcgcagagaacggttcctcctcaggtctcacggcccggcctccgagccaacgcccattcagctgcctctgagagcaccaacctgggcgcagcagggagagcactccgcggagcatctgaccctagggcccgcccccggggacagcgaacgagggtttctagtcccctagctcccataggggcgccccaggtgtagagaaatgcaacaactccacctctcctcctgtgaccccagcccaaaccctcaacccttagccagccaaaggtgcactgctggggcggatggcggggagcgatcacaacaggtcccatcccaggggaagacaccggggagggggtctaggccccctataacccacccctggggacgactcccccttatctccgaggtgggggcgcgctgcgggaaatcctcgccctccgcaggggtgcacgcgcgggggcgggtcggcaccacagtgggcgcctgggcccggccagagaactcaccgatggacacgagcttgatgctctcacggtccaggaactcgagcgccacggacacattctcgagctgcatctggcgaaaggtgggccgctgatggtacttgcggtacatgcgcttctggctgagcacctcgagcagcgcgatgagccgcagcccgtcgctcaggtcggtctgcaggttgccgatgcgtttgttcacgcacttgaggtgctcgttgcaccagcgtgtgaacgtgttctgctggatcttcttccaaggcgcgtcctcagctagatccttctcggttaccggcatcctggtggcggggagagcgcaatgcgcaacgagctgccggggactggtgtttggaggcccaagggccgaaggagcgagaaccgaagcggagcgggagcggggttcgaacttgctgctaccggagccacggccggtgctgctctgcggccgcccgcccctggccgcgcgaggcgcctggccccgcgcctgcgcgctgagccgccccgcccccaagccccgccccgtcccgaccctcccgcgggagttcctgggccacgctcgcctcctgccgcctgccgcaggcactgcgccccactgcgtcctgggacccgcgctcgaagcccaccaccccagcaggatgtagggctgcctgaatcacccggtcagccccggggtggggggacccgcgggggctgggagccggacagaatgggtcgggcctcagtgggacttgcgggaggggcgcgcggggcggaggtcttcatccacatatagattgaataaaattcagtaagggcttttattgagctccgcctgtgtaccagccattcttctcagagcctgctaaccagtagtaaatcagacaaacgtattgcacaacctcaaggagttcacacagcctaatggaagagaaaagtgtaattccaccataaccaacagcccagtagtggtggtaaaaatgaacaataaggcttgttgcatgtcttagtttccagttactgctgtaacaagttaccaaaacttagtgtctttgaaaacacacacccacaaatgtattatccttcagttctgtaggttcgatggcccacacaggtcttgctgagctaaaaacaaagtgttggcaggatgcattcccttctggaggctgtagggaagaatctgtttccttgtgttttctaacttccagaagctgcctgcgcgcctgactcctgccccttttctctgtgaaagcctgcaatgggctgggcacaatggctcacacctgtaatcccagcactttgggaggccaaggtgggtggatcacctgaggtcaggagttcgagaccagcctggccaacatggtaaaaccccatctctacttaaaatacaaaaattagccaggtgtggtggcgcgtacctgtaatcccagctactgggaaggctgagataggagaatcgcttgaacctgggaggcagaggttacagtgagctgagatggtgccattgcactccagcctgggcgacagagcaaaactccgtctcaaaaaaaaaaaaaaaaaaaaaaaaaacagaaaagcaagcctgcaatgtcaggtggagtctctcagacctcagacagtcctctctccataggcacatcttccttttttttttttttcctgcgatggagtcttactccgttgcccaggctagagtccagtggtgcaatctcggctcactgcaacctcctcctcctgggttcaagcaattctcttgcctcaacctcctgagtggctgggattacaggcacccgccaccacgctccgctaatttttgtatttttaatagagacgggctttcaccatgttggccaggctggtcttgaactcctgacctcaagcgatccaccagcctctgcctcccaaagtgatgggattacaggcatgagccaccttgcccagccttttttttgtctcactccgtctcccaaactggagtgctatgactcaatctcggctccctgcagcttcaacctccccacacctggcccttttaaggactcttaagatgacattgggccagctggttagtccaacatgatctccctattttaaaatcagccgattaagaaccctaatcctgtttgcaaccttaattcccctttgccatttaagggaatgttcacaggtcctgagagttaggatgtgaacgtctttgggggctattactctgcctaccacagcatacattgagcacttactctgtactcatccaggttctgtgctaggttctgagatatggcagagtctcaggccagccctctgttgataaaagcctgaataattacaacagcaagcattgaatgaacacctgctgttcctctgtgccaagcacagtgcaaagcaatttctttcaagtcgggtgcagtggctcacacctgtaatcccagcaccttgggaggccaaggtgggcagatcacctgaggtcaggagttcgagaccagcctg

SEQ ID NO: 315669 - DNA, 4001 bp, Homo sapiens
acacatcagatatcccagaaaggagctattaacacaatcctgtattaaactttcgtctataatggtgaccctcaacaagtcactttcccttcccgggcctcattttccaaactgacaagtgtggtaagttcttctacttagctcctaatgaacttatccatcaaatgctaccaggttaaatactgagcaaaaggagcacaaactcctactgagtgaactgctacctagcctccaagggcctagagcttcctcacagatcccaagcattcttcaagaaaccgcagaagactggctctccaatataacccatcgtctgatgtgagctatttataaagtctgtattaaaagattaccggaatatctttctgaaattgtatatactgtaattagaagctacaacctcctatttcatgatgagatcctgcagttttagcatcttttaaatgaacgctatccttacagatgaattttttttatcttaaagtaatttaaaccacaacactttaaaagcacgtgtgagtttaaaaacaattttgtaatgactgattttttttttaatcaactatgcctcattctcagccagcctgtgggtgcccctctggtatctaaacaaagtgagaattgtaccttcatgggtgaggtccttttgcagggccagaaacatgcccagagactttatcctcgttaacagctgctcccagggagccaggaaatttactgatccagtaaatttcagagtcagcctccaatgagggggaaccaagggcccccacaaaaggcacaaaaccagcgctcccggctgctatccactgtggggcgttgcccgggcacccaggttcatagctttaacttaggggtggaggagcaactccggcagcagaaatcattacagagcgaagcaattttgcccaaggcctgaggcctcaaaaaaaaagtgttattccagagcagattccttttcttccgggtctgtctgctccttctgactctttgcccacaaccaccgtgcctccccattcccaacgccccacctcctgccacatttatttaaaaaaaaaaaaaagaagaagaacaagaacaagaaggaggaggaggagaagagaaggaaggaaggaaggaaggaaggaaggaaggaaggaaggagagagaaggagaaagaaagaaagaaaaagaaagaaagaaagaaagaaagaaaacgatttttaaaaagcatattccctctcccttagctttccctaggaaggcctggaaactgaaggaaattcaaatcaaattagttgcacattaaaaaataaacagacaagcaatcagggggtgcccacccaacaaaagacctcacccgttccaaaatatgattaagcctgggagggaagagggggaggggggactagaaaccagcagggatggagagagaaacctgtggatttttggccccagcgttggcccattgcggccaaattctaaattttgtttaaataaaatgctgggttgaggagaaaagaaaacaaaaagttataacttttaaggaagtctgcaaacggcactgtctggataaaatgccattgcttcccttcgtctgggatggcagggtgggagctgagattccaaaagctccaactccgaccgcgcactcctggaagcctccccgccaaaggcgccgccgggcggcgcagcccagtctcccgagacggcgggcccgggtcctccggttcccacgggacgccgggacccggacctctgggaaagttcgcgggcacagcccgaggccccactttctgccgagagtgacaggcccttcccacgcctgccggccccagcccagccgcgggcaccagacggtccgcgcggcccctcctggccgcctcggggcgcagattccgcccgcccgccctatccccggccgaggcgcccctcggggtgaccgactgaccggagctccgctggcccacacaccgggtcgcccgctccttcccgccgcgccccgctcccccgcccgagcttccagccgccggctcgccaagtccggccgcggccgccggttaccgcccccagcccggggggagcccggggggcaggacggggaggaggacgtggcgtgctcggaggtggccagcagcggggcggggagtgtcccggagaggcccagccggggacgggggggccaggccggcgcgggctcgggaccctccccgcgagcatccccgggttcgaggcccccgaccgcccccgccggcgcggagaggcggccccaacttccagccccacttcgcactcccgccctcttccctccaccatatggaaatctacagcctcagaaagtgacacgtcgaagattcctcggcctcgccgcccgccctccccctcctgggcagcgttcctgccgcggagattccgggagggggagcggattcctcggacaaaatctgctgggaaggctgggggtggggggaggccgcgagccactgcccaattttttttaagaggaatctacccgtttctttcactcctccaaaccctgaggcagggggcacaggcgggggaccccagcccagcaaggcgggggccgccccctcccgggtcccgtgttcccggggtgcccaggcgagcacggggcgccccagcactccggcgccaagtttttgccgggaagcccagggcgctcccgggacagggacgcactttggcggactcggcgtcaggccggggctttccagtgcaccgggacccggcgatcgcgctcggggtcccggtctcctctagtccccggctcttgcacgccttaccttccctagggctgaaacgcggggctctgggcgcgccacacaccgggtcgcccacgccttcccagccggcagcctggaggatccctgccgcccccttcgctgctcccgccgccgccgctctcctcctccagccgccgccgccgccgctcaaataactaccaggagggtttgatgggggattccgccatgtcaatgatgtcgggaccacatggggatttggggcccgcccattaccgtaaaccgccgaatataccggccgccacaatcgcagactcgcagaagctgttgtcccccggccctgcctagctaagcagaaactccttttggttcagccagactaaagaaacctgaggcttagggaactaacaactcctgaatggcgagggctgcgcgttctgcagatcgccaaagtaatataaaggcaatgtttactcagtgataattaagcctaaaactgactttttttcatttacacatatatttcgctttttgttgttgttaacccccacagcaaccttgtgagctatattactcccacatttcccacagcattttattcatacaactaacatagtatgagcaatttttattatacttaagttaaaatctctctttcctctttctttttgttttttgttttttgttgttgttgttgtttgttttggggactgcaggcacggggcaggcatgagccaccgcaccctttttttttttttttttttttccttttttggaagagagggggtctcaataggttgcccaggctggtctggaactctgtcgctcaagtgattctcccgccttggcctcccaaagtgttgagattacaggcgtgagccaactcacccagccttatttcacaatgcgtttctcagggacaaagactgtttcttacttttatctttatatccgtaaaatatagcacagtgcaaggaccacaataggactcattaaataactgttgagttcatattaagtcaaatgtaatgtatttctgttgtacaggctctaagaggttaacagactgcatcccatgccacccctcagattattcaggagacaagagagcaaaagttagcctagagaagccccttccatccatagctgtccaggtattctgaatagctacattcagcctcaactattaagctacaaaggagcattcagggagtcactagagacaatgtattacttttgttaacctaaaaaataataata

SEQ ID NO: 315670 - DNA, 4001 bp, Homo sapiens
aaaaaaaagtgttattccagagcagattccttttcttccgggtctgtctgctccttctgactctttgcccacaaccaccgtgcctccccattcccaacgccccacctcctgccacatttatttaaaaaaaaaaaaaagaagaagaacaagaacaagaaggaggaggaggagaagagaaggaaggaaggaaggaaggaaggaaggaaggaaggaaggagagagaaggagaaagaaagaaagaaaaagaaagaaagaaagaaagaaagaaaacgatttttaaaaagcatattccctctcccttagctttccctaggaaggcctggaaactgaaggaaattcaaatcaaattagttgcacattaaaaaataaacagacaagcaatcagggggtgcccacccaacaaaagacctcacccgttccaaaatatgattaagcctgggagggaagagggggaggggggactagaaaccagcagggatggagagagaaacctgtggatttttggccccagcgttggcccattgcggccaaattctaaattttgtttaaataaaatgctgggttgaggagaaaagaaaacaaaaagttataacttttaaggaagtctgcaaacggcactgtctggataaaatgccattgcttcccttcgtctgggatggcagggtgggagctgagattccaaaagctccaactccgaccgcgcactcctggaagcctccccgccaaaggcgccgccgggcggcgcagcccagtctcccgagacggcgggcccgggtcctccggttcccacgggacgccgggacccggacctctgggaaagttcgcgggcacagcccgaggccccactttctgccgagagtgacaggcccttcccacgcctgccggccccagcccagccgcgggcaccagacggtccgcgcggcccctcctggccgcctcggggcgcagattccgcccgcccgccctatccccggccgaggcgcccctcggggtgaccgactgaccggagctccgctggcccacacaccgggtcgcccgctccttcccgccgcgccccgctcccccgcccgagcttccagccgccggctcgccaagtccggccgcggccgccggttaccgcccccagcccggggggagcccggggggcaggacggggaggaggacgtggcgtgctcggaggtggccagcagcggggcggggagtgtcccggagaggcccagccggggacgggggggccaggccggcgcgggctcgggaccctccccgcgagcatccccgggttcgaggcccccgaccgcccccgccggcgcggagaggcggccccaacttccagccccacttcgcactcccgccctcttccctccaccatatggaaatctacagcctcagaaagtgacacgtcgaagattcctcggcctcgccgcccgccctccccctcctgggcagcgttcctgccgcggagattccgggagggggagcggattcctcggacaaaatctgctgggaaggctgggggtggggggaggccgcgagccactgcccaattttttttaagaggaatctacccgtttctttcactcctccaaaccctgaggcagggggcacaggcgggggaccccagcccagcaaggcgggggccgccccctcccgggtcccgtgttcccggggtgcccaggcgagcacggggcgccccagcactccggcgccaagtttttgccgggaagcccagggcgctcccgggacagggacgcactttggcggactcggcgtcaggccggggctttccagtgcaccgggacccggcgatcgcgctcggggtcccggtctcctctagtccccggctcttgcacgccttaccttccctagggctgaaacgcggggctctgggcgcgccacacaccgggtcgcccacgccttcccagccggcagcctggaggatccctgccgcccccttcgctgctcccgccgccgccgctctcctcctccagccgccgccgccgccgctcaaataactaccaggagggtttgatgggggattccgccatgtcaatgatgtcgggaccacatggggatttggggcccgcccattaccgtaaaccgccgaatataccggccgccacaatcgcagactcgcagaagctgttgtcccccggccctgcctagctaagcagaaactccttttggttcagccagactaaagaaacctgaggcttagggaactaacaactcctgaatggcgagggctgcgcgttctgcagatcgccaaagtaatataaaggcaatgtttactcagtgataattaagcctaaaactgactttttttcatttacacatatatttcgctttttgttgttgttaacccccacagcaaccttgtgagctatattactcccacatttcccacagcattttattcatacaactaacatagtatgagcaatttttattatacttaagttaaaatctctctttcctctttctttttgttttttgttttttgttgttgttgttgtttgttttggggactgcaggcacggggcaggcatgagccaccgcaccctttttttttttttttttttttccttttttggaagagagggggtctcaataggttgcccaggctggtctggaactctgtcgctcaagtgattctcccgccttggcctcccaaagtgttgagattacaggcgtgagccaactcacccagccttatttcacaatgcgtttctcagggacaaagactgtttcttacttttatctttatatccgtaaaatatagcacagtgcaaggaccacaataggactcattaaataactgttgagttcatattaagtcaaatgtaatgtatttctgttgtacaggctctaagaggttaacagactgcatcccatgccacccctcagattattcaggagacaagagagcaaaagttagcctagagaagccccttccatccatagctgtccaggtattctgaatagctacattcagcctcaactattaagctacaaaggagcattcagggagtcactagagacaatgtattacttttgttaacctaaaaaataataatagcagtacataatactctgttaaagtctaaagaacactaagaaatagctccttccttcccttgttcatttgccattcttttggggagattttagccttttttttttttttttggaggcaatggtgagtccagagaaatggggacctctctcctaaatggcttatttactgtggagctcctcaaaggggaacttgaagccatctttctataacataactccaattctaggtcatagtcctgcatgagaagccggggcggggggtaggcagtagttccttagtgccaatagggtacaatccaatagatcccatttgagtccaaatgccttctctggctccagactctttggcttcctcaggtgccatgccttcagcccagctgatcactcatggctccagaaggtacctgtgtccctttgtacgtgccttccctctgaaacatacttcttcttccctatttaagatcatttactcatccttgatctccggctaaaaccactccctcctttcctccctacagtctcatacctcttttccccacaatcttataatccttgtcagttctcacattgctctgaagttagtcttttttttttttttttttttctgaggctagagtgcagtagcatgatcgtagctcactgcgtcttcaagctcctaggctcaagcgagtctcccacctcagcctcccaagtagctgggactactagtgtgtgccatcacgcctggctaatttttttttaatgtttcttttttttttttcatttttgttgcccaggctggtctcagactcctgagctcaagcaatcctcctgccccagctcccaaagtgctggggttataggcatgagccactgtgcccagcctgaagttagttatactttatctcttccacttgactgagttttgttcatgtttgtatccctag

SEQ ID NO: 315671 - DNA, 4001 bp, Homo sapiens
cgtctagccatggactgcacggcagtcgggcggggaacgcggagagcgagcgcaccgacctgtgagagaaggccaagaggtctgcgctgccgacgcccggtcgcacctccgccccgggccctttccgcggtgaatttgggcaggagacgctggggctccggaaagagacgagcccagtagaaagcgcgcagagaggcagcttcaggccaggggagtgcaaggtcacagaggtcagggaggtgagcacaggaggacataaactgaggggacaaagaggagcgacaggagcttaggaaagcgaaaaagcacagagggaccctgggcgctggctccagaggcgggcccagagggtgtgaggtcaggctggcggcggcgtcgtcggctgcgaccggggccggcgtcgcgcgtccctgcatcctcgcatccgtctgcaccggcatgcggtgggctctcagagatcgaggcgcgaatgcagcgcgccggtcttgctgtcgtggtcccagtaagagcaatgcatcatggcgagctcgggctgccgggcacaagcgaactgcaggcccggcgcactggtgggcgcgggcgccgggggcgcggcggtggctgggctggcagggctgagctggcccggcggcggcgcggcggccccgtggtgcggtggggcaggcggcggtgcggcggccgcgtgcagatggtgtgcgtgcggatgcgggtgggggtgcggcggaggcgggggtgcggccggcgggcctcccaggccattgtacgagttcactacgccggggggcagcgccatgctctgcacgcgtgtgtacggcccgtacgaggcggccgggcccgccagccccttgaccacagcggccgcgccagggctaccggggcccgcggctgcagccgcagctgctgcagccgctgcggctgccgccatctggcaggaggcatagggcatgggtgagggaggctgcggtagcggccacgagttgttgaggaagccagactgcaggtacttggggggcgccaggtagccgtagccgtcggccccggcgcccgccacgccgcacccgcctgcggcgcctccggccccgaagagccccttgccgggctggaagtgcgcgggcggcggccggaagggcctcttcatgcggcggcggcgccggtagttgcccttctcgaacatgtcttcgcaggccgggtccagcgtccagtagttgcccttgcgctcgccgccgccctcgcgcggcaccttgatgaagcactcgttgaggctgaggttgtggcggatgctattttgccagcccttcttattcttctcgtagaacgggaacttcgcgatgatgtactggtagatgccggacagcgtgagcctcttctccgcgctctcgcggatcgccatggcgatgagcgccacgtacgagtacgggggcttctgcgccgggtccggcttctccggggctgtcccgccgccacccccaccgcccttgcctgggctcggcggcggcccttctggctccttgactgtgcgaccggtctctggggccagcagggcccccgccgcgtcctcgggctcggggtagctggccatcatgacaaagccggcgcgccgcggccgggccgcctctgctctccgctccaggcgctggcgcggcaaagagttggggcgcacgagtccgcttacggccaagtctcaaacttctggagactgcggatgccgcccgcgcttgcttgctggaggcctgtcgctgctctcccctctccttccccttcccctagggagcggccggcgggagtggagctcagcctctggccatggggagtccgcccaacagagaggggctccggcctcgccgcccctccccgctcaggccagtccccgccttggtgggttttcttttctgcgctcttcccctccccccgccccccggtttcccgaagcacgacccgcgtctctggcggagctgcctcctggagtccctagtgcgccaggagcctcgctctgttctgattcgtatgggctccaccgagttccgcttgcgtcaggcgccttcgcccctatagcggggcggccagccgcgcacgggcgagttcatctccaagtcactttttgtaaacgccccgcacagcctggaccggcctgcccccgcccagcgagcctcaggggcccagccgacagccaggctcacgcgcccttgaaatctgccggtactcgctctgcgggctgggctgggagatgacgaggaccccggtggggtctgcccgcacccggccaaagcccaggaagctcgggccccagcgaggaaaggcgctccaagcctcctcgcggctttcaggtgaaagaaaacgactcctttgctctgccgtttgctgccgtcttgaggctgaacttctagctcggggctggggaggggcgagacggcgagggggctggacggggtagggtggggagagctgctctgaggctttgggaaagtcagcccagaaacgggtgtgactgtacgaagaagcctcggcctggcctgtccctcgcgctctcagagtgactgggctggaatggggcaggggagaggatctctggaaatagtcgtcaggggcgccgcctgaatcacctctgcctctccctgcgttaccagtggatctaggaaccaggaatccgtgtactaatcctacggggttggagtgaaggttggatgtgtgctttaacagcaccaagtagatgcccctcagctattgcactaacacaggcggggctgttgcccgggactttgcgggactgtgtatgtgtgtgcacaggggtcacatatggaagtcatggagaggagctgtccttgagatgggtgagataccaggtgcatgtgtgctgctcagaaacacaggtatgcacatgtacaaggtgtgagatttgtatttacgaggtaaaacacacttatactgatagttatgtaatatgttcatcaagtattagagtaaatgtagctggtggatatagcatcttctctttttctcctttcttacttctttccttcccccctttcttcctttctttcacaattcttcgatgcctctttccctcccagtgtatgtattttgccacagactgggaagacaaacatcaggctgagggagggacttgttcaaatctctctcctgatgagacatttgttctgatctttctccaaagaatcaggagttagttgtcacctaccttaagcagaattctgatgggaatccaattatttcagcatgtacagagattgtttcagggaaaatcaggtgtgccttttaacagtgtgctccttaacagtgccttttaacttggcctaaacaaaaagtctgcagtcataaagtatgagagagatggccagtgttttgaatcctcaagccccaaactccttggtgctgaggaggggggcaaggccaccttatggaggaaggtggactgaatggatgtcatatagctgtgcattagtgattggcatgtctggagtggctgactcaatgcctgtcactgcctcttcctcccaggctgtttagactctgagggttctcctgaagcccaaggagccttcagcggcctgtggttccagcatccacaggccatctacaagtgttgtctgctgctcactcaggcctctgatctgcattctgagatgaaagggagggaggacaagggtggtagggctctttggaattcagcatcttgaagatgacaccagagaggtcagcagggcagcccttgcctggtcacaaggatgagagggagcaaggctatccccaaagtagcttggttttttttatgggcggtctcccactgcacccaacagacatgggggaagcagcacttccgcagaatccctgctgctgctttctgagcaggagtgcagatgtttttcttcttccttacccccatccttgcccaagctttgggtgggagtggtgagtccggtttggggctgctgcagattggcctcagtgcctatcctcccccagccagggcctgggcaggggga

SEQ ID NO: 315672 - DNA, 4001 bp, Homo sapiens
cgcagagagccagcctgggtggtcaagaaaaaaaaaaaggagagaaaaggagagaggagcccccaccaggatggggccagacccagctgtttttccccctgcccaggccctggctgggggaggataggcactgaggccaatctgcagcagccccaaaccggactcaccactcccacccaaagcttgggcaaggatgggggtaaggaagaagaaaaacatctgcactcctgctcagaaagcagcagcagggattctgcggaagtgctgcttcccccatgtctgttgggtgcagtgggagaccgcccataaaaaaaaccaagctactttggggatagccttgctccctctcatccttgtgaccaggcaagggctgccctgctgacctctctggtgtcatcttcaagatgctgaattccaaagagccctaccacccttgtcctccctccctttcatctcagaatgcagatcagaggcctgagtgagcagcagacaacacttgtagatggcctgtggatgctggaaccacaggccgctgaaggctccttgggcttcaggagaaccctcagagtctaaacagcctgggaggaagaggcagtgacaggcattgagtcagccactccagacatgccaatcactaatgcacagctatatgacatccattcagtccaccttcctccataaggtggccttgcccccctcctcagcaccaaggagtttggggcttgaggattcaaaacactggccatctctctcatactttatgactgcagactttttgtttaggccaagttaaaaggcactgttaaggagcacactgttaaaaggcacacctgattttccctgaaacaatctctgtacatgctgaaataattggattcccatcagaattctgcttaaggtaggtgacaactaactcctgattctttggagaaagatcagaacaaatgtctcatcaggagagagatttgaacaagtccctccctcagcctgatgtttgtcttcccagtctgtggcaaaatacatacactgggagggaaagaggcatcgaagaattgtgaaagaaaggaagaaaggggggaaggaaagaagtaagaaaggagaaaaagagaagatgctatatccaccagctacatttactctaatacttgatgaacatattacataactatcagtataagtgtgttttacctcgtaaatacaaatctcacaccttgtacatgtgcatacctgtgtttctgagcagcacacatgcacctggtatctcacccatctcaaggacagctcctctccatgacttccatatgtgacccctgtgcacacacatacacagtcccgcaaagtcccgggcaacagccccgcctgtgttagtgcaatagctgaggggcatctacttggtgctgttaaagcacacatccaaccttcactccaaccccgtaggattagtacacggattcctggttcctagatccactggtaacgcagggagaggcagaggtgattcaggcggcgcccctgacgactatttccagagatcctctcccctgccccattccagcccagtcactctgagagcgcgagggacaggccaggccgaggcttcttcgtacagtcacacccgtttctgggctgactttcccaaagcctcagagcagctctccccaccctaccccgtccagccccctcgccgtctcgcccctccccagccccgagctagaagttcagcctcaagacggcagcaaacggcagagcaaaggagtcgttttctttcacctgaaagccgcgaggaggcttggagcgcctttcctcgctggggcccgagcttcctgggctttggccgggtgcgggcagaccccaccggggtcctcgtcatctcccagcccagcccgcagagcgagtaccggcagatttcaagggcgcgtgagcctggctgtcggctgggcccctgaggctcgctgggcgggggcaggccggtccaggctgtgcggggcgtttacaaaaagtgacttggagatgaactcgcccgtgcgcggctggccgccccgctataggggcgaaggcgcctgacgcaagcggaactcggtggagcccatacgaatcagaacagagcgaggctcctggcgcactagggactccaggaggcagctccgccagagacgcgggtcgtgcttcgggaaaccggggggcggggggaggggaagagcgcagaaaagaaaacccaccaaggcggggactggcctgagcggggaggggcggcgaggccggagcccctctctgttgggcggactccccatggccagaggctgagctccactcccgccggccgctccctaggggaaggggaaggagaggggagagcagcgacaggcctccagcaagcaagcgcgggcggcatccgcagtctccagaagtttgagacttggccgtaagcggactcgtgcgccccaactctttgccgcgccagcgcctggagcggagagcagaggcggcccggccgcggcgcgccggctttgtcatgatggccagctaccccgagcccgaggacgcggcgggggccctgctggccccagagaccggtcgcacagtcaaggagccagaagggccgccgccgagcccaggcaagggcggtgggggtggcggcgggacagccccggagaagccggacccggcgcagaagcccccgtactcgtacgtggcgctcatcgccatggcgatccgcgagagcgcggagaagaggctcacgctgtccggcatctaccagtacatcatcgcgaagttcccgttctacgagaagaataagaagggctggcaaaatagcatccgccacaacctcagcctcaacgagtgcttcatcaaggtgccgcgcgagggcggcggcgagcgcaagggcaactactggacgctggacccggcctgcgaagacatgttcgagaagggcaactaccggcgccgccgccgcatgaagaggcccttccggccgccgcccgcgcacttccagcccggcaaggggctcttcggggccggaggcgccgcaggcgggtgcggcgtggcgggcgccggggccgacggctacggctacctggcgccccccaagtacctgcagtctggcttcctcaacaactcgtggccgctaccgcagcctccctcacccatgccctatgcctcctgccagatggcggcagccgcagcggctgcagcagctgcggctgcagccgcgggccccggtagccctggcgcggccgctgtggtcaaggggctggcgggcccggccgcctcgtacgggccgtacacacgcgtgcagagcatggcgctgccccccggcgtagtgaactcgtacaatggcctgggaggcccgccggccgcacccccgcctccgccgcacccccacccgcatccgcacgcacaccatctgcacgcggccgccgcaccgccgcctgccccaccgcaccacggggccgccgcgccgccgccgggccagctcagccctgccagcccagccaccgccgcgcccccggcgcccgcgcccaccagtgcgccgggcctgcagttcgcttgtgcccggcagcccgagctcgccatgatgcattgctcttactgggaccacgacagcaagaccggcgcgctgcattcgcgcctcgatctctgagagcccaccgcatgccggtgcagacggatgcgaggatgcagggacgcgcgacgccggccccggtcgcagccgacgacgccgccgccagcctgacctcacaccctctgggcccgcctctggagccagcgcccagggtccctctgtgctttttcgctttcctaagctcctgtcgctcctctttgtcccctcagtttatgtcctcctgtgctcacctccctgacctctgtgaccttgcactcccctggcctgaagctgcctctctgcgcgctttctactgggctcgtctctttccggagccccagcgtctcctgcccaaattcaccgcggaaagggcccggggcggaggtgcgaccgggcg

SEQ ID NO: 315673 - DNA, 4001 bp, Homo sapiens
gatggggatacgatcacgggcgcaaggtttggagttacaactgtttatttagtccttattctcacagggggcgggagctgcgcgggaatggggggctgcaggcagcgatttcgaagcaaacacatgggaggggggcatgcgactttgtttccgggagcggagctccccagagcccgtgtgtgtcactgccagtctcccgggaccaaggcggagctcacaacaggtggggaggggggctcgtcgagggccaaaaagaagaaggaatctaagtttccgagcgcgacgttgtctgaaaaggagggaggcgggaggcgggggcgagggaaggcggaggcagcaaatgaccgcgaccccgcggcaactggcaaactcctcggctcccggcgccgccgccaccgccgtggtccccactcgaagcgcacgccgcctcggctcgctggctccagggagtcgtctcggcgggacaggaatagagcgcagggagctcgggaggaaggctgcgcgcaagcgagggacggagagccatcggccgccaggacagggccggagggacgaggcgacacgcgcgcgacgcaggacaaatcggagcttgggaaatctccccgtcccccaagcttcagaggggggtaaaatcagaaaatgtgtgtgatggtgggagagagatccgggcgcggcgactcctcgcagcgcatccggctcccgcacccacccgtggatctggccacggctgttgcggactcgtctcgggaaagcggaggccgagcgcgcgtaggggtgcgtgtctggctgggggtgcgcaggtgcgtgtttgaattttccgggctccgagggggtggcgggagagcttcctcgccgctgactctcggggtaacgcgcgcgtggcagcggggaagttccccagtgcggggcccagggccaggcaccacagtcagtttgctggggcccgcggggcagctcaagggcaccgagggggcacacacccgcggggaaagaaggggaaaagtttgctccaagtctaaactttgggcctaggaggcgcccggcgcgcgccccctcccgccgcggccaggacccgggaccccgcaccggccccgcgcccgggcggccaccggacgccaacgccggacatcgaaagttgcgccaggcggcctgggcttattgatttctctcccctaggcgatcgtggagagcgcagagagaggcgtgaaggggcctacgggcaggcgatctcgcctcctcacagtcgccaccgcccccgcccccatttgacttatgcaaataaacccaaagggtgcgggcgccgccggagctccctccacccgcgcgccggcccgcagcccccacccatcccagagctgggcctcgacccgggggggagaggaagagaggggagggctgggggagatgcacgtggagcctggaggtggaaagtagttgtttttttttttccattttttttctctttttctttctttctttttttttttttgtgctggttgttgttgttgtttaaagtggcggaaacaagacaggaggcggcttgggaaaaagtggagcagaaatggaaaaatacaaactcacccgctgcaaatggtctctcggtgcaaactaaggtgttttcgggcctttccccgcgcgcgcccactcccgcccgcgcgcgcaccccgcgcacacactcactcgcgcacacacgcgcgcacacacgcactcccgggcgagggccgggccgccgcgagtacagcgtgcaaccgccacacaataaataacaatagattcctccgctccggactagcttcccggagcccagccagcgccggtggcggcggcggcggcggcagaggcgcgggcagcaccggcccgggggcgcaccccggcccgaccctctacctcccgcaggggtcccctctccgcttcacgcaccccgctgggcactccagcggccccccgagcgggagcggctccctctttgccgttcgccggggcgctggcgcccacccccctcctccctcccccctcccccccgacatcccggaacaaataaataaataaggcgcgcgagagaggccaacacgtcgcggagggagatgttgttattttttgctgttgtgcgtccctgacgtcacatccacctgctgggtaaacaaccgggctcccagaaaaaaaaaatcgcaattgccaaagaatgggggggggggttggggggagggatccagggagggggaagtgaggggcgtccaggcaggattggaaagaggagagggaggcagagccccgcggaccagagagaggaagggaacgccagagcagtccctggcaacagagggatctggcaggaaagacctggaaaataaggggcaggggggcggagggggagattcctcaggagatgggaaatggggggcccattcagacagcggaaaaaacgagaagggagagtgttaactagggacgaagatgggaatgcgatggctatttgcttggattctgagctaaaaatatgaaagggaggggagaggacaggctagaatgtgagtttcctccagttaaaagtgaaagtgttttgccatcagtgacagttgaaggagagcggggtgggaggtggtgttttcaaccccctttctccctctctcccgtcctccctcggtctctcctctttctttctgcactttgtccaatgaaagaaggcgagttcgggaggtgaaagttcagcagaaggacaaacccctgtttgcaaggaaacagaaaccccgccagccagcgaggggttttctcccctgtttctcggaatcaggagagtgtgaatgtgggacgagcttctgcccccttgtcagagccactgcaggaatgtgcaatcgagtccactttgggggaaggtggctgcatcaggaactgtgttcttgccacgactcctcttaggaaaacgcctgggggctagcatgtcagtccgttgtttaacacaaattacctgctctcccagtgatcagtcacgtgcaaaaagctttgtccaattctttgaaaaggtgagatttttttttttctttttgcggtttttgaagtttggttgaatttagaaattcgaaggaataaactaagagcctgaattaaatgttttgaaatatacatacataaaacaaaagacactagtatttctttcacttttatcaatacgcatagagaaggaagcagagtatgtgtttccaaaacgtgacttggaaagctgtaagacctctatgtcttgttgttgttgttgttgttgttgttaacagaagtaaattttttcagacccaccaccacagaagtggccagactcccaaaccagcatttccagctactggctggctggtgtacaccaggccaattctttatgagaatatattaaaagtcacccctgtggattcctacaaagtacttccccttgcggggaggggagaggcttactgtccctttggtcttgagaccagcacagttgtagataatatcctgaaaaggttattattaaattctttcgcgtaatgcccctttacaaatattgttaaacattaatttacagaagaacttaaatcttaatttcaagggtggcataagactatcgctttgaaattgtatctttcgcaagttaaaaaaaaaaaataacaaagccattcgctgatgctacagaataaaagaaagggaggctgctaaggtaatttcagcctggtagaattcacattgcatgcatgctgcataaagttccatgctatccagataagactattcactgaatcttttagactagaatctagaccaataaaatgcattttagtttgtatggaatgtcctagcttcctagaggctagggttcgacgtcttgtttgtcaagacataaagggattaatgacatacccactgtgtgctagaccacagagtgggcacagagggatgaaaaaataaaaattcctgcccttgaggagctcacagtctaagctgtcaataataacatctaacatttattaaatactatg

SEQ ID NO: 315674 - DNA, 4001 bp, Homo sapiens
ggggaactgaaggggacgggacgggtgagtaggccgaggggccaggacagagagggcagcgggctccgaggacccgcgagtgcgcgtggagggaagagaggatgcggctcagggaatccctgcaaggatccagagaccgggaaatcggcccgagccaaagtctcagcaccttccccaggatctcacaaagttgcaacaacaaaaaggaggggggaggaatagggagaagggggtgggatggggatacgatcacgggcgcaaggtttggagttacaactgtttatttagtccttattctcacagggggcgggagctgcgcgggaatggggggctgcaggcagcgatttcgaagcaaacacatgggaggggggcatgcgactttgtttccgggagcggagctccccagagcccgtgtgtgtcactgccagtctcccgggaccaaggcggagctcacaacaggtggggaggggggctcgtcgagggccaaaaagaagaaggaatctaagtttccgagcgcgacgttgtctgaaaaggagggaggcgggaggcgggggcgagggaaggcggaggcagcaaatgaccgcgaccccgcggcaactggcaaactcctcggctcccggcgccgccgccaccgccgtggtccccactcgaagcgcacgccgcctcggctcgctggctccagggagtcgtctcggcgggacaggaatagagcgcagggagctcgggaggaaggctgcgcgcaagcgagggacggagagccatcggccgccaggacagggccggagggacgaggcgacacgcgcgcgacgcaggacaaatcggagcttgggaaatctccccgtcccccaagcttcagaggggggtaaaatcagaaaatgtgtgtgatggtgggagagagatccgggcgcggcgactcctcgcagcgcatccggctcccgcacccacccgtggatctggccacggctgttgcggactcgtctcgggaaagcggaggccgagcgcgcgtaggggtgcgtgtctggctgggggtgcgcaggtgcgtgtttgaattttccgggctccgagggggtggcgggagagcttcctcgccgctgactctcggggtaacgcgcgcgtggcagcggggaagttccccagtgcggggcccagggccaggcaccacagtcagtttgctggggcccgcggggcagctcaagggcaccgagggggcacacacccgcggggaaagaaggggaaaagtttgctccaagtctaaactttgggcctaggaggcgcccggcgcgcgccccctcccgccgcggccaggacccgggaccccgcaccggccccgcgcccgggcggccaccggacgccaacgccggacatcgaaagttgcgccaggcggcctgggcttattgatttctctcccctaggcgatcgtggagagcgcagagagaggcgtgaaggggcctacgggcaggcgatctcgcctcctcacagtcgccaccgcccccgcccccatttgacttatgcaaataaacccaaagggtgcgggcgccgccggagctccctccacccgcgcgccggcccgcagcccccacccatcccagagctgggcctcgacccgggggggagaggaagagaggggagggctgggggagatgcacgtggagcctggaggtggaaagtagttgtttttttttttccattttttttctctttttctttctttctttttttttttttgtgctggttgttgttgttgtttaaagtggcggaaacaagacaggaggcggcttgggaaaaagtggagcagaaatggaaaaatacaaactcacccgctgcaaatggtctctcggtgcaaactaaggtgttttcgggcctttccccgcgcgcgcccactcccgcccgcgcgcgcaccccgcgcacacactcactcgcgcacacacgcgcgcacacacgcactcccgggcgagggccgggccgccgcgagtacagcgtgcaaccgccacacaataaataacaatagattcctccgctccggactagcttcccggagcccagccagcgccggtggcggcggcggcggcggcagaggcgcgggcagcaccggcccgggggcgcaccccggcccgaccctctacctcccgcaggggtcccctctccgcttcacgcaccccgctgggcactccagcggccccccgagcgggagcggctccctctttgccgttcgccggggcgctggcgcccacccccctcctccctcccccctcccccccgacatcccggaacaaataaataaataaggcgcgcgagagaggccaacacgtcgcggagggagatgttgttattttttgctgttgtgcgtccctgacgtcacatccacctgctgggtaaacaaccgggctcccagaaaaaaaaaatcgcaattgccaaagaatgggggggggggttggggggagggatccagggagggggaagtgaggggcgtccaggcaggattggaaagaggagagggaggcagagccccgcggaccagagagaggaagggaacgccagagcagtccctggcaacagagggatctggcaggaaagacctggaaaataaggggcaggggggcggagggggagattcctcaggagatgggaaatggggggcccattcagacagcggaaaaaacgagaagggagagtgttaactagggacgaagatgggaatgcgatggctatttgcttggattctgagctaaaaatatgaaagggaggggagaggacaggctagaatgtgagtttcctccagttaaaagtgaaagtgttttgccatcagtgacagttgaaggagagcggggtgggaggtggtgttttcaaccccctttctccctctctcccgtcctccctcggtctctcctctttctttctgcactttgtccaatgaaagaaggcgagttcgggaggtgaaagttcagcagaaggacaaacccctgtttgcaaggaaacagaaaccccgccagccagcgaggggttttctcccctgtttctcggaatcaggagagtgtgaatgtgggacgagcttctgcccccttgtcagagccactgcaggaatgtgcaatcgagtccactttgggggaaggtggctgcatcaggaactgtgttcttgccacgactcctcttaggaaaacgcctgggggctagcatgtcagtccgttgtttaacacaaattacctgctctcccagtgatcagtcacgtgcaaaaagctttgtccaattctttgaaaaggtgagatttttttttttctttttgcggtttttgaagtttggttgaatttagaaattcgaaggaataaactaagagcctgaattaaatgttttgaaatatacatacataaaacaaaagacactagtatttctttcacttttatcaatacgcatagagaaggaagcagagtatgtgtttccaaaacgtgacttggaaagctgtaagacctctatgtcttgttgttgttgttgttgttgttgttaacagaagtaaattttttcagacccaccaccacagaagtggccagactcccaaaccagcatttccagctactggctggctggtgtacaccaggccaattctttatgagaatatattaaaagtcacccctgtggattcctacaaagtacttccccttgcggggaggggagaggcttactgtccctttggtcttgagaccagcacagttgtagataatatcctgaaaaggttattattaaattctttcgcgtaatgcccctttacaaatattgttaaacattaatttacagaagaacttaaatcttaatttcaagggtggcataagactatcgctttgaaattgtatctttcgcaagttaaaaaaaaaaaataacaaagccattcgctgatgctacagaataaaagaaagggaggctgctaaggtaatttcagcctggtagaattcacattgcatgcatgctgcataaagttccatgctatccagataagactattcactgaatct

SEQ ID NO: 315675 - DNA, 4001 bp, Homo sapiens
gcctcttcactattgattgcaacagtatcatttacctgaagttacacagtgaccacaaaaaccatgtccaggacaccaaatttctactgcgaactctagggtgagacactaaatgtacattcctctttctctacctccccaaccacccctcctccctaattaggactgttattctaaagaaccctcagattattgcagtatttcaatatcatactttctatggatatattttgcccttaatttaatctgtgtgacatataatacacggtgtccactagtatgtcctacttggaactgagttgcaggtaaatgtggaggtgcaatctcatttcacaaaactgaaaatgaagagtatcagctctttttttccccatttatagtatttcccccttccctttcttgacagctaaaataaattatctgcattaagatttctgcattatatttcattttatataattgtgcaaaagcaactctgaagtatgcccaacatagttcatctcaatcttcagcctacccaatactggctgagaacctattgtgtaccagtcttaataaagatgcaaagatgagcaaagcaagcccctgggtggtgatggggggcagttcagtaggtctatggctagaggacactttcttactaggaaactgaggaaggaacatggttcaaacttcccatacccccaaatcctccaatcaaatggcctgtactcatttgcaaaaactggtccaaataggccaatttccaagagtttgctgcctctttaaatagggaatcttatcttctgtgggctttaatatcttgtttttcaatgacttcttagaaaatataaggacatcaacatatatttgactattgaaaaatataagacaagagtcactttattttctatagtgaagaaaatctactccaaaatcaatctcaaagtttgttctatgcccttaagacttcaaatactgagtaagatttcaaaaaagaaaagaaaaaaaagtggggaaggtggggaatgaagaaagaaaagaagaaaataaaaacggaaaaaggggagaaaggaaaaaatagagaaaaacagaggggaaaaagaaaggaaaagaataaagcaaggaaacaagaaagaaaaggaaggaagaagctgctgtgcagccggggtctctgagaccagaggcaaacttggacgctacccaggcttgcagcttcacaaacactacacttcttttacttgtctctatcaaagaaatgtgcgactttgaatccaccattcttcaaatctctctcctatccctgcaagtaacattttacttcctttctcctcatcctctggggccctcatcagatcatagtacctaactttggagtccattctagtagggcaaaaacctaaaatattatacattaagccacgtggtgcagtaaaccccagtcgatgcttgcccatgaaattacttcaggctggcagccccccactcactccacatcggcccatctcatttggaaaaatgactctctcctgccttacagaaaaggaaaaccctggccgtggtcatgtgaaaatattttatgggtatcctttaacagcctttaaatgttgaaacctaaaaacaatatttgctgttttcccttcgaagctctaacaaagcctttgttttagattcacctttagtgtgcaataagagttaataatcaaatccatcccaacccccacaaatgttaaacaaaaagataaaagaaatgcaaatagctattgtcatggaaagttaaagtacctgtctgtatttttaagtgaaaactattatctctatcaatcaaaatttaagaatacaatagcactaatcacagaaggtgctctgacggagttactttgcctcaaaaaaaagtatttttccccttaaaaaccaagtataaaagtcatatacttacaattagatagagtatttgtaattttgttattaaaaaccttcagcagcctcactgttaataaatgcttctaagtctctagactgatttgtacccaagaagacacaagtccctacatattttaataaggttgatgaaattttatttaaattctcacagtttccaaccggcgggggaacagcacactcttctgttgaaaagagttactcaaacagaggcaacagttaaccggtcatgaaaactccttcttttagagcctggacataattcccacaccctgaaatatcttcacacaggacatatcttccttggatggttcacccttgttaattgtggcaacttatttttgaaataacactctaccctcaaaaagaaagcagaatacccccatcataccccagaatgatctaagtgtacactacatgaatttctctgagtctgtttttaaaaattcactttaaaaaaagactggattagcccctgaatatggtgctttctaaagacagtacgggaacaaaaaatagcaagaccccagatagtaaaacaaacagctcaagattaaaattcctagagcaaacagttaagccaggatgccattatgcacactgagcctggatgatgtctcctccaccgtggggccaagaggctgtcattttccccccagcaagatcagatttccttccctcccgaccgcctctctgagcatcatggccaacatctctagtgtgctattaatatcaatgaagagacgattcgatttccacagaagaaaacctttcctattccggcacagaccttcggggaggaccctggcccgggtatagacaatacagcggcagagtttctgttttcttacagttcagtcttagacactgtttgaaggcttttagcaaacaatggcagcattatctgcaggatagttacaaaacaggatttgttaggacaaagaataataaagctgctctctctctctcttttctttttaattccccctagtcctcacgagcctttctctgcgagtccaaaattcagccacatttcctaagaggcacctgtacttgtctatttcaatgcagccagaagctgacaacggcccaggaaccaggactgctttcaggaggcgctcagaagggcagcaaagtaccctctcaacattagtaaaatgaaacaaaagtgtcagccttggcttcgcacacacttacccgttcatggtgaggaggcaaagctttggggcgggagaggcaattttcacacaacggaagaaagttgagagtttgtaagggagaaactacaggcgcttggaagcctgctggctctcagggctcccaggctggcggcagtgtgaggaaggactgaaggtatgtgggctaaacacaacaaaagccactgccttactctagattaaatatgcaggaagaggcccctttgcataaacacaaacactcagcaaatgaataactggctcaatcagacgcccgctgtgccttctacctgtcctcactctgacaggagacactgcctattccaggggacaccactaaacaggagtcagttaaatgttatgttgctataataacaattaaaatgaattgtattcattagtaattaagaactcactcgtggggcgggggggagtgctattgttgtatctccagctactccaaaaagaacttgtagtatacccatccctggagttctactatgggttgcatttcaatctttaacattcaacgaattttaaacaatcggtttgtttagtcacaattgtcagatatacgtctcgtttctctgctttgtcacattgtaagttgatacttgtgactctgtacctacaaagatctgtttgatatatgcatataaagtgtacatataaaaatatatacacacacatatatatatgtgcatatatactcacacataatacattcaagcatatctagttaaagagaataagccaaaaaaaaaaaaaaaaaaaaaaaaacgctacttaactatattctctagttcactaatcatttaaggaaaataattcgagttttccaaaaatatatcccaaatgcctgcctttcaaatgtcaccaatccat

SEQ ID NO: 315676 - DNA, 4001 bp, Homo sapiens
aaatgtatttttatttgcatcttcttaatatttggttgcttatctcatgccttagaaatgacaggtgcttgcagtctcactcttgacaggcaactacacaaataactgtcttgcctgaaagggctaatgcagtactaatgaacaataaatcaactttgattatcaagtgtcagccgaatgcgttctcagttcagctctatcacatcctacagtaagtcagccagtgtctctgggtaggcagtctgtattttggtttcatttttacacacttttcactgaaatgtgtcaggcagctacaaagaatcacataaaacagatatagaccttttctcaatttatgcaaagggcatcaattaggacaacgtgcttctgtcttcaattgatttacttagtggtcaatcttaataaccaaggaagctttgtattcttttaaacaacagtaacagcaacacacacacatcaaaccctaaactagaatcttaatgtgatcatgttccagctctttggcagtgacatgctagcttgcgctctttaccacataaaccacctctgattgcatctatacattcctcttggaaaactcgttatataaaaacaaaaacagcaaaacagggccgcttttaaaataaaaatgccacttgctttaaactttaaaaaatctggcttaacactgacttcctaatgataaaataaatgtaacttattttttttcttaagcagattagtcattgatagtatgattcacatttcctgttatcaggcttaatttttcccccacatgtgtcacttttagaatgctggaatctatggaaatgaggtgatttgcattttaaaattggtttgattagaacatttggtttgtttggacaaaaatataaaattactagatattttacttgtaactgccaggacttgaaggagttaatcccaaagaggaagagtctatatgtactttgctctaaaactttaccacccacttcctaaaggtcctctccttcccaacaccgtacttggggaggagaggggtaaaaagtcccgtttccactgaccgtccttcatgcagttctgacagttgagttagctacattcagagccggttcagctgggagtaccccgtggcaattcctcagtctgctgcacgtccaaacccaaaccccgctcactacttaattaaccagccaagtaatgcaacagaggcttagaatccccaacctgccagagtgttccattcgctcgctcgcctgctccggtgtggggctctgtgcctctccctccccctttactgtgtgtgaactcgtcgaatttgaacagctaagctgaaaatagcctagacagatatagaaacaaactatcagaagcaaagaaacatccacatgggttacactgagatggaaggctccttgtatatttcacacgctctgaaagtgacagaaatcacaccccagatacgtcccccgaacggagtgatggcgagggcttcaccaaagtggctgcgtgaaggccagaccggcagaaaatgaatcgcaaacgaaaaagagagagagagaaacacacaagcaggacttcctccaactctcaactacaccccacccatgaacatttaaaaaaagagagcgagagtgtgagccaaagagcaaggggggtgggggggtatctctctccaggacccacaggcctgcagctcctttttcttgcccctccactccctccccgcctccacttccagagcgcaactcctacccaacttggtaaacagcgaggatgaggatgattttttaaaagactcaacttcagaaccctcgggctctcctgccttccccagcgaggcccccaggaagcgggcgccgcggagccgggggaaggagagcgaaaccggcaaagatcaatcagaaggaccaacctgacactctccatgtagccgccaggcgcgcggagccgggctcggggcgcccgcgcgggccgggcgtggggtccggcggcctcggcgtgcaggcggactgcacgcgcgcaggggcgctccggctcgcgggctgacaagacgcgccgcgccgcgcccacccgccccgccctgctccaccaatcacaacccgcctctaaacaccccgcgccgcgccgcgccgcgccgcgccccacacaatgggctccgcggcccgcgccccgcgcccgcgcgccccggccccctccgcgcggcaggtgaaatcacgctcgggtgccaccctgcttttgtctggagagcaactccacttaatagctgttaacccggtgacccgcctccggctgacgtctgggtcggccgggctcggcgcgcaccgctccctctggccggggctctgcggggccggggctgccggcggggcggcgtgtttgtttcgtctttgagactgacaaagagttgtcctaacctttccgagaaacccgggaggccgaagaggggcacccggcgctcgcggcgccaagccgactgctccgagcaactgttcggcttcgggagggtacgcaggtctcctaggcagcgcagaaaagcgcttttcctcgaaaacctccctgggaggagaactttcgcttcacgtcgggggtttcacagagccttggcctccccacacccctttctttcccagagtcggtctcgccaaagtgtgccagtgcgcaccgaggaaaactaagccgacgcggggtggaaataaataacaaccaaacgtgcctcgtcgctgaaccaggcgacttcccctctagaacgacagctgccgaagaaagcatctgccacacgtttgctaagaaataattctttaaattcctttcttatttatacaacaatagcaacaacaaaagctactctcaataagcactttaggatgaccttctctattagaaatagtcactgctctttcaggctattgaaagctgagtatagtgtttttttaaaaagtcaacaatgtgctaaactttgttggctcaactgacacgacttaagcgtcaggttaatctagtccatttcggcgactctaaaaaaatcacctatttaccaccttcaaacttggagaaaaacttcctggcctgtatattttttaaagacacacacacaaaatccccacacacatttttattctttttctcaaaatattagaggaaaaggagtagtgtgacatcaatgaatgcctatttgccttcaaaaaaaaaaaaaaaaaaaaggcaacaaaatctgacccagtaatcccaggaattttacttgaaagtacattttgatgtgaagtgtattaaatgcaggttactacagaccagaaagaatattggtaatatttccaatcaagcaaatgcctgaatttcaacagggtcagcggggagcagacaattccctctttactctggctgtaaaagagacaagcgcgaagtgaccatcaaagtatgatcagatgttaaatgggcacagcgcagatcgctcttcaccctaaagtgtttttgtgtcagataccaaatttattaatgggattttttcaggtcacaaaatgtgaccccaccctctcatgaatattcaacagagaaccaagggctcttttgcgaggtagaaggaccttaaatctgccagaaagtcccccgactatcagtagagttctgactcttaaagagaaaaggtgctctttccggaggggctggcagagagccccaacggcaggaaatacaaataaaggaagtgctctccaaccaatgtacagggagaaagtggaaagaatcatttcaaaacgcctaagtgactttctttttcccaaagtattaaaattgagttttaatgtttataaacaaaaactgggatgtactttgaatatgcaatgtgtttttattttagaaactaagttcttcatgaggcatccataaaactcatgcatgctttcagaaggtggactaactccttagcaggtcagtgtttatcagctaatagtctgcaggtgcatcaaaacaaacaataaacaagcaaacaacattacagacgctcatgacccagctgt

SEQ ID NO: 315677 - DNA, 4001 bp, Homo sapiens
ttctaaagcagtactcgatcctgtttggactcagaaccttccactcagatgtgtttttcgacaagcataattagcagctttctaagatagaaacttaggggctgctcaagctcattttggttaaatacactgaatttctatttttcaaagagcttcaccttgacagggctacagtgcatgcacagagatgatccgcagccaagaaaccaacaggaatgtgcgagcacagtcataacgtaaaataaaattcttagcactcgagtcccgtgctgaagctgagatgttcagaaaaagccaagcactgtggcatgaacccgagattgcatttggacagggatgtattcaaatctgcttgggaatgacatacttgattctggaacaaactgctcacttttaacgtggtttgaactaatgaacaagtacgtcccagcatctataagccaaagaactattccctcttctaatcaccaactttgattttttttaactgaaaactgtagaaagaaaatacatcgttgccaaacatatttattatgattaatagcctgtaatatccctcaccaaggcttaatttgcacttgttttcaattatgaagctgcaccactctagtccagtccccttttcaggtggagatgaatttcttgtggtctttactctttctattgtattgccacccagcaaggcacaattagttaaaaacagtaaacctccaccttggctccaacagagcaccagattacacaaaattagagaagaaaataattgagaaataagtgaaggtgtccaaggaattaaagcaattagaccaaaggggaaaagaaaaagtacatagccagtcacccaaacacaccttcacattaaaatttaaaagaaaagaaaaaagtcctaaatctgttatttaattttgataaactcaatacagtccctcatcagggaatcttagctgctgccataaattcaagcatccccaaatgtctgaaaccccagtttggtaataaaatgtacacatcagtgttacaccagtgtggattatccaaacctaacgagtccattctactaaagatgctgccgctactttaagttgcataaaaataaactccactacataaaagctgccacagtgcgtgcgctctcatccctcggctccaagcatgatctctcccccctcttttaggtcagccactcatgcattaggaagacatccctcccaaaataacttggccctccccccgaagcacagagttgagcaacctacctttgttctggagttgcagataataacaggcaagcctcaagaccatgaggatttggaaaagatcaggagagttgaaaaagggaaaaaaaaaaaaatagaagaagaaaaagaaaaagaaatacgcccaagtagagaagaattggaagaaacagcaggaaaaggcttctaatgaaactgttgtggctgccacagatcgggggtgttttcagcagtgtttacaccacaccagtgagtacacacctctgctacatctcatccacaactggtggcattttttttttctgaatccatgcatgacaattaaaagcactgcacctctctgtttgggagggggaccacaaaagacctccgcaatatttctttacaatgtctatatcactgatgagcattagtttgagtgacaaaggtcccaggctaaatcaacattcttaccttaatgttcctagtaaaaggctccaggaaacataactcatgagatatgtatgcaaagatatgtctcaaggaattaatccagagccctcagatgaagtgaggggggaaaaaaaaaaaaggaaaaaagaaaaaaagaaaaggcagtggcttacatttccaaacaaacgcagctcagcctggggaagcgatggcataaaaacaggtttgcatatacagagctcagtggcagaagcgagagttccgtaggatttatttgacacttattttccgggaagccttttgtggagttgtaccgtttgtttcttattgtctgagaagcagttaggagctttctcccggagggggcctctcaacccctggcttggcctcctctgacggggaggtaaccatattaggatgtgtatggtaaagtaaacaataacatagttgcaatgaaatggaatttttttttctccagctaatggtgttggggtcagtcctgtcttttcagccattcctactaattttgtttcctagttcaaacaggccctcctcctccttttttttttcaagtgttagctgtttccaaatatctgactgtaaatttgctaagaatgtttgcaatgtaagaaaaggcttttaacatccaaataaagaccgtgccagtttaatcattaaaagggatgtgaattttcaatcccttgcagagatacaagccttctctacccacccaccccctccccatctttctctgaaggttaaaattacttggtcatttagaagtacctgctaaataaatcagatttttaaagaacaagaccgttaccttcataaaaattcctcattcacatactgtgtcactgagtgaagagtcttaaccattcatgcacctgaaaatttattacctgaaatttctaggatggttacttttacatgataaagctctttcccacctcctccaatcaccaccccccccacccacaaataaacaaaaagcataaaatactgttgtcaaatcatcctttagaaattagctaataaaataaaaaatattatgaagaatgagttcccaaaatgttacatttttaagaaaagttctgcaggtccaaagacaacaataaaaagtaaggctgctttcttgccatgatcacttagtacgaaaaccaccccccccccaccacaaagcagtgagtgaaacatcccactcaaaggtcagggctaggctgataaggagggtaacaatgctgatggggaccacagagaactaatctggaggcagctgagcagcagcgagccagctctggccccgacgctgagaaggcttccatatctttattccctaggtgagagccgtggctgctcttgaaagcagtttccccatgagatcagccaaaatgagggtgcttcggtagcggccagccctcggtgtgcaaggacgggaggacagggacagtgatgctgcctgcgagaacccgagaaaccttctgtgtaccaggcatcgaggcaaaacatgtgccatgagcaaaagggcacaggcagggggataaatgatacatgtaattaagaatgaagccaggctgatctagcaaataaaatgcatgtggccctggtgaaacttccaaagctcagaaagagttcctccctagcctggaacctctgggctgccctctaaactgccttggttcttatcagatccatatcgtacagaaacctaaaacccctgcaactcatgttttattaaaacatgtttagcattctttttaaagataggttttaaccccaaatacccatgaaattaaatctcctatgccacttatctgcactgctgggcaaaaactaaagttgagctaaacagagagatagcaaaatcaataaatcacacgaaacaagtagcagttcaaaagttcaaagatatgatggccagttcagcgcgtcttagcactcacccaataataactcgtctccgtcactcttcatcgtatagacaatttcatggcatcattttcattagcctgtctcagagaaaattgctagctatttatgtatacgctcaaataaattagccatttcatcgagcaatgtgattcttataaaatacattaacacaatactcgattttccagttgcagtaaataaataaatcaatacattcaatacagggtgattctttcactgtggcgctacagctctcagcataagtgtttttattgggtttatttgtttcaataaaaattgaaatgggccagtgatctcagtgctagcatcttaaaaaaaaaatccatccaatattggggaaagtattgtgcagaacattcaaacttataattttattca

SEQ ID NO: 315678 - DNA, 4001 bp, Homo sapiens
atttattattttctgtatatctgttaaagggcatggctttcggagtggaaaacaaaacagaacttggtcacatgtttatttgcttcagctactcccttccccttctgataaataatcaaacatgccatccagaaaaaacaaaacgagcgagctgggaaatttgatggtcatcaaatagactaagataccaagaaaagcagcccactgttcccacactgagttttcggcccccacacctacactaacatctgagtaaataccttcagtcactctttccattttccctgcaattactcctactgttaaacaaattgtccttaaggcagtcgcaaacatcttattttttcttgcaaaagagaacaacttctgaacattcaaaaaagccaccatagcgatagcaatacacacacatgcacacacacatacatacaattattttatgtatctaaatgtttcttctatgagaggtttggacaaccccagagcatatttctttctctattctaatagatgctgttttagatactaaaatttaaaaatatttagactgcggactagcaaacgaggttcacagtaataacaattctcttaagatcaaaagagcttattttccatttcctgtctattccctgaccaccatatagttaaaaaagaaatattaacacctggcttaccaattaaactgaagttgggggtcagggaaggggggtgtggagggaggggagagaggcaaaaggagtgactacagacaggaaaaggtggaacctttttcaaaaatgtcaaatcatgtgtttaaaaagtcatttcaacagaaaggactaagagagccgttagattgctcttctactcagagccaggaggcagcccaagtccaagggcttttcctgctatactgattatccacaaggaaaattttgaaaagagccttccaacatcaaagttaacaaccatcacggaaagtgaggcaggctttccctttccctctgcagcccactccgttgaaacaataggaatatgaatgagataatgaccgtgcgtgtttcagcagtctgacttttattggcatgaaattggtacaaatattaccaagaccgattcacaaatgatgacggtgtcgtgatgcaaacatcaggggacaattctgtagatgcagaattacaaaggcaccatccccacattctcttactacttgtgataacaggaagaaaaagaaggcaacacgaaacaatgtcacagtaagcagagagaggttccaatctacgtttagcctataaaactatcctgacaccacccggctgcttacttagctgattatatccaaagacatatttgaaaacaagagtgaattaaacaaggagttagaaggaaacggtcctctcaaatctctaaaaagaaaaaagcctctgatggagagaggagggaagggggaggaaaaaaagcagtaaacaagttggatcaccttatttcgcccttcagagaatgtctgcacaagaacggatccctagtttaaaagtttaacccagcaaaaaaatgtttctttttctctggacacttacagagaaaatgaagagtttggcgaagggagcccgtactgtctgcctttggatttccgtcttcttgctgtagatgggttctggctgtttctgcgaagcgggggttgccgagtggtaaaaaagatgtttgaataaacaggaagtactgtgcggctgaagcacactcgaagagaaaacacactggaacattgccctttgtaggcaacctcagggaggtttgcctccacagtagctggctgggctctcactaaatgacaaagaaaccacaagaattcctcaagtaattcttcactttcaaagttgaaagatcagttggagcttgcaggtaattttcaaagttgcatttagcacttaaagaaatctattaatgccacacatatctaaaccgctccaggtctgcaagcagcgacacagcacacgcagtgcgccctggctagaccaagccctagccaaacacagctcattcacgcagacaaatacacaccaacagggtttcgggaaacctgctcttgagatatttttgtggtgacatttacataggcaggatgctttaaaagaaaaaaaaaagaagaagaagaaaattcagattttgcagactttagaggattttgtcacatgtatttttaaagaacacatcgtcccgtattccagggatatgccctggatctggctttgactggctgtcctttacattttctttctccaccatcaaccaaactacctgtttatctccagatgcctagcttgcctaatggaacactccttaacccgccccaaaatgattgtcacagtcctgtcttccgtcaccggagtaattcagcaaatactgtgaagaaaagtaaactgctgaaggcacagcaagtcagcttgaaaaacaggaggaagagttgaacagccatattcaataacaaaaaaaaaaaaaaaaaaaggaggaagaaaaggattccttctgaaaatgtattgctcttgtggcaatgttcttctgccacagaagctactgatttgttatttagcatggaatgctggactgtctgtcatccaggtgctaatactcggctaaaataactcattgggagctgtcagtgggatgtttacataggccccaatcttttcttcatagaaggaaattttttactggaattcatcttcttttgatctcacattcaaagcaacggcagcttgatagacattcaagtctgaaagcaaatccagacgctgaagataaaccgccagaaaatgacaggcagaagcatctaaagcttataaaaatgaagagaacagcatgtcgcctgagtattacaatagcagaaatcaagagacatattaggtggaactgatcagccacaaaaacagttcaaaaggcagatcatagaaacagaagactaggctgggggaaaaaatgggaaagatctggtttactgcctcatctcccttctgagtctcacagtgcttccacgcctgccttctccactttggggaggggtggagtatccaatgcaaatgttcctctctaactcagctggtccagttagagaccaggaaatgatttcctagcaatcccttttcaaggggcaggagaaaaaggcagactcttaccttgctcagtgtccaaaatcctgcattttattagcatcccctgcagctgctctgcgttgcagtatcaaaaggcacacagcctgggcgccatgaaagtgggcggtcaggaaaaccatctctcaacagaagagctataagtagttcgagatggggctagagagctctaagcagtccagttccctaaaatggctagttatggaatgaacacaaatgttccagcctcagtcacacaaatagatgtgttctgtcctacagatatgtaactgcttaacacctagtagcttttaagccaactagggcagttctgtaaaggaattatcacaactttctcagagacatgcaattaaaaaaaataaagcctcttattttcaataaagtcagtgcatacaatcaaatagtaattctcccaacaattttgttcttaaagctgtttgttaacaaacactgaatgtgaacaggcagcatcaggttaaagggcaacagaattccacattataatttagcctgcggttattcctgattgcaagcaccctctgggactgcaaagcaagatcttcttttgcagcacgcttggatttttaaaattagtgcccctctttttttgcataataaaccaacattaaaatatggattaaaaaatgtacaaaccaatttttaaaagctgtaatcagtttagcatttgccttgtgcaaacgagtcctgggtaactaagttacaaatgcaaaaaacaacacaaacaaacaaagccaaagccctactggatcctaagagtgttttttcaagacacctctgccatgcctatatagctatcagatgtgctaaagtcgatgattttcctttgaactgtactag

SEQ ID NO: 315679 - DNA, 4001 bp, Homo sapiens
aaatgtgaggagagaagcatgctactctagctgcacaacagatacagcaaaatgtcacagaaacaaatctttcaagagaatccgagatgctggaatgcgtatttcaccagaatttactccgagagcattaaaaaaaaaaagttaaggctcagatactgaacacaatgttgcctctgttacaagaagatgaaaagttgaaacagaccaatgcattagaaagtccatactgtactgcagagatgctattcttattgctgtcaaaagactcctggttttaaaacaaacaaaaaaacaccttctagattatttattcagacggtcttgcctagtttttaggactcaaaagtcaacactcgaggtttgactctggtcaaactactcctttgccacatggcatcacgccgcgcgagacagattttcagtatgaaagaaaccagcagtttccaatacaaacatgggctttccaatatataaaatttaagaaaagccagggtctgtatagaaaacattaaactggcttatatatcaaaatcatgaggtttaagcagaaatgcagcattaaaataatttacaaaatggctcaacaatgaacattttcctctgtgaaaaaaacaacacccttaatgtttttcatatggcacataaattttacaatacctgcaggaatattttcattggttaaaccaacaccataggtctttttagctcttaagcatattacgattcttgcctttttatggcatttttgttgttgtttgcacccaatgtaataagcttttgagaacaagaaacaaaccacaataaaaagaaaaaagaactacccctttgtaactgcaactttcacaagaggggtgggggagcagagcgatcgaaatctcgtttttatagctgctatcttgatgcaattagtgtaaaataattgtctgcacaggccaaagtagaggctaagttgaggcacttgagtgcattcccgaaaatgatttccctgcctcttccttcagcctgctgcagcagatgttggctgttaagccgcacagacgacacagttcatgacttttctaagacggctgtgtgccacatctgcagttgatgaaatggagagcagaagtgtggcagacacacagaggagagtgtgagcgaggcaggcaggcgcaggctgggccaaaggaactgtcttgaaggctggcctaaaaatagacacatactcacactcctccctccgcagccagctcataaaacccggcctgcctgtcctattatggagtcagcctatggcagacacttcctgcatccagcttgggctgcagataacacaaaagcatggaggcaagagtggaggggagcaggcggtgtagcatcctcaaactgcagcttcgctctccgagcctcggtataactgggctgtggtccaagttcagctgggcccccagagaaaggcaatgcttgtgtttagcccgcacaatactgacataacattaacagatttacatatgcaaaactgtgaagcaacaggcattccccctcaattgacccacagcttgtagtgtctgccgagttattccccgcttcggctctgtaaccaagtgggcggcatgcgaataccatctgggtaccacttattgaaaactggcagtcgctctgtaataggcaagctggcaataagagggaagggaataaattgcatcatttagttaacatccacttgctttgcggctgttaaaaaaccatgactgaataataatttggttatttcttttgccagaaactgctgtcagccaaattgtactacgcacgctgcagaagtcgacttgcaaaatttccacttgagaagggactgaggaggattggggcaaaatgggcaccaacctctggctgttagcagtggcgactcctgctgcacagtggctctgtgtcctccaagtgtcatcatcccaaatgtagttgacaccaagccctggttagccacctggccatgctgagccccagcaccaagctgtgatgtgtggtaacaccctcaagcagctcagatccaagggtgtatgtgacaagtggcatctacgtgactctcagctagccgtggaggcacatgtggccaagcaaagcttgagctgacatcccccagtttctgcctcaaaacagagtggggaagcaggtccacagaaagcctgagagctgcaggcctatatccctctacttctgtgcctggagcaggcagactgaatcatttctttctggtttactcacctgctttcaaatacaactaacaaagaaagtgacagaaaccttagaccaccacataaaggtagaagtgatcttcattcagtaaaacccatgtgtttgaagtggttctcttttgaatatatttgtaaagatatgaaattctcttatttactatatgctgtgcctgtgtgtgtttacacactatatatacacatatacacacatgtatgtgtgtatacacacatatacacacatatacacacatatatgtgtgtatacacatacatatacacacatatatgtgtgtatttctattactttcctttactatgtcttttaggaaaatcagagccgaatacatacaagtgaccaatgccgtagcagtattaaaaagatataagtacttaaaagatataaataaaaatatataaatccttctataaaggttagaaatattttatgatataaatccagttataaaatatgtatttatttcttttaataatttatatcatctataaactgctatagcattggtcaattacatatatttccactttgactttttaaaaagatgtatcaaaggaaagtaaagaaatggaaaaaaaaaaaaaggaaaatttggaacaaaaaaaaggaaaaagcaggaaagactagacagactctgctgatcgtggaagtactacaagtgaacaaagtttgatcaaattcaaagaaaaaaggaagatgagaacatttgcagtgacaccaatggcaaaaacatacgtttccaaaatccaaacctgaagcacttgggaaggaatggctaaacaatctttcaaagcccaagacatttaaagaccactccattttatatgtggggtggtctttctgaaaaataacacagttggctggtcatgcattaaaataagcagaatatgatcacaaagaggtaagagagacaaaggagacaagaccaaatcgtcatgtattttacaaatcacaactgttgtaagttaccatatgattaagtgaaacttggataatagttcttttccaggcaatgagggtagtcaagaaagataatagggctttttttttccagattcagcttatgattgtaatctcaccttgctctaaacagcttagaaggcaaagaaaagacaaagtcaattctgtatctagagacataaaaaaatgttaagactgtaaagcaatacgctgaatttgcttcttgaaaggatgagaaagaaaatgatatttccaagtcaccacgcttgcagtctgttaaaaggaagcaaaatagcgattttaaccaggaccatgggtggtaaaacaattttttttttattaaaaataaccattttatttacacatgtacatgcgcgcatatgctccctgaaaaaaatcagcatgctgtcatggaaataccactggtctgagggagagaaggactggttttcaccaaagctcagccactttctagttgagtaagtgaccttgggtaagtcacagtttgtctgggcctaattttcttttctttgggaaatagtgatatgtaacaaagcagtgttagaatttcccaaatctgagagaaataatggttttcctaatagctctttattgcacatttatcattccaaaatgtaaatccatcctatgaaaataaatgaatcagagttacacaagatttcaaaattactctcattttactttgcaaattacacttagggtaaatattgatggggttttgtttgtttttaaaaatacacatgctgaaggactgaactgccttatgcaaa

SEQ ID NO: 315680 - DNA, 4001 bp, Homo sapiens
gattgcaacctaatatttttctgattatatagaaatgcacgactgtcatcagacatccaaaaggtatcaaatgtctaacatgaaatataaaatttgtctatagccttagcggtctgcaaaattcagggctcaccattctgagtataccgctcaagtttctttcctatgacttcttcaggttctgtcatttattaacacagtgcatctaaaattgtcactgctggtcgtctggaagaatctgagaagaagcaggtccttgttctcattcccagagctgcatctctgctgaatagggtcagggtgctcccagcttagcctcatctgatccactgacaggctcagttatctcctgcccagggaagggatgggcttctctatccagggctgaatccccaggaccaggcagtgtggctgggacaagccagctctcagcagggaagacataagctgcctgagtggccatggaatacaaggtctgcacctgggcacacagaggcccccggagccgagtgagcagtgtcagctgctcacaggtcagtggagaatggatctgctgtgcccacacctgggctaggtcttgataaacagcctccgacatagctcgcacagaggtcaccaagctttttcgaagtgacggtgtttggacttctagggcccgagacctatgccgcttgctgcgcccagtgcaagccctggaacttcccctatggtgggcatcacaggtctcctggatttcactgttgtgcacagcagtggaggatcttgattttttattcaacgtcaagttgcactcctcttctggacagttccctgcaaagaaagcatgtgagagactcaccagagcagtccccacagaccctcatttccagaaccccctgtgcacccaggtgaaccccatttgtctctcccactccttcctgaccatctcaggactggaatgaagtgaggctgaaccacttgtgagtccccaaatattctcagagtgctaggatctcaaaaatttacttgtcaataagtaattccctttccgctcaagcctcgtataaaagtttcctgattatttgccttttggggcaaaccaaaaacaaaaaaaccaccaccaccaccaacaacaacaaacaccaagattctacctgctctgtcttggcagatatccttggaactgatttttcttttcctgcagttttcctgatatgagctggactctggttctgtgaacacaatgagagtttgagaaagtgcctccaactgaacaccctgaaattcctagtccatcctggacacacaggagctgaggttaccgccaaaccccagctctcttctgttctccagtgtccaggatctgtactgccctggctgccaaggagctcccagtttccttgccaggggagcctgtgttgctgccctgtcccttctcaccttgaaagagtcaaatcttacctgatccagcagtgctgttcccggccttgagcttggtttcctcagaattctccttgtttggattgggatctgatcctgctgcaagagaaggtttagatggctcacctctccctaggcagagtcccatagtctatctctcatgcatttttgagaatcagtctttcatgtgaagctcttctgccagtgtcatgagtgaacacatttctcaaagtcccctaagggcactaagccatttcccatccccaaatctcaaaataaaaccctgctaaagacacatagctcagtatccctgattccaaccctccttccagcctccataggagcagcccaaggccttaccttgcctttgtgtgtgcttctcactggaatgggagaaggcggtcttgccttttcctttgaatggtttcttctcatctgagcccttttctgtaaaggagatctgttggaaagggggctggtcagtggagcactggatggaggaacagtggagatcggggtcttcatttccctttcccatgttgaagctcaagtgaaaggtgcgctctctcacatgtccaaaggcagagtgtgggttagtctgctagacctgccttttatacgtccctcggctgggcgtggcttactcttattggctgaagagttttctcattcctgccgcttcttagagcctcaatcagaagtttcttgctgtagttctactggggacctagacacagttaaggggagacattttcaggatcttgtcatagtgtcaagaaaacaaagaaccgggagcacagggaccggaagatcagggaatcatttcttccgatttctgtcccagttcctacctggaggtatttatgatcctgttcacctttcaagatgcacaattaaacatgtctatattgacatatgttatatattttgcacagaaagagaatttattatacatagtgttaacgttgtatgcatagatattataatttcttaaatgcttggaaacaacaaatgtcaaattatggttgagtctattagatccacacatagatgatgaaataaaagtgcagagaaaaaataaataccaaatgaaatggcccttcctaccttaaaaatggggaagataattagatcaaatgcaataaaattgcattgattaggttgagccagtgctaacctaatcagcccctgattctaggtggaaaaactttccccctttctcacccttcctcagtcatcctgggagggccattgtgttctgtggaatttattcagcctccctagtaaaaatggacttggtcgcaaacaggtaacccagctgatcacaagaaaaacagcctagattctaaacattcagctcctgtcttcacaccgcagacaccacctgaatcccgtcaaagcccacattatttctcaacaaccaccatattccagggcagcctctcaaaattgcctcagtgagacgggacaaagtgtggtggagctccaggttcagaatagctgcctcatcccttcctactgcggcggagtctgtctctgctggtcagagccctccaactagcctaggctacgtccaagcaagtgtcccctaaaaggaccttcttctctccccctctgctgaggaaagcatgcaggaatgagactttctatgttagggagtactcggcctccagtcccaaatgacttgattgactgatgaaatgattccttgaggaggagaaagacacggggaagagactgtgttgggtgagtctgtgttttcccagctgtgctgcctgtgcaaatagtggaaccaaaaaagaattagtggtagacagacactgcctagtgaaattgtctgaatgtaaatggaacttatcataatatgatatcattatatattataatattataaaatttatttgacatctaaataaattttgatatgatatataaaatttggtcaggtaattttataagaaaattgagttacattttttaacaatattaacatataaactcaatagaaagctaggaaaattgtctgctcttgtgtaaatgactgctttttggataactctgtaaaaggtgtgaagggggtctgctacttacttgatagtaagtacttgataagacatcgacttccacatctttgctgtttttaaccagtgccctctcaagatatgagaatattttactctaaggaagtattttcatagatatcataataggaattttgttcattttagttaataaattattataacatttagtgattattaataatttatgtcactgttaaaatatactcctacagacaacatattacatatgtgttttgatttgtcctttaatctcaggtaaattttttaaatttttatttattaaattctatatattttagataaaagagaccttgtaactgccatatgatgtactttcttagaaagagaaattctcaggcaaaactcaggtctggccaggcacggtgcctcatgcctgtaatcccagcactttgcgaggccaaggcgggtggatcgccttaggtcaggagttcaaggctagcctagccaacataaggaaaccccatctgtactaaaaat

SEQ ID NO: 315681 - DNA, 4001 bp, Homo sapiens
agtattacagataagccataaatcctctgaatccttggggagtgaggcacagagtcactctggttggctacaatatttgcgttccctttttgaaagtttctcaaacactaaaaaggaaaaacaaaattacataaggggcacttattctacagaccaaactgaacagggatttcccaagagaggaaaaaaaaggcttgaaagacagacacacttctggctccaaaaagccagagagctatgtaatgtggccagatgggatatatccacaattccctaatactctcaaactcccacatgctgccctggttcccaacctgcctttcagattccatttcaaaatgcaagatatcacagatatgttatacaaagcagaagcagtgaaagcacaagttcaaatgttcctcatattttaacaagggtgacaaggggacgctgactctttagacttccacaggctaaccttaggtgctggccttttcattttgcctgattgatggaagattatggtttgtcaaaatcaagtgcttgatcatgtatgagacacaatataataagacataaattctagacatattaggaacagggtcaaatggggggaaatccaggaactgcaacaaagctattccacatcacaggaaagaaaatatgatattatctttccacagtagacaccaagtatatttctaaacaatgcagatttttaaaaatctcaaatatattaacaaccaaagcacagaacttttaaattcataaattactgtctaaaaaaaaaaaaagaaatccaggcaaactgcagtaccagagaggatgaatggtctcctagttgagcaaagttgctgcattttttgcctgcaggatgggaccgagcagagaaataaaggggctgtgttgtgtgacagggagtaaatcctaacatgagcattccaacgtgtagccgggccacccctcccttccccagcctgtcatcctcctgcaaagtgttcacaatttgctgtccttccttccaaaagccagtagacacagaatcagcttttcctggctctgccttacaagttggggctgcctgatggaaaactgaaaatccaacggaaggataaaaatccaccaaggccccctctgccagcaaattggtgtgaaaccgttgcttcagaagcagccactcccacccccaatgaaattaaaaagaaggactcatttgaatgtctaagtggctttctgaagaccctctgttgcaaagcaacagcctccctagtcaagcgcccgccagtacaccattgctctgtaacagatgtctgcaaacgctgggactatctcgcaagtgccccccatgcccgatttgaaaaattcacaagctctgtcaagcaataattacctagagctgctgagcgtttgacccaagggccaagcagtctgctaggagtttaagaagagctggggggaataaaatcatacaggtggagcctgcttcccacgagtgcccggcatcctgctggggccctcgggtgccgcgcgctccagctcacctggtacacgtcctgcagcccgcaccacgtccgcagcacctggtggcaagcccgcagcctctccgtgtaccatctccgcagcgtggacacggtcaagttccatacgaagcggctgccgctgaacagcaggtcctccacgccacacatgaacaccgaagccatgcctcctccttcgctctgaacccgggcgtcccggctctcgtacgtgcagccccgaccccagcggcctgcccgcctgggctcccgacgccggcttctgctggcagccggggggtcaagcctgccaccaaactcgtctttcaccgtgcgtcctggccaggctccggcggcatgccctgggattgggtgcccgccagccaacggctgcgactggcacacagaagcccagtgtccacccccgcccgctcgcagcgccgagcaagctgtgctaagctccaccaagctggccctcgatgctcccggggcacgggaagccctggccggcgaggactccccctggcgcttccccagggcgcggggcagggacggaagcggagcaactctttgcaggcagagaggggagctgcatttcagcacacttggcttccacgtcttgcgcgcgcgcgaacacacacacacacagacacacaccccccacaccggacgagtggtctcctaatctgcctcggggaacaccttactcatcttgctctgttcacactgataaaacacctctgggcagccacagatgcagaagagagagagagaaaaaaaaaaatctccaaggcatccctttggaccctactcctgggggaatagccacgaatgtttccttggttctgctggaagcaggagatgaaggcaacagtctcaaagcaacaggcggccctagaacctgcctttgctcctaacttgagggtctcagagaaaatgacagcctcctgtggttgccagcaggaaggcaggtttcctcacaccaagatgctgctaataccaatgcagcagtcagggagaaaaacagagttcttggtcccttgtaaatagcttgccgttactagtgctgggaaacagaagcccataagagaatcggtggtttagttctggaaaattcagcctctggacatgtctaacctcacctgcaagcaccaacctgcatgggtagtttattctcccctcaaaaccaaaggaaactgttccaccactcatgaagtcactagataattaatcttatttatttatttattaaagttttccctcgggaattgatgctgattgttggaaacatttggaaaagggagctcaaggagtctcgcctaccaccagtctctgtcttcctttatttatttttgagacaaggtctgttgcccaggctggagagcagtgactcaatcatagctcacagctgccttgaactcctgggatgaagtgatccatcttcccacctcagccacggggactacaggtgctaagtttattatcattattttttttgtagagatggggtctcactatgtcgcccaggctggtttcaaatgcctgggctcaagcaatcttccagcctcagcctcccaaagtgctagcgttacagacatgacccattgtgcccagcctccattttcccttagaatgtatgaagatttctcatagcaaaagtgctgtagcaaatttcaggatggagttttttcctgaatccatctgtaagtcaattgtctgtattttcttggctgtttcacatctgggttgttatctatgctattaagtggcaccaaaaggaaaggtaaggcaccaaagcttttctcctgaactagcccagaagactccagaacagattatcgacaagtaaatcagcttgatttcaggtatcaaatgtgcttttataatcttaattcaggtgaaactcaatcagtcaaaagacgaagaacacaaaatctgtcctcaaagtgcctgttgttttcagtgactgtaatcagaaaacttttaaatgagatttctttcgttaataaaattgcccaagagtttttgttgaattagttaataggacacaagacttggtccaagatttgcaaacctttcttcacaataagtcttctctatgtgccatcagtattagtattgatggtttttttttcaagatgatggtaacgatgaatctgaatataatagattttactgaatcaaaagaaaatgaacttagcttgaaaaagaactgtcatcatgctgaatggaaaactactgaacttcaaaaatgccctattagtacgagcaaatggtggtggtactttttttttttaaacgatgcagttcgactgtgttctcggaaatgtcaggcagccaagggaataccagaataaaacctacaacaggtcaattacctctgtctcatgacaccatcctctcagaagagaggctctagaaacactctggctgttagctatctgtgcgtaggtctaatgtcagcagtcactttcaaattccatcattttcattcaaggtttccaa

SEQ ID NO: 315682 - DNA, 4001 bp, Homo sapiens
agggggatacgctctcaaatgcaaaccctggaaaaccagatggataagaagcagacctggagttcaagatgggctccaaaggtaagagaggtaggttcagatcctgcttcagagctaactagttgtatgaccctgggcaagttacctaatctccttaaacctgtttcttcctctgtaaaatcgggataataaaacctacattacagggtttgggagctttaaaagaagtaactgcaggtaacgtacacagcccagtgtgtggtaaacaaaaatgtacttggtaaatgttaaaccattgtgcttggaagtggtgtgggttaatggtcaagagccttgggtccggagccagactgtttgggttcaaatcccacccttagcatttaatagctgagagcattgggtaaccttcgctgactcaatttatctgtcattaaaatggaattttattacaacatagcagatatttaataaatattagctacttttatttcattggcagtaaaaacagttgattgagtttccacctcaatcaacaacgtagtagtgaattaaatgagaattcagtacaatgcgtattttttaaaaattgtgaagaccttgtatgcatttatgacttttttgggcagagtcaagctgcgatgctaagggtgtggttaaactgtaatatgaaggaaaaaattcaaacagggagcataaaccacccaccagggagctatttcttttgtaatgtgcattccatttcttctccctcatgctttttaattccttccatatttcctgccataattatcaaatgtttagtttctgacctcactttcctggagactggagcccggggaatttagaattgtttattttctgtccataaacctttgagttaatggagcggcttctgagcaaagagtttgttggtttgtttgtagtgtctcaggaaggtcgttagagttgaaaaaattggtacaaaaaaacaagcgctgaaatgctttaactggaaactcgagcccccaaagagcagagcaatggatcttctcttacacttgcgcaacgttacagggaacacttgggaaaaggccgttacattgcccagatgataacacaaaacccgaggacacttcacaaagaagaaaatacatttcagagaatcatgatctcactttaaaagagagaaaggaaaattaattttgccccaaaagaagaatcccgattcctctgcccccgcccccaggagacagacttgggagggaaaagtccccaactactctcagtctcctctgaagtgaaggacggaactgaggcgcctttttgaactcgctgctgctccagtcgccgcctcgtccccgtcggcccagcccgtcccctctcctcctccccgctctccctccatgttagccgcggcggggctcccgcttacggcccgaactacttttcctgctttaaagatttaagtttcgtaagcagcattactgccccagctccaccccagcacaccccaaggaccgaaactcccagcgccaccccgggagagcatccccaggacgcgcgcccacccgcccagcgcgcagacccaagaggccccggggaccgagttcggactcctcggcccctcgcctacctcggcgcggacccaggcgaccgccaccagcgcgagcgcgagcgcgagccagcgtttccacatctgcggaagagagaagagagcgagtctgaaggcgccgggccccgcgctgacctgggaaacttgctcgggtcccgcaggctcgctccggccgcccaagcacccccggccgcccgaagagtccggcctccgcgccgtgcgccctgcgctcaccgtggtctggtccaggtctcctgggggcgcggggcaggacggcggcagcgagctgtaagcggaggtgggagctccgccgatcgccagcctcggaggaaatgcgacctcccctcgccgccccttaagacctctccttccccgcctgcctgcccccccagctcctccccattctcctcccccttctgctgcagcggcccccgcggctcccgctccccctccttccgacccctgctccggggagcccgcgggagtcctggcgccgccgaacccctctctccgcacggtccctcgtccggcgccccttcggccccctggacgtggagcggaggcagagggggtgtcccgtgggtccctgccacaaaggggtagggggaagggaaaccccaccccgggaggggctgctggctggcggcggcccgggcgggctgcggcggtggccaggtgggcggtgccgtggggggcccgggaaggtccgggactggaacctggaggaaaagacgtcccgcggcctaggaagcggagccgccccccatggctgaagggggaggcccagggaggcagaggagaccccgcatcccggggtcacggcagcagggcagcggggcaccgggaagtgggcgcagggccgggaagaccggccggcgtggggaaggctgctgtgggttctacagtgcattgtcccgggtgaggtggcggccgccctgctctgctgggaagatcctgagtccagcgtttgccggcagcctcatcccctccttccctcgggccggggagcggtgtccccctcctctcttccgcccactcactcatcacctgtgtccctcctcccatccctgtcatcccaagtagcctctgtgttcaggattgccatcttcaccaccttcttcccagcccttggccttcgaaagtgtgctacctctttgacagggttaactccctaaaatgctcctaattaaggcgcctttcctgccataactagtaaggagagcagatccacttagcaactcagatttcacatgcccaagactaagcctcacttcccccagcttcagggcctgcttatctacctctttcagggtggttgccttcaaacctatctccttttctcagagccggcttgtacccatagcctggcagtttagccgctgagatctcatatgcatcccctcgcctccgttcacatgtccactttcctaggccagaccttcatcctccctcactcagaaattctggaaacctcctttcgttgtcctctgactccaggctctcccctgtagtctccactgcaatccattgtcatattctttcccttattttaaacattgtcttcctcgtgttcatgttcttcctctactcagaaacttcagcgttcttctacccacatcaaatccaaactctgcctttcttataagccctgcattactgggcccaccctgtccatctaacttctcttcaactacatcagcatacttcctccgctcaaagcaggcccatctcctcgttgtcctctgaacttgtcatactcactctgctgccaaggtttgttgagtgcccactgttgtggctttagggggcttcaagataatacccatggtccccatgtaagttcagaatccactgagatagcaacaggagtcagacttatggagagcaaaatgtcagctttgtctctgctaaaggctggaatggcagccatggctttagatctgcagggacagcgggcccagaattgaacatgtccactcagtcacaagcagagctggaaaacctgcctgtgtaaaaactaaactgcatggaaaagcagaaaatatgtgcctcctgggacatgcctgctccccaaacttgagggggtagagtgacacatccccagttctttcaaactctccagtcagacaacttactcctgctcccttgttatggtaataagattagggaatagatgttccgcaccagatactctgtcttggtcactgtgcaaggattgaagggaactattgtggataaagttctgccctcgaataacgcacaatacattgcatcccttgcagatccactgcaccctctcagaatctggtatcatctttcctcccttcctcttatctactaaaatgcttgggtttgtttgtttgttttgttttcaggaaccacgtcaagtttgcttccttcatatcttttc

SEQ ID NO: 315683 - DNA, 4001 bp, Homo sapiens
caagaaaaaatgcatacctcccttatacaagaactacagggccaaatagtgagaatttaaaacttttcgggaaaggggtggggggtgatgcaaaacgacttatctacaattgataggaaaaacatagataagtctattcttttcgccgtcttacccagcgaactgtatctgcagtagtccagggaaagcaaccaccaggtttcaataacaacaaaagtcaattaactatgtactcaaatttcacctaggtcattggtctgacatcaagtcttaaaccgagaacgtcaatgttaactactcacgcattaacataaagtctcatttccaacaggcactgttcctactttaagtttaccacctaaggagatttaaacttgcaaaaagcttagggggatcctttatacgctgtgattccccattatgctggtaccacgtgacagttaaaccaaatccacagagctaatcagtaaactaagaaaagaaaatcaaaatgctgaaaatagaaaatcgtggccaaataaaataaaaacccataggataaaaggtacgctgaaatgaaaacctgtgagaattcactttgcatacgcacaatactcatgtattagaagaaggcccttcataaaaatagccaagactctcaaacatttgagatgctggcttagtgagattgactgacagacaacagctggggagattctgtattgatcttctaacaacctggcgtatttcgggaaaataaggagaaaagaacgctatagtggcaaaaaataaactattaggatttcattttcagatatgtgaacgctgaatgccccaccaaattcctctactctattcctcttacgtttttcagccccgattccatagtaatggatgtccttcctcccaagcaaacaaacaaaaaacctcgtgggagaaaaaacaaaacaaaacaaaacctccctccaaaaacaggggcagtgatataaagaaattagtcacctctccacctatctccctgatccatttcgcattttaaatcttactttaaagctcacaactctccttttcttccgtaatagaggggctaaggcgccgcccaatttcccaggccgcaaaaatattccaacccgccacaattcaaggttttctgcttttctgtatttgatcctaaccctcaatccggtacccccattctcctcagacactaaagatttgttggcccaaaactcaaatacaagggtgaattccaaagattccgcgatacacccgccccaaggggtggggaggggtcggaggagcgggctgaggagctcccgcccggcccagttcgaggggcgggggagcgggtgagaccacacaatcccaccgcctcctttcacgactcccccacctcccagagctcgggcctgctccgaaggagctcccgccgcccagcagccactcagttgcttcccaccggcccgccaagaaccgcactagcaaccaagagggttcataactaggaaaatgcaagaggtgtccgacgtgttgtttcaaaacataacggagccccggcccccgagaccgttaaaccgcgggtggaggggggagaagcaaggaatccagcggcctcgagctttggcctggctgcctttccgaccccaaacctcactctctgggaccaccaaccctccctcaaacgcgctccagcacccagaacactcgacaaagtggcaaaacggtcagtaccttgtagaaagccccgttagagccgcgaacctccaccgtcagctccgccatgttggaaccgcaaaggccgctgggaagagattctagaaactttccaaccagaggggaggaggggggaggggcgagaaggaggcggggaaaggggaggggaaaacagggctgggattgggatcccccgcccttcacccctggggtctcaacgtgccgccccgactctccaggtgggatccctgcgcaccctgcatcaccggctttgggctccgcctgccgccgtctacgtcggatttgcctccagacacaatcgcccgacctttgttgacccgcccctaggtctccgccccacagtgcccgcagttcgcaccgcggcggccgagtagtgcctccagctgccacagaatgaactgcccaggcacagcctgcccggcgcatcggcattcccctgagctccggcatcctgaccttaaacttctggaagtgctggctgccctggaatggctttctcacccactttttgggctccagttgccctggggaagagggatgcctacaaaatagacatactgttgtgccccaagttatttcgccccgctctttttttaaaaaaagttgggccttctcttcactcaaattccacagttccacaccccctcaaacaatttggcctagccctctccccacctgttaccactttagctctttaaaagtcaaactgagtattttcagggcaagtaattgtgttcacaccctagaacagagtttaggtgaattcgccttattaaaagtagtcagacaaacttaatagagcaggagaccacgttttcctctgttaaatgcatgcaaatttccgcaaataggatcaaagcagaaccatctccagttttgtaagcataacaaatactttgggtatggattttaacaacttaatactgaagctccttccctaagcaagggctttggaaaataatactataagtgctccttgttatacttacattattaccgttttcgcagaaaaacttaagaaaggatactttgctaacattctatacttcccatgaaacgcccactgacccagtttttcagattctaaaaaaataaaatgtacacaacattttatgagcacgtctgcatctctgaagattctgggaaaaaatgagggctgtgaaagtgctcactgttgttatgtacaggatattctatttatttatttatttagagacagggtctcactctgttacccaagatggagtgcagtggcgtgattacgtggcagcctggacttcccaggctcaggtgatgctgccacctcagcctcccgagtagctaggactacaatatttattttattttattttattttatttattattatttttttagacaatctcgctctatcgcccaggctggagtgcagtgatgagatctcagctcactgcaacctccgcctgctggttcaagtgattctcctgcctcagcctccggagtagttgggattacaggcgcgcaccaccacacccagataatctttttgtgtttttagtagagatggggtttcaccatgttggccaggctggtctggaactcctgacctcatgatctgcctgcctcgggattgcaggcatgagccaccgtgcccagcctatgtattcactcccggcctatttttttttttttttttaagacaggatctctatcgccaaggctgaagtgcagtggcacaatcatagctcactgtaaccttgaactcttggccatcccacactgggctgggatgttctttttaaagtgttgatcatcatgagaaaaatgtaaacaactaaatgcccatcaatgagtaatagccaccatttattaagggcaccttatgctaacactctatattgtatctcattgtgatccttcagaattataatgtcccatttgctttcttaaaaagttttctttagatataattctcccatttataatgtacaattcagtagtttttagtatattcacagatttgtgcaaccatcaccacagtcaattttagaacattttcatcactgcaaaaataaccccatacctgttagcgttcactctagatttaaccccagctccccaggccctaggaaatcactatcctgttttctacctatatagattggcctagtctagatatttaatataaatgaaatcgcggaatatgtgttgttttatgactggctttcttttttctttttcctttttttttttttttgagacagagtctcactctgttgcccaggctggagtgcagtggcttgatctcc

SEQ ID NO: 315684 - DNA, 4001 bp, Homo sapiens
ctagtcttgagtcaccaaagctgtgtctttggaatcttcagtaaacaaaagttacctatcagctaaacatctcccctaaagggaagcagggtgggtgggggtgagggggctgccatttcttgcgtacctactttgtattcttgagtcagcagtccatagccttggtgaccaatatgggtcaaagctaccagctgctctgatcttgctctgttatgggtgattcctctcatcacaaacatctatgggggccatccccctcaaaaaggaccaggttaaaaacttggctcctgaaattatactggtgctccaaacccagccccaaggggcaaaggtcatcggaacaacagctaaaggatcactgcctgagactgttaccaatctctaaagtaactgcaaaaaaaaaaaaaaatcaaagtaaaatattaagaattgagtatacggatattcaccatacaatcctttcagtgattctgtatgtttatttttctaataaaatattaaaaacaatttaaaaagtaaatgaagtgctacacaaagatagtcactttgaacataaacagataaactctatttcctaaagcaagagcctttaggagagatcctattaatcaaaggaggctgagatccatcactgtgacaattagctcttattttcagggtgataataaccacggtgcacaactagtatggggcattcaatgctttcagaacagtggttgtcacagaagggagggtcaagtggagctcactcaacaggggtccacttcagaaggtgggaactactgaaagcagaaaaccttggcatgatagctccagctccccacccctcccccacaccagcccccaacaccctccagccgcattaggcagatggcaggggaattaagcttgcagcctgagaccacaaggcctgcacgggcaggagaaccagtgagcagattaagccctggatcctctgccccgcaaaagcccctgacccatttctctgtcgggaaaggaaactgctgtggtaagacaagcagaggggctgagaggctctggccaacacaggcagtttcaacaagtgttctatttttttttctggagaggacacccaatgggaacagtgaagagtgacagggacatcagagaatacatgtgctttaacagggggccacgcggttaacgtgtcaaccacatgtgcttttcttacaaaaaataaaatcccgccatcctcccccctccccgccccacccccgccaggtttcaacagcacggactccagtccagtgcagtgccgccacaccagagacaacaggtgtttcgggaaaagacccctgggggctagctcgagaccctgcgcatgggcacaaggggcagtggatagtgaataggtcttggccaaaggatgggccaggaagaaagaagcttcttcccctcctgggaagagggcagagatccgagcaccagcggagtcttgcaaagtgaaggtctgggctgtcccggcccaactgggccagagactaaacttcctaaagaccacgcaggcaggaactccggggcctgccccatcctgcgctaagacattcaggcttgttctgagacgccgcatggtgggctcctttcctttgcgggccctccgccctccggggtcttggaactggtgtttggggtctgtctttctaaccgaccaacagaggcaggctgggtgcctgggccggcttccacctgcccgaggtgcttcccggcccgctgggcaaggacgggggcgctcgggcagggtctgagggagacctgggatgggcggggactgtaagggcaacaggtgacaagccgcgccccgagcgaagctctcgcctcagggatcgtgagcgacccaggtgcccccagagtccagccggtcttccgcggcacttacgcgctcgtgggtccaccgccgggcagaaccgaaactttctggggccaagcggaagaggacgggaacgcggtgctgacggccatgacgcgcacaccaagagggtggcgggggcggactacaactcccggcgtgctccccggggctgaggcctgcaactcccatcggactcccggggctccgactacaactcccggcgactccgcagggcggggtttaagtgctcccaccgcccagtccccggaccgactgtcccacccgcgacccatgctggccccaggttaacgcctgcaaccccggagggccacaaatcaaaggtctggcatcttgacaacaacgctgttcttgtgtggctaaggagcactccaaaggtagctagttcgagttgaatcgtgcacgtgctgtaagtgtgaaatacacctaggtaccaaagagtccgaagaatgttaactagctcattaatttttagtgattgcatgttaaaatgataatattttgatatattgggaaatagaaaaacatgtattggtgggcctaatttcccatcttttaatcccccttatttcttaatatcagggtcttacttaaaattagtgctcaaaaactacgtgtttatgaactaccacccctaactttggccccatcctcagcccaacttctatttataagatgggtgttgcaaagcactgtggaactgaatacgatagaacaaaatgcattcaatcagtgtccgctatgggcacagtagaaaagaggaacactacacggggactttggcttctaactgactgcattccttagctgtggctggctatcctttactctctgccctagttctcatcatttaagccagaaacagctctctcccttgtaggacctagctcgtggtatccagtcaggaaccgtggtggcccaacattctaaactgaggaagcagggtgttgtctgggtacaataatacagaaagaaaatcaatttcttagtcgattttaggctatgacatctcattagccatctaattttataaattagatgtagctaaaacagtgagttggatggatggagtagtcagtttgggggtggggttgggaggaggtacatgaatagaagtgatttccactcttgttaacagaaaggagaacagaaagaaaacggggggagtgagaagatgacaaagagaaaagtaatcaatgtagtggtctaagagaaatcattgctccaaccactgtctgaacagcttcatgcaatattaaggatgagagagattttaatgttggtcatctggtccaatatccttgtttgaaactgtgtggggaaaaaaaaacctccctcaaaccgtatttttcctctactcttacacaacagcaatcatcaacacaggagaataatttggtgaccagatgtgtgtggggttttccccacacactgagcagtggaccgcacctgggtgtcctccaattcaattccgacactatctacctggagtatcagatcccacaagtggagggctcagtccccaagactgcctcctcacctttaaacaccagttgtaagtctaggcctccagaattttggaatgactggcttcaagttgagttcccacgacaccctctttgggttcagctaatttgctaaagtggttcatagaactcagagaaacacatttactggtctattataaaggatactgcaatggatgcagataaagagacacgtaggatgaggtgtggaggaaggggcgtggggcttccatgccttccctggatgcaccactcttcagtaacctccacgtgttcagctatcccgaagctccccgaatccagtcctcttgggcttttatggaagcttcgtgatgtcagcattgcttcccccagggtataggggaggaccctctcttgggagggtcttaagacctataatcagaaaggcgggggaagcggctgggcacggtggctcacgcctgtaatcccagctcacgccttgggaggccgaggtgggcggatcacctgaggtcgggagtttgagaccagcctgaccaacatggagaaaccccatctctattaaaaatacaaaattagccgggcgtggtggcacatgcctataatcc

SEQ ID NO: 315685 - DNA, 4001 bp, Homo sapiens
cagctattctcatgtcttagctgggattacaggcgcgcggccaccacgcccggctaattttagtatttttagtagacatgggatttcaccttgctgcccgggctggtctcgaactcctgggctcaagccatctgcctgcctccgcctccgccttcaaagggctgggattgcaggcgtgagccaccgcgcccagccccagctttctcatttcttacaagctcactactaaccagcagcaaggcaagacttgaggccaaacctattatttctgatcatttgcttagttcacatactggattctgactgtggcaatcgtagaaatcaatagttcccatctcacctggaaccaaaaacgttccagataaaccacaacaaaagacacacaagacaaatgggaagaaatgaaaaccgaaagaaggtttccaagacagttatcactctaaagaccgtcctgggaaagggtacgcctcggaatccactagtcaggtacttttcaaatatccgaaaaactgccagccaaacacctggcagagctgacttacacccaacgccatcacttgaatcccgacaaaaatattcgtacttttagcccacctaagctaaccacagcggctggtgcctcggtagtgtcagggctggattttaatggaatcaccaacctcccggtttttatataatcggcaagaaaccacgccaccctctcagatgcgctcaagaaccccacgctttacctggcttctcagcgagccacagcaatcatctctccttcaaagatgtttgctttctcccccattagctagctctgaggcctggagagggagactgtgcttttctaggcagcgctcaatacacaaccacatcccacaggcggccgagcgctgcttcctttctgacagacgctccggggccgcggccggaggtggccccgagagtcgcgcccggcagccatggccggcgccggcctggaacgcccggcgaccagggaaagctccggaagcgctggtttaaccgaccgcagccccggccgggctctccaagacctttcttcagagagaacggctcggtcggaccattcccctcgctccccgataacgcccaccgcgaacgcgctccggggaaaccggcagatctttcctcacaaagagccggcgagcggcgagccgtagcccctccggggagaagagacgccccccgcgaccctgcgaaccttcgggcccgcagcgcccctgcccccgcctccacagcccctcctccgactgccgcggccgaggggacgcccgggtccctcgcggtccagccgggcacctggcgtcgagcctgcgctcccggctgtcctccgggcctccgctcgggtccgcccaccagcgagaaaactccgccggcaactgctgccgaccgcccctgcccccacaaaccgcgccgccggcttccacccgcgccctcccccgcactccaactcggtccaactcggcccctcacccaaagacatatctattttgtcgaggttttcattgctgcgggccttcggcggcggcgaagaagtcgccgtggctcccaccaaccgggtaccaaaccggttcatggctggagacgtcgcgccgagagcgggcgcggacaaggccggagtcgcaggcctgccacctcccactcgcgcacgcagcccgccgcaccgagggagcgcgcacgcgccggcgccgtcctcggtctccacccgcggctgcgggcggggcggggccaccgacactcgcgggcgaccagagcggccccgcgccgtgactcgctcctagcggccctcgcaggatcggacgaggcattgcagccgctgtgctaggcgctcgcgaggaccgccgttgtgagcagttcgactttccgcccaaactgggggatgctagaccgcgggcacctctgaatcttatgccttcagtgatataatcctccgtgtccttcgagtccctcctgctgcagacaggtcccctatacttcggtacacacgagcctttcgcgcccaccgcaacgcagcctcgggaggcaggacagacccctgcgagtgtagattgcagctgcatcccagctcccccctccctggcacgctcctccacctacagctgcgctgagctgccgcatctgaacgcaaagcaaacgctgcagtgacggttcctgcgtcaccttaactccaaagtaaatgctaacgtttcccgtgtctgtaccttctctcaatcggcactctcaaaacatctggcacggtgttcactaccctaataagacctcagcttccctcgggaggggtaagtacctctgttgatgtagctgcattttcttctaattcatttgcattgggaatggatagaagggttcgtttactttttaatcatccctacgggaaaacagtttaatatttgatgaattcctgcatgataacttttttccgtttacaacatacggtatttacctctcttcttacctcattctccttccctgaagtaactgcgtttatgtggaagcgtttaggttatatcaccctcatacagcttaaaactatctcggatatttacatctaaggacaataccagatgcattctgtccacctagaaatctctgtcgcctttctcctctccaattcataaaatgcaaaaattcctttagcatggaaaccagccatctcaaaaccacagtagcctttgcttaatttagtcatgtcacaatgtcatgtggcttccaacttcaacaccaatgacacatttactattttttgcttggggatcccatgttttaaaatatttcttatgcatgtcacacttaaaaattaaagccagctgttccagctcccctttccaggcctgaatttaaagcaaagcttgcagtgacaattttgcggtcaccttaacaataaaagtaaatgtgaacgtttcctgtatatgtagcatggataaaaccaggagtcttcacacagattatgtttccagctgaactcaaagaaccatgacttttttgtaagcctagtagtcttatcttggggaaatgtatgatttttgttaggcttttgggaatattctaaataacttcttattctcaaaggttaagatgtctctttttttttatcatgacaaggacataacaatataggaagagtgaaccacacacctatcaaggggcacaagaaactttaatagtggaggaaagtttggactcggaaactcaagaacaatatttggcatgtcaaggagaatatcatgtatgtccttagcataatgtgcttgattttactactctctcaccctgaagccccttcatttgtctggactgctaaaaactagagaaactggctcacgcctgtcatcccagcactttgggaggccgaggcaggcggatcacctgaggtcaggagtttgagaccagcctgaccaacatggtgaaacccctactaaaaaataaaaataaataaaaaaataaaaaaattagccgggcatgatggtgggcacctgtaatctcagctacttgggaggctgaggcaggagaatcgcttgaacccgggaggcggaggttgcagtgagctgagatcgtgccattgcactccagcctgggtgacacagcaagactccatctcaaataaaaaaaaaaaaaaaactacagaaactgggttgtgggcccagacctgagttttattgagtgataactttttcactgactttagttattcactgtatgattttgggagagtctctggacctcatacccatcttcaaaaccagaaaaaggagtaagaatagtgagtatgaaaagtatatttaaaatcctctaagcacaagtcatttttctccacattcaccttctgtcactagaaataacttctaccatctctgctcatttgtgagagtaaactacagagaggatccttaggttaagttcttaattttatggaagaaaattaatgcaattagagtttggaggcattttgtacttcaggtatttataggacagataaaaatcccaaatgtataaaa

SEQ ID NO: 315686 - DNA, 4001 bp, Homo sapiens
taaaatgcttagtacaggacctggtaggtagtaagcactcaataaatattcattattacattatttgttggccttacctcaaaaggtttctctctcttttttgcggggggggagagcggggggagacagggtctcgctctgccgcccaggctggagtgcagtggcgcaatcggctcactgcaacatccgcccgcgggttccagctattctcatgtcttagctgggattacaggcgcgcggccaccacgcccggctaattttagtatttttagtagacatgggatttcaccttgctgcccgggctggtctcgaactcctgggctcaagccatctgcctgcctccgcctccgccttcaaagggctgggattgcaggcgtgagccaccgcgcccagccccagctttctcatttcttacaagctcactactaaccagcagcaaggcaagacttgaggccaaacctattatttctgatcatttgcttagttcacatactggattctgactgtggcaatcgtagaaatcaatagttcccatctcacctggaaccaaaaacgttccagataaaccacaacaaaagacacacaagacaaatgggaagaaatgaaaaccgaaagaaggtttccaagacagttatcactctaaagaccgtcctgggaaagggtacgcctcggaatccactagtcaggtacttttcaaatatccgaaaaactgccagccaaacacctggcagagctgacttacacccaacgccatcacttgaatcccgacaaaaatattcgtacttttagcccacctaagctaaccacagcggctggtgcctcggtagtgtcagggctggattttaatggaatcaccaacctcccggtttttatataatcggcaagaaaccacgccaccctctcagatgcgctcaagaaccccacgctttacctggcttctcagcgagccacagcaatcatctctccttcaaagatgtttgctttctcccccattagctagctctgaggcctggagagggagactgtgcttttctaggcagcgctcaatacacaaccacatcccacaggcggccgagcgctgcttcctttctgacagacgctccggggccgcggccggaggtggccccgagagtcgcgcccggcagccatggccggcgccggcctggaacgcccggcgaccagggaaagctccggaagcgctggtttaaccgaccgcagccccggccgggctctccaagacctttcttcagagagaacggctcggtcggaccattcccctcgctccccgataacgcccaccgcgaacgcgctccggggaaaccggcagatctttcctcacaaagagccggcgagcggcgagccgtagcccctccggggagaagagacgccccccgcgaccctgcgaaccttcgggcccgcagcgcccctgcccccgcctccacagcccctcctccgactgccgcggccgaggggacgcccgggtccctcgcggtccagccgggcacctggcgtcgagcctgcgctcccggctgtcctccgggcctccgctcgggtccgcccaccagcgagaaaactccgccggcaactgctgccgaccgcccctgcccccacaaaccgcgccgccggcttccacccgcgccctcccccgcactccaactcggtccaactcggcccctcacccaaagacatatctattttgtcgaggttttcattgctgcgggccttcggcggcggcgaagaagtcgccgtggctcccaccaaccgggtaccaaaccggttcatggctggagacgtcgcgccgagagcgggcgcggacaaggccggagtcgcaggcctgccacctcccactcgcgcacgcagcccgccgcaccgagggagcgcgcacgcgccggcgccgtcctcggtctccacccgcggctgcgggcggggcggggccaccgacactcgcgggcgaccagagcggccccgcgccgtgactcgctcctagcggccctcgcaggatcggacgaggcattgcagccgctgtgctaggcgctcgcgaggaccgccgttgtgagcagttcgactttccgcccaaactgggggatgctagaccgcgggcacctctgaatcttatgccttcagtgatataatcctccgtgtccttcgagtccctcctgctgcagacaggtcccctatacttcggtacacacgagcctttcgcgcccaccgcaacgcagcctcgggaggcaggacagacccctgcgagtgtagattgcagctgcatcccagctcccccctccctggcacgctcctccacctacagctgcgctgagctgccgcatctgaacgcaaagcaaacgctgcagtgacggttcctgcgtcaccttaactccaaagtaaatgctaacgtttcccgtgtctgtaccttctctcaatcggcactctcaaaacatctggcacggtgttcactaccctaataagacctcagcttccctcgggaggggtaagtacctctgttgatgtagctgcattttcttctaattcatttgcattgggaatggatagaagggttcgtttactttttaatcatccctacgggaaaacagtttaatatttgatgaattcctgcatgataacttttttccgtttacaacatacggtatttacctctcttcttacctcattctccttccctgaagtaactgcgtttatgtggaagcgtttaggttatatcaccctcatacagcttaaaactatctcggatatttacatctaaggacaataccagatgcattctgtccacctagaaatctctgtcgcctttctcctctccaattcataaaatgcaaaaattcctttagcatggaaaccagccatctcaaaaccacagtagcctttgcttaatttagtcatgtcacaatgtcatgtggcttccaacttcaacaccaatgacacatttactattttttgcttggggatcccatgttttaaaatatttcttatgcatgtcacacttaaaaattaaagccagctgttccagctcccctttccaggcctgaatttaaagcaaagcttgcagtgacaattttgcggtcaccttaacaataaaagtaaatgtgaacgtttcctgtatatgtagcatggataaaaccaggagtcttcacacagattatgtttccagctgaactcaaagaaccatgacttttttgtaagcctagtagtcttatcttggggaaatgtatgatttttgttaggcttttgggaatattctaaataacttcttattctcaaaggttaagatgtctctttttttttatcatgacaaggacataacaatataggaagagtgaaccacacacctatcaaggggcacaagaaactttaatagtggaggaaagtttggactcggaaactcaagaacaatatttggcatgtcaaggagaatatcatgtatgtccttagcataatgtgcttgattttactactctctcaccctgaagccccttcatttgtctggactgctaaaaactagagaaactggctcacgcctgtcatcccagcactttgggaggccgaggcaggcggatcacctgaggtcaggagtttgagaccagcctgaccaacatggtgaaacccctactaaaaaataaaaataaataaaaaaataaaaaaattagccgggcatgatggtgggcacctgtaatctcagctacttgggaggctgaggcaggagaatcgcttgaacccgggaggcggaggttgcagtgagctgagatcgtgccattgcactccagcctgggtgacacagcaagactccatctcaaataaaaaaaaaaaaaaaactacagaaactgggttgtgggcccagacctgagttttattgagtgataactttttcactgactttagttattcactgtatgattttgggagagtctctggacctcatacccatcttcaaaaccagaaaaaggagtaagaatagtgagtatgaaaagtatatttaaaatcctctaagc

SEQ ID NO: 315687 - DNA, 4001 bp, Homo sapiens
cacatggccgaaatcctggcgtttcctacgggggaagtctgcttttgcataggctctaaaattcttcttttcctttacataggatctaaaaatgaggcatttaacatcagaaaaaatttctacctcaccacaaagaaccaatgttcttttctttttctttaaatgtcacctaaaaaatatacatggtagattttttctgtagcaactctgccactgatagtgggttggtgtgatgaattagctactatagtcatctctcttctcctcatctaaacatccaccagactgtacaagtctactctatggatgacagataatattttaagcagtgtcctttgatttttaaaattagataaaacatactataaaacgtaataagctatatgaaaaaaaatagagtctggtggtacactcttacatttcccaaatatttccttagctaattgctatgacgaagactgggaaagtggttaaatggaacaagacttcatatcatctcaggtctgggtctgggagcagaagcatggaagggaagtgtgagcagtagtccctgatttttaatcgcagtgcaggaatcagtaatctagtaacacacttcttttggttttggtcattaaacctgagacttcagaagatatttatcaaaattttatgttctctttcctgatcttacagtgaatgcataatacatatttaggatgtgagagcaatctagcttaaacatctgtcaccccattggctgccagtgttgaccagatgatactcttcattcctcaatttctccttttgggtctttttggaaatatggtgcttggtgaaaagagaactctttctcaaagacattatttgattattaaaggtatatgggtagtagggtgacaaatcattccagtatgcctggggctgaagggattcctggcatttttagtactaaaacctataaagccctaggcaaattggtgtataaagaggtcactctcacagatagctatctcccttactagcacgtccaaacatgctcctgattattgatgggaagataataatgatgatgtcttgatattcatgatttgtcaaacgtatgaaaattattcttgaaagacaaatggctttaatgccttttgatactatttcatcaatccatgaaactatataccctagaaatacttgacattaaatgaagttggtgcttagactaatttctactcaaaataaatttgaagaaacattaaacaagtatttaatgtattagtaataaatgtactactaattgaagaaatacattctctgaaagaggatccttacatgaaccctttaactgttttctcccaaataagcataaataaatttacaaatgtcagcaaattccaagatattgctctttcggatgtcaaacagaggtgatttatgatgatgcatgaatgctatctctagagacagacatggttacaaagatgtgctaccattaaagatacgtttccaggtttcctgtaggtctgagacaactgttgagagaaactgggcagtaattccatggactgcactatgagcatcttaccaggtttgtttcattgaagaggagcaccgctggtgtgtcatcttgatgttagaagcagcacaaacatttggtttcaatatgatccagatgtaggtgaaggagactaactggaaagccaggaccatctcttccaaaacaaaaaaacagaaaggatgcaggtgaacgcaaccaatactgtgatcacagtttcttcttcatgtgtcttttaaaaaacaaacagcatgtcaggggaaatgcattaggggaaaaagaaagacattgtcttcaatgctgcactttgttttagcagattaaattgactcacagcacttacaggcaaatatctacctggatcttcagcaatttgaggaaaacaaagcagatttttaaaattttcagtttacatcctttggtccctttttccggggaaggtttttagtgtgatgctcaatccatactcagtaaaccctcagcggcagtcctaagcaaacaaagaagtgaggttaagcattaatcctcttaatccaatgcaatatcatttaaatatacttagtgactcagcaaaataatatgcttattgagaaaaaaagatgattaatttaatcttaattacacgtttgaagaccttttccattatcttatggctccttttaatccagaaagaatcttttcctccccaaatgccatacagactgccttagcatgaatacaaaataaaattattttttttaaggtaaataatcatattttaagatgatggtttatttcattgataacaaaagtggtttaatttaaggtttatttaatagcaagcaacccagttaataaaaatgaacttaatcctggtcagtgtgcaaagcacacactgtcactgttaaattatagccacacactctcctaaaggtgctttgcatacttagagaaaatatttaagaaaatatttctacttcacatatgcaaagcaccaataaatggtcatgtcattgaaattaatcttcttcaactggaatagcacaaggtgagcaacacagcaacggttgacctttttactaggacttaggaagaaagccattttcttcccagaaatatagtgttgtgagagaaattcttaaatttcctcaaattgatttgtgtccttgacaccttctattttgtgtaattgcttaatcatacttatttcttttggtttgggttatggcttcttttagcccatgcattaaaaccttctcctatgtttcttaagcatgtcttttctctttaaaatatattttaatataaaagattacaaatatacagaatgatgtaataaatccttgcttctcttcttaggctcgatttagtgtttataatcatatgcagttatactattattgtatatgtatgtatctataaataatgtacaaacttctgcatgttttaaaactttatataagtggtgtcatattctacttttactactaaaagctactttttctttcaacttaatgcttagggatttattatgttgataaatgtgcctctagttaattcattttaactgctatatggcacttcagtatggatgcataacattgcatttattcgtatttttgttgatgggcattgtttcttatttttctattataaacaatcctgcaataaattcttataaatattttcttgtacacatgtgtaagtgtttctttaggataaatacctaaaagtaaaatggctaggacaaataattttcacaccttcaaatttactaagcacaatcatattgctcatcaaagtgcttgtaccaatttacttccccactagcagtgaatgagagttcttatttcttaaaatattttttaacattggtattatcagacttttaaatgttaagtaattcaatcagtattgtaattttaatttctgtaatgtttagaaacgttgaagcattttcttcaggtatttcggagccagtaagccttctttgaagagccaatggaagaaatgtaggaaaagttgcccatcttaagctactgtcactttggttgttggaagaccgcactgtggtcaaagtttgtttcagtacattccacctcagtgctcttacgagatccagggcaccaacccctcggccctagcactatctattacctcgtcccctcttcacttagtaagcaacatctacactaacatttcccaaagtatttcttggctacactgaaggcattttgtgaaaaattgttatgtactaaatgagtttgggaaacattatacattttattactctgttaggggtcacactcttaccccagggcctttgcactggttgtcacccttgcctgacatattgttcatctggatatctatatggctaactcccttaacaaattcaaatgtatgctaaaatgtcatctattgaatgaagtataccctgaccactctttttaaaaataccgtattctttctttcctcctacaacctgtgttac

SEQ ID NO: 315688 - DNA, 4001 bp, Homo sapiens
gtttctatcatatttctgaagactatgctatatggctttaaaacaagaattaaggttaaaaacaaaacagcagggttaaggtcagataaaactattttaaccatccttccttcacataaagaagtctcctgtattattaggattcctaaataatctatacttttcaatccattctcaaatagccaaatatttattttatttatttattttttgagacagagtcttgctctgtcacctaggctggagtacagtggcgcgaatcttggctcactgcaggctccgcctcccaggttcaagcgattctcctgcctcagcctctcgagtactggattacaggcacccaccagcacgcccggctaattttttgtatttttagtagagatggggtttcaccatgttggccaggctggtctcaaactcctgacctcaagcgatctgcccacctcggcctcccaaagtgctgggattataggcgtgagccatcatgcccagcctaaccaaatatttaaataagtatgtgctgaccctagaaacattaagagtctgacaaaatgccttagcagttttcagtgtcagttgtttttcttctttttaagttttattgtttttaattgagacatcataattgtacctgtttatgggctacaatatgatgcttcaacacatacatacattgtttaatgaccaaatcagggtaattaccatacacctgtcatttcttggtggtgagaacactgaaatcctctcttctagcttttttgaaatatacattatcattaactatattcaccctactgtgcaatacaacactggaatttattcttactaactgcagctttatacccattgacctacctttctacagccctctccgctccccagcctctggtaaccactattctaactttctacttctaagtgccaggttttattatgccatatataaaaataataatgatagtacaagttttaaagtttttttaaaagagcgtcaggacagttatgctggaaactctccctgggacattaaaaggtgaaatatttgtttcagccaaatggtttctgcctcaccaactactgtgcaaaattcccagccctgaaaatgactgatccgcaggggaccccagctgagttacctgacctacctgttgagcagatgcccccagagagcttcaactttgagacttcattaagctgtgttcagcacaattcaaaaaagttattgatacaaagaggagttattcctggaggatcactcctaaaacgccaacaactagttagtgagaatacctgaataacaataatgataacctttcaaagaagcagcaactattattttacagaaatagaactaagtggcacctgagttataaagacagtttggaggaattctgctgcatacgatctttaaacaactaaggtccccgttctcaatctgcagctctgaaccaaagaacattaagggcatcacctactctgagatgacggtggcctcttttaacccctgtttatagaatagctggctgcaggtgaaaggactgagatgatgctgtccttgtcccccagaaagaagcaaaatcatcttttttacagggcaggtacttccaatctaactagggaaacatgcggcagttcgccaagcagtaaaatctcaatacgcatttatttaacaaacgcccgttatgtcttaggcgcggttcttcgcgctttataaaagttaactcatttgattctaaataataaccttttaggtacggaaaacggagaaaaaatccatgaagatggggactttctacccaccccagccgctttacaaagaaataaccaaacttctagtccccaggtcaaaaataaggagattaaaacccagacaggggaggttaaggacaaaaaccgcagccgcgctgagtcgttaccgtccacaggacactggcggtccgagtcgctgctcatctccgctcccccactccaggctgccccgggcgcggctcccgcagtctgggcggcgacggtggttgccgaggcagcgccccccgggggacccgcaggtgcaccaggcagccgcggagagaacaccagtgcaaacggagggacgaggacgcgcgcgctccgtgctcctttcactttgctatccaaggctccagtgccaggcttttgcagcccgcggctctctgttaatatttggagcgctgctggctgctttgccacaggcttgacccagggccagggtctctccgcctttgcggggaaggggtggggaagtgtgtaggagcgtgggtaatttgggtaggaaaaggcagggagcaccctaccagccctcctaggatacaggctgggcaaggcagataagtggctcttggcctggtgacctttccagcgtccagttctttggagtaaccacttcgcagagcctcatccagccggaggagccccaggctaaatatgatgcctgcaccaggtcatcagctgaaggaacctattttagggcagctgtggtgaacaggatccactacccattcattcagctctgccctgacatttaagagttctataagtgaatcccttttcccagtccactttcaactttgtgtgtgtgtgtgtgtgtgtgcctctgcaaaattttaagtttggaaaagggaaatggtagggggtgctgggcatgttgttaccttatagtaatgagcaaaaggaggtggtaaaaggtgaaatgttgtaaaaggctcaatatttgtctagtctttagagtaaaattttctccctgtgtttgctccagcaagcccttggaattttagtttcagtcacgttcctattgtaaatttaaatttaattagtgaatgcggcatttttgtcattcctccaacaggctttatgtttaaagttaaattcccttaggagcttttaactgaggctgtcgatgggatagaaacaatcagttaatgccatttcaaagcacatttatgacaactacatttacggagctgcatttgtaatccagatctcaatggactaaaaaaaagaaaatcgctttacatttgcaaatgcctagtgtcacttcttagcaggtgaatttttttcctctggcaagcataattatagttcacatcggtgaagacagggcagacctttcttccaaataagaatagattatttctaatataccaacaaccagagttactaaagtcaagaccctgcagataaatttcagaaagactgtgtaagtttctgagaaccccacatactcttttgtatccagtctcagcagaaatatcactgagatctagtgatgaaaacgtaaataacactaggagttaatcttctgtaactctattaaaatatactgaaagaagtgcagtcgtgtgttgattaatgatggggatacattctgagaatgcatatcgaggcgatccatcatgcgaacatcctagagtgtatttacacaaacctagatggtaaattccacaacacacttaggctacatggtatagtctattgctcccagactgcaaacctgtacagcatgtcactgcactgattagtgtaggcaattgtaagacaatggtaaataactgtgtatctaaacatagaaaagatacagcaaaattatggtataaaagataaaataacatgttacatctgcatagggcacttaccgtgattggagcttgtaggattggaggttgctctgagtaaggcaggcagtattaagtgagaatgaaagccctaggaaattactgtacactactgtagacttcataaacactgtacctttaggccatactaaatgtattaaaatattttcctttatttaataataaattaatcctagcttattgtaacaaatttaaaaacttataaaacgtttctataggccaggcgcgatggctcacgcctgtaatcccagcactttggaaggtcgaggcaggcggatcacgaggtcaggagatccagaccatcctggctaatacggtaaaaccccatctctactaaaaatacaaaacaaa

SEQ ID NO: 315689 - DNA, 4001 bp, Homo sapiens
gctgccttgctccctggatgctggtaaccaaggctccctcctcagtggtcagccatggtgacagtaagggagcagggggtgtggaggatgggccagcatctccctgggcacagctctgcccatcacctacacttctcagcttacctcctggggctggggctgccctggcagggtaaattgcagtcagcacagtattctggctctcaggcactggacctgtttccttagtctagtggcccaaggcaggtggcatggagtggtgggtcaggcagactggagctcacatgcctgcattcaaatcctgactttgttacctactagcagcgtgactgggaaagcaacttcaccttgttttcatacctatagaataagcatgatgatactactagcacccatcttgcagagctgtgaggactttccaggactttatgagttaatacattaaaagcttgtaaagtaaatccagacgcatgggaagagccccctaaatgtaaactgcaattgttattttgatccaaactaaaagcaaacactaacaataaccctaaaatcaaaatgtagtggagtcagagtgttagaactggcaaatgtctgctctaacctcccttctgtgttatagaaataaagccatttgacctaaagacagaagaactagaacccaggacggagaagagaatgaacaagcaagagtcctcactttctgctttctaggacaatgattctcacctgaagggcttgttcatacagaccactggaccccacccagagtttcttgtttggcaggtctgggatggggtctgagaatctgcatttctgagaacccaccagtgcccaggggctgctgacgctgctggcccaggtactgcatcttgaaaagcacttgctctaagtcaggagaggcaggctacggaaagtttgcattcccgagtttgctaccacccgatcatgccctgggatcagggaagggaaaacaagggccttacttacagtgggtgccgcacctcgggcagagccctctggagggggatgcgggcactgagtgcctcctggaggccacgtgggtccaggctgaacggggtcaactcctcttcttcagacacctccccgtcctcatcagccccccagtccctctttggggcttccttatcctgcctccttggctgcttgatgaggcggtagctcccacctctcctgccctggctctggttccttctggcctggggtaaggccacggccaccagcagctgatcctcccgcagtgagataaagggtggcaggccctccagagggctgtactcttcaccctcatcctcagcttccagtacccaatcctgggattccccaaagtccaggcggtacctggcttcagggctgtgcttgctggcttgggctgtgacagtctggtgcagggtgtggtggggagggtgcaacatcgccaccatcatcaggacgcatcccagcatcaggagcagcaggaggaactggagtctgcatggtctgtgcctgtatcgcttccttaggagcatgttgctagaacttgccaaatgcaacaggtcatgttcaagttagctttctcccgctccaggctccttcaagcttgcagcagaacctgggttgcttgttccacctggaagtttttctgccagtcacttaacctggtcctgacatttgccaacagcgtgtgcaagacctgcttccacttacaatcagaaaaccacaggacccaagtttcaccccaagtcctctctgagtggatttctttaattgccttctgaaagcccattcacagggacttcaaattgaattgcttccctccctttaccccggttttctccttgggaaaaaaataatgattccattctgctcaggtgtttctttccccctttgtataaataggttgctatgaggtgtctgggatgagctggtgggttctcagtcaagcagggctgacagccgtccctctttggacgcttccagtcaggtcagatcaacagatgtaaagccggcaggcagtgcctggtttcctttcacacatagctccactcagccgagagccctctgccagacacaacccagagccaagcgtgcgcgtcactcctggtcctaatgccctcactgttcccaggctttgcacaactcggtgtggtcactgctagagccaaatcaaaacaggaatatcccaagagttcagaaggaaagactaataccctctgattcagaaaggctgtgtgtgtggcatagctgcaaggagctgcagctgtctgtttgcaacctcagcctcccatgggggatcaggcaaactaggttggactctccttcccttcctggggaccactgtccctggcctcctgaaaatgagggagctaagggagatgatcttgcaagtcccttcttctcccacaagagcagctgaatgcctgctctgccctggccaccaagggggacgctggaagaggagtggcatgctctttccctcataaagcttccttcatttaaccaacacataattaatgaacacatgctatgtgccaaaattgttctgggaactggaagtagagcaatgaataacacagacaaaaatgtgtgtctcatggagcttgcattctagtgacagatacaattaaaactatccactgggtcagatagtgatgaggatgaaggcaaaaaagcagagcagggatggggctggggagcatgggctgggcttggaaatggacattgagtggtggagaaaggtttcatggaagagttaccatttgtgtaaaggagagggctgcacagctatttgaggttgagtgttcggggcagacagaatgataaatgtgaaggttccaaggcaagagtatgctggcatgtctgaggaacagccggcatggctgaagcaaagagagcagggtggagcctgatgggaagtggaataagagaggcaagggggcggggggcaggaggaccatgcaggacaccccctggttgcattgaaggaactttggcttttcctctgagtgagaggggagcccttagaggagagacacaatctgacttgggttttaactggatcattctggctgctgggttgagactaatcagtggggggcaaaaagcaggagcagggagaccaaccaagaggttcttggcttgcactaagtggcatcggtggtgacaggggtcagcttgtggatatactttaaggaagaacctataggatttgctgatgaattaatgactaatgtgagaggaagagaagagtcaagatgagttcaaatttttgttctgagtagttggaagaatagacttgccattaaccaagatggggaaggagagaaggtggaaggagatgaatgcatgccagtggcttgatttggaacatgtgacattcgagatgtcctctagacagctaagaggagatgaagtgaaggcagcagttgtaggatagctgaaggtcagggggaggtctggcctgcatatacaaagctggactccagcagcactcagatagtgtttgaagccgtgagacctgagatcactgagggagtgaggtaggtagaagggagaagagaatccagcatgctcagttttcaggcttctggcttgaacaggttgaaggatagctgaccatcaccatgagcagtgtttcttctgatggctgtaaagcagccatgctgtctgcaaccaagagtggaggggggaaaactgccattggggaagtcctgcaatgaacttgctcattgtttttgtctttattttgatcttagaatgtcagctaaaatgtttgtggaaaaaaatgttttaccttttgactcagttgtttcttccagtgtgtgtggtgtgtctgtgcacactcacgtgcacaagcatgtatacacgtgtgttttcatgaagtcagaggtgaaatagtgggttatgtgtggttgttctcctggaatcccattgtaatgccccagtggacagtgcttagcaatttctggattgaattgtgtcttccaaatctcaaatcacggtgt

SEQ ID NO: 315690 - DNA, 4001 bp, Homo sapiens
ataccgcccccaactcaatcccccactatccgactttttcccccaaatagccccacacaatccaggatgtctgcttatttatttatttatttatttatgccaaatctctactcccactgctctgacattctgcttcagtctcccatcctcttcctgctccttctccttcatcctcactccccacccttccttccagggcgctggctaaatgtgctaagctggcaggctgtttcttctccactctcttccacccccttcggattcagggagtgtattacaaattgcccaatttccaatacctgcactggaaattatacccaaattccatctcttgcaccccacccctaaggcaatcagtctgcgaagggcttctttgaccaagattgcccccaccacacccccacccccaccacagtcaagcatacgcacacactcacccgtatcccacacccatttttctctttaacctttgccaaaatcactcaaatgcattccaacaaatgtttgaaagcttcttttggagactgccatggcatggtcggttgctgcggaataccacactcgtcattccttcccactctcaccccaatcaagtttctaaaatgtctttcaagaaataagcgagcaattggaaatggctgtaaaacctgggcagtgggggagggaaggaggggctctgattcttgctaatcttggatgtgtccctcttcctgatgaaaatgagtcaccatacttattatccaggatgttagcctgtctctggtcactgacaatcccaggaaagaagcaagggaaggggataagagaaaagacctggtttccaacaggtaatacccggctgtctttcccatcccatcggagctcctaggggcgtggtccaccctctcctccgaccagctggtgcacaatcggctgctgatcttaggaaggggattttctccttctgcatggccaatttctcccccagccccagttgtcttagcttctcttaaaaaaaaaaaaaatctatcaaatcacagtttcattcattcattgaaaaataaatactaaataaataagacctgcacgtttttccataaatacctgcgccccttcgaagctcatgcatgcacgaaataaggcatcttccgcagcacatgtgagaaaattgtatgacagagaggcaatactcagttctgaatattatttcctcaaccctgcttttttgcaaataatataaagaaatgcctccccatcttgtaggtagagcccacatcatctcccccacacccctttctacgtccacaccctcaagaccagagacctcaaatgctgagcattcactaataagaaaaaaaaaaattatttctagccaaacaggcatgttttttctaccctcaccctaattagtagcagcattccaaaaccagagcatgaaagacagaaaagaataaaagctgggatgcaaccatcagttaccatatgctaaggaagcgcgagcaccacggccagagcagaagcagtaaaaaaattgtttgcctttacggggaaatactgtactcgggttatttcacaacagcaagaagtaaaaaatctttagctctacctgtttggttcttctcatacagcacagcatggttgtctcgtcccttgccttcttcctgccttctctcctttccttctctctctttcttattccccccctctccacctcttttctgctcgcttgctcactcgctctctcgcgctagcgcgctctctctccctccctccctctctctccctcacacacaccagggcagttagcagcaactgtaaggtccacagctattgctcatcgcacatgctcgctccctctctctagcgctctctctctctctccctctctctctggtgctctctctccgctgtcctctcttccctctcttctccttttttctccttccccccaatatctatctatctgtctttttcttccctctctctccgtctctttctcggaattgttctctagccttcagtgactaatcacttcccccagcccctacccccattctagacagtcgccccctcccagtcccctgccagcctcatgaatatttaaacacctccaatctggacccaattacccaccgacttttccactgcattgagagggtgatggggtgggggcagagaaggatattccagtcaatccaggagatatgatagagcatgttttagggaagaggggcttgaggaatccttgtatttctttaagaactcttttcctcttttcctagtattataaaagcaaagaacagctatttctaaagaggaattgtagtcagtcctatacaatataagtcatatctgccattacattttatgcatagttaataattgtggaggttaatttccctcaaaaaatgaaataacatgtaaatatcatacactgtttatatattcttctcagtatacatataacctgaaataaatacaaagcttagatatgcacaagcatattttatatatgttccaatatcctggaaaaaaatccacataaatatattgcattttaaacattctaagcacttgagctcagaaataataaacaatgtttaagaattggcatccatatctaaaatcacatggtagttttttgttttttccttaatgcacatatacctgtttgtaaattgtggtttcttctaattttactgaaaaagctgagcacattcaaacaggtctgtgtaatattgacggtgatcaaaatgatattttacaatttgggcatgagagattaaagtgaattcatctgagatgagaagaaacgataagtcatgaagcctacttcttgaattccttctatggcctttcataattttgggggaggaacatgtgactcttaaagtgtgtatagcacaatttttagttatttattgttgaatgagtttgagtgtgttactgaagctctttgcacctaattttctcatctttaaaatggagataataatgccaatcttgacaacatgttttgaggactaaatgatataacgcatgcaaagcacaacagtctctctgagtgtataatagctttactccagagactgtacttttctgaaattcgggtgacatttgcaagtgaatatctcaaagaagttttcaaactatttcttgttgttcattagtgatgacaagtacccctaattaaacagctcatattcttcatagtccctcctagacctcctagacataaacctagctaataagtggcaactaggcagcttattgttaggcatatttcaggatcactgagctcaataagtgcttagtacattttaacataatttaaggtatatctatttcaaaatggactatctcagacaggtacctgggaacgatggtgatgatgatacccaggaggtgatatttaaaattagccttaattattcctcaggagtcttcctgagagtggcctgcttcagatccgctgatttggtctttcattcttctcagtttgcttcctagttttcatatttatgattaaaaaacagaattagtttctgagtttaataattttttaatgttacaaggagcccagccgctttcagaacagccttccgtgattttaagtgataaaagaggacaaagagtgggtgagaaatggctcctaccagaaacattccggttgcagattaggaacaccctacctagcctgctagtggctaaagagcaatgaagggaggaggcagagaatgtggggattggggatgatggagaagaaattgcaccttttggtgtttaaacaggataactccattgataagaccatttcattaactatgtggccaaacttaaagagtgggactaattcctttccctttcgatgtactcacctcagccatcccatttatatttttccccctttatatatgggaaggaaccttggaaacaaagtggcataatgaagttaaacaagctagggcttaaaactgggcacaagcattgatgaactttgtgactaaatatgtgaaaccacc

SEQ ID NO: 315691 - DNA, 4001 bp, Homo sapiens
tgtcagtccaagctgaaggacaagtggcatagaaggaaccccaccggacagaccctacagggaaccctcacaggccagctggaagtgggcagaaaccctgtgggtcccagaccctccccaatcggccgctgctcccacctctcccgccccaatttttcagcagctcgattcctgcggatcctacatccgggaagcaagcagacgggccctcctcccctccctcgcctggcgcgcggcgcctgggttctcatcaccacgggcccagtgctcaccgtgcgcggggctgtaggagacgcgcgcccgcgcgtgagcggggttggcatagtaggggttgccctgcgagtcgaggtgattgaagaagacgtccacctcgtctggaggcagcagctgcgcgggttccatgtagttgtgcgccaggcccgggtggtgtgagtcggggtgctgcgcattcagcacggccgggtgcgccatccagcgcggctgctcgggcgccacctccatggccggcggcggcggctcagggtctgggtgcagacggcaacggccctgcgcgaggaagggggagtgaggcgtgccgccagcgcctgacaccccccaaagtcccaccacgaggtgtcccgcacgccacggagccccagcccagatccggcgagaaagagcaccagtcccgggtgggaggaaagcccaaggctcaaaacgaaaggaaggcgggggagggggttcagccacgcacactcacgtggtgacccgcggctccagaatcacacacccgtgcacatggggtcacgcccggggacgggtcccgacaccagtgaccccaacaaacgcacagagcagcacttcagtcagacactcacactgagcccccccgcccggtagacaaacacatgaacacagactcaaaagttggagacaggcgcccgggcacccagtgtggcacttgatcccagcgacacgcacacacccacacttggcgccagatacacatactgatctcaaccccgaaaacatgcacacgcagccccctgagcgcagtactaagcggcacaatcaggacctctcaacaaagcacaccaaagcagtcgcccgcagcctggccccccgccctaagtccccccagagtcccctcaaagctaggagcgccccaggcccccagccggctctcaaaccccaaacttacacacgcagccgtggggaggggagggactcggcctctgagagtgaaggagttccggcgggagccccgagggcgacgggcccagggacagcacgtccggaggctggcggggcttacagggtaggagctgggggtagagtgcgcctcggcctcgggccctcccggctccggcccctcggcatcctccggccgccctggcgccagctgccgactcctgcacagacatgaagcgggggccgcgcacgcctaagaagcccaagccagccaatcaacgccgcgcgcctcccagcctccgcctcccattggctgcgtccgcaattcccgaaccgctggactccgggactgacccgcgggccggcccccctcagccggcgggccccctccctgcgcgctcctggcggcccctgctgccaacgcgccccaccactaagggaccctcaccccaaggcccgacccctgcagcccctcttgcgaacactccgggatccctcgatgctctgggcctccctagcagtaactaaccaccaactgccccctccccaggagcccgggccgcacaccctctggatggcctctccccgagaccctaaccccgccacgctccttcaccgctgaacgtggtcagtccgagcgcagttacctacccagaccgttccctcccctagctcgggcgctgtctgggtggactgggggttgggatggttcggacgacagcggcggaacagcaggagccgagaggggcagagaggggcaggaactacagggctctagagggcacctgggcctcggacacgcggccgctcagggctgtgcttgacccagtggaggtggcccggccggtggctccagaaagggggagggggcacccctccccgggcgtggccttcgcaggccaacgggcccaattgcctggggcgaggccgtggagacccggactggcgccggcgccagctggagggagacgcccccgggcaagaggtggcattttttttcctccggggggggtccccgaggtggcctctggtgagggggaggcggtggtctgaggtctccgtcttctaagtcacctggaagtgctccccactcacttctagcccggagatcggctctatggttcgtgtgggccgggcgcacaagtcttcctccctcccattgtacagactggggagacggaggctcgaagggagccccgggccgaggagggaggtccaggacaaaggcattttgggggacctagacaggtgccgagtactggggggactcaacagcgtcctccagccctcttccctgttgggcccgaggctcccggggtagatgtccagagggcccccaggtgggtcgggggcaggaggagggctggggtcccggccacccccgggagagtgggggaggggcggcgggattgacagtcggtaattgggtaactggaggcggcttctccggccgggcggccccgccaccgcgacgccgagcccctgacgtcacccgattcgccaggaaatgaactttttaataatccgaggagggaggaaagccctcggtcccctcggctccgggggcgcccggctgggcccagctccgcgggcgcgcccccgtcaccccctcccaggccagttcagggcagcgccaaggggccgcgggctcaggctgaggcctcctcctgcctaggcgtctggcgtccgtttgtctgtccgaggcctcagcgcaggtaaagcgcggggctggggggcgcagagctccattgggctgggaaccagcgcgtctcgtgcccttgggggacccgcctgcccgagccgcctgctaagcctcccgctcccctccacgctggagcgcgcggagcccggtctgctcggaactccactctgcgggagcggaggccggcgccagcccgggaagccgcgcagggggcgggaggccgagcgcgaggcccttggcgccgggcctccgcggccaggccgggcaggtgagcagtctccgtgcctcccggttggcgttcccctcaacgcgtgcggtcccgccggggcccactgtctctccgtccgtctgtctctcaacttttcccatcctttagcttacgattcttcatcaactcgtaaaatgagatcgccgcggagctcgagcctatttggcgtctccggagactagcaagaccctctgaaagacaccgcgtccccagggataatcccccgtgtccggcaaagctgccccgctcgagcgcgaaccctgggacccagcgcgggaggcagaccagcagctggccgctgggctgtgaacgccaggaccgagcggaagcttcccgcccggccgcgatcggtgccgcggctctcagggaagtggctacgcgcgtccctcgggaaagcaggtaattcgcctttttctcccaccggcgcggtaaaaattaccctccccctccccgttccgtgtgtattcccagtttcagcgcagcgagctcggcgtctaacccctccgcggcagggtcccggccactgcggtagtggaggtggccagcctggctgagtcccctgcccaaacgtcagccctgtgctgccgcctgcctgacgcagagcggagcgagggaggggatttaattaccccgctcggcagctcagaaaatcgccgcacagaggggcttagcaggacggttaaggagtgcttgagcaggggcctcgggagacccgaaccagcctccttgcccgcaatccggtgtagaggaaaaaaaggaaacaggagttctgccaggtcctttcaggccttggggttgccttcctcgacaacgcaggcaggagccggcttgaccgaagcctccacctcggttgcaggtcct

SEQ ID NO: 315692 - DNA, 4001 bp, Homo sapiens
cactttccatcttcatgctctccgtcagtgacacctggtacttgacgccgtccttgtcctctcctcgggctgcactaccccccgcggaagatgaggctggagacgcagcccccgtggtgctagggtcaggagacacttctttgggtggcgtgggtgggaagccgaaaaggtgggagccagagtgggctgctgtaggggtgagggaggccactgagctcccgctgcctcccccgctcccacccccagcccctgggtacacagagagtgggcctccagggcctccagcagctgaggggtgcagtggcgtcttggagaaggggctcacggtccaggggttgtggtggtgggccgcagcggcagagagggctgctttgcccccgtccagccagggcaaacccgggctgtgcaacaagtgtgggcggcacatctggcctccggtcaggcgggctgcgggcaaagagagagaggatcagggtgggcagaaagatcagggtaggcagagctagggacgcccctgacagacattgagatcacgactcccagaaccagcagtcatcccctccccaaagaaagccagaaacataataccccaccggtaataatcaggaatgtcagtccaagctgaaggacaagtggcatagaaggaaccccaccggacagaccctacagggaaccctcacaggccagctggaagtgggcagaaaccctgtgggtcccagaccctccccaatcggccgctgctcccacctctcccgccccaatttttcagcagctcgattcctgcggatcctacatccgggaagcaagcagacgggccctcctcccctccctcgcctggcgcgcggcgcctgggttctcatcaccacgggcccagtgctcaccgtgcgcggggctgtaggagacgcgcgcccgcgcgtgagcggggttggcatagtaggggttgccctgcgagtcgaggtgattgaagaagacgtccacctcgtctggaggcagcagctgcgcgggttccatgtagttgtgcgccaggcccgggtggtgtgagtcggggtgctgcgcattcagcacggccgggtgcgccatccagcgcggctgctcgggcgccacctccatggccggcggcggcggctcagggtctgggtgcagacggcaacggccctgcgcgaggaagggggagtgaggcgtgccgccagcgcctgacaccccccaaagtcccaccacgaggtgtcccgcacgccacggagccccagcccagatccggcgagaaagagcaccagtcccgggtgggaggaaagcccaaggctcaaaacgaaaggaaggcgggggagggggttcagccacgcacactcacgtggtgacccgcggctccagaatcacacacccgtgcacatggggtcacgcccggggacgggtcccgacaccagtgaccccaacaaacgcacagagcagcacttcagtcagacactcacactgagcccccccgcccggtagacaaacacatgaacacagactcaaaagttggagacaggcgcccgggcacccagtgtggcacttgatcccagcgacacgcacacacccacacttggcgccagatacacatactgatctcaaccccgaaaacatgcacacgcagccccctgagcgcagtactaagcggcacaatcaggacctctcaacaaagcacaccaaagcagtcgcccgcagcctggccccccgccctaagtccccccagagtcccctcaaagctaggagcgccccaggcccccagccggctctcaaaccccaaacttacacacgcagccgtggggaggggagggactcggcctctgagagtgaaggagttccggcgggagccccgagggcgacgggcccagggacagcacgtccggaggctggcggggcttacagggtaggagctgggggtagagtgcgcctcggcctcgggccctcccggctccggcccctcggcatcctccggccgccctggcgccagctgccgactcctgcacagacatgaagcgggggccgcgcacgcctaagaagcccaagccagccaatcaacgccgcgcgcctcccagcctccgcctcccattggctgcgtccgcaattcccgaaccgctggactccgggactgacccgcgggccggcccccctcagccggcgggccccctccctgcgcgctcctggcggcccctgctgccaacgcgccccaccactaagggaccctcaccccaaggcccgacccctgcagcccctcttgcgaacactccgggatccctcgatgctctgggcctccctagcagtaactaaccaccaactgccccctccccaggagcccgggccgcacaccctctggatggcctctccccgagaccctaaccccgccacgctccttcaccgctgaacgtggtcagtccgagcgcagttacctacccagaccgttccctcccctagctcgggcgctgtctgggtggactgggggttgggatggttcggacgacagcggcggaacagcaggagccgagaggggcagagaggggcaggaactacagggctctagagggcacctgggcctcggacacgcggccgctcagggctgtgcttgacccagtggaggtggcccggccggtggctccagaaagggggagggggcacccctccccgggcgtggccttcgcaggccaacgggcccaattgcctggggcgaggccgtggagacccggactggcgccggcgccagctggagggagacgcccccgggcaagaggtggcattttttttcctccggggggggtccccgaggtggcctctggtgagggggaggcggtggtctgaggtctccgtcttctaagtcacctggaagtgctccccactcacttctagcccggagatcggctctatggttcgtgtgggccgggcgcacaagtcttcctccctcccattgtacagactggggagacggaggctcgaagggagccccgggccgaggagggaggtccaggacaaaggcattttgggggacctagacaggtgccgagtactggggggactcaacagcgtcctccagccctcttccctgttgggcccgaggctcccggggtagatgtccagagggcccccaggtgggtcgggggcaggaggagggctggggtcccggccacccccgggagagtgggggaggggcggcgggattgacagtcggtaattgggtaactggaggcggcttctccggccgggcggccccgccaccgcgacgccgagcccctgacgtcacccgattcgccaggaaatgaactttttaataatccgaggagggaggaaagccctcggtcccctcggctccgggggcgcccggctgggcccagctccgcgggcgcgcccccgtcaccccctcccaggccagttcagggcagcgccaaggggccgcgggctcaggctgaggcctcctcctgcctaggcgtctggcgtccgtttgtctgtccgaggcctcagcgcaggtaaagcgcggggctggggggcgcagagctccattgggctgggaaccagcgcgtctcgtgcccttgggggacccgcctgcccgagccgcctgctaagcctcccgctcccctccacgctggagcgcgcggagcccggtctgctcggaactccactctgcgggagcggaggccggcgccagcccgggaagccgcgcagggggcgggaggccgagcgcgaggcccttggcgccgggcctccgcggccaggccgggcaggtgagcagtctccgtgcctcccggttggcgttcccctcaacgcgtgcggtcccgccggggcccactgtctctccgtccgtctgtctctcaacttttcccatcctttagcttacgattcttcatcaactcgtaaaatgagatcgccgcggagctcgagcctatttggcgtctccggagactagcaagaccctctgaaagacaccgcgtccccagggataatcccccgtgtccggcaaagctgccccgctcgag

SEQ ID NO: 315693 - DNA, 4001 bp, Homo sapiens
caggtctccccggccgtccagcccccccccccctctgagccctttgtttaaagttagctcatccgaggcggcccctttgggaccataagtttgccctccctttgtaacctaattcttctcgccttttccttatgggcagctaattggcccgcggtgtggggctgggggtggggtgtcaaggaaacccatttgctaagggactaccttccatagagaaatttaattcgcaacccagcggcctcccagccccacactggcaataaaccttgaggggtacggggaggaagtggggtgccttagcagatgggttcagaagttcccttaaagccggggcattagatctcaggccagcagccatccctccgggggggttcccaagggggggactactgctataacggcccctcctgctccttgaggttcaattccagccccttaaagcagaaggctccctccctcggcatcagtgcaggctctcccacctcattactgttctgtgtctttgggaatcgtagagtctgtggcccccacgtcctaggtgtctcggcaccctggacccaggcgcctccgagattctatatcgcttctgacccctaccttcaagcctggcaggctccccgcggaaccctgctgagacccggagacaatcgggccgtgcttctccctcctccacgaacagccacggtttatttggagcggccggggccggcggcctgacaactggtaaatccgtttcgttaggcacaatttgtctgcaatttgtcagcccggctgggaaacgctccccagacgcctcggctgccgcacgggccctacctggttctcgaatcctgcctgctcataaacgaatcctagcacggggtgcctgcgtagacctggagctcaccaccagatgttcccgacctcgggagaggaggctttttccaaaacaacgaatttccttccttgttttccggtaaaggagcgttcgccacacacggggtccctgaacgcggggcctttcccctcgtggttggagcaacgcggagttcaagcctggccgccacagaataattttaaatgccccgttttcagacagatccagaacgccgtctacgcctaccggcggcagatcttcaagcccgcggcggccccattcttattgaaatcccactaaacggattccgactccggcttggggcggggggagacttccagacccggcgctctcccccacacgcaccccagtcacacaggataaagggctgcggggcgcagcgcgcgggggcgcaagcaggagcgagctgggttaagccgcgaaaagccggcgcacgggaccagccggcaggtgcagccgccgctcggcggcccggctcggacgcatccgccgcggtggcctggggattgggggcggccgagacaaaggccccagttcgggggccgggaggcgggggtgctttgcgaggctctgggaatgccagggtctcgtggcctgtggctccgagaaatgggaagacaagaggcccgaggcgggcctgctgtgcccaggtaaccaaatactccctctggttaaagtccctataaccagggtttccggtctctggcagggccaaggcgagccccaaaggtaggggccacagggcaaacggaccaagcgattcgggtgccaggcgggccgggccgggggcgggaagggccgggcccagggaaggtggaagtggaagaaactcaccgagcgaggcgcggtgggcggcgcccccgggcggacggggcctggagtagagctgggagcagggcgaggtgcgcggcaggcgggctcgcgggacctgggcgcggggtggcggcgctcaccagcagagcctgggcggcacgccgagcggccgcatggtgttcagcggaccgcttttgtccgcctggtgggcgacggggccctgctaggatggatgtggcggcaggcaatagacagacttgagcagcgagtcccggggcgacgctggcctcgctaccttcctggcgctcacgctgcctctctctcccccaccggccgcaacgcggctttttatttcgacatcactttgcgggggggcagggggtggcgacgggggcgggagcgccgcagggggcaggagggtacccggggctctgcacccggcctaccaggtccagccgcctggccggccaagggccgctaggcactcagggcgcgcacaccctgtgcatccacactccaggccgctcccaccctctccggagcgcacacgcgcgcccctgacctcagggatgcttgctcagaaagcttgggacacgtctttactgagactctccccggggaccctcaggagctgtgagcacacgcactcactgataatggtacacagacgcccgctcctctgtcttcaacccacttccaggagtgctcacacggacacgcacacatccctgcacatgtgcacacagctgtggccgcgaggacatcctcagacagacggcctgggtcacaccgacacacatggccatacaatcagatgcaactcggcactcgggctcacactcaggacgccctcactgccaggcttgtttagctaagtgcaggcgcagcccctctccctgtcccaccccccctccagttcctaacgctgggggaccccctgagcactttagaagtccactgtctggtgtccccctggcccatctccttggggcagactctcacaatgggggaagcaaggaagtgtgcagagggcttgttcacagaagtgggagtcaggagggggggagaaagtgagtgtgggagtcctcatccccagaaggcccctgggtttgtgggcaaagacagtccagtccttgtgctgccaaagttcttactaagggattcaaccagtcagcgtccccccacccccacccctgattcccattccagcagatcagggagagtgaaagtggcctggggaccttgagcccagagggaaagtgcttgggcttggaaggactgggaaatctgtgctcccgtgcccaggtgtgccccagaggagtgtttctgtcccctggtctttgtgacccctgctgtccataggtctttctccaaatctggtggtgactattgcattgtgtgtgtgttctatgcatgtggctcagagtctatgtcctgtgtgcccaggtgtgtctgtgtgcacttaggagcacacaggagtgtctgcaaaactgggtgtatgagtatgttcatttcttcttgtgggttcctgagagtttgtgtattgggcagtaggtcacagtgtggctatttcatgaccctggaatttggcacaagagagtgtgtctgtggaaatggttgtgcgtccctttggctctgtgtctgtggggtcatcatgtcagagactcatgtaatgaggggtggggatttccaggtgtttgcccatgtgtctgtagcagtgtgtggcatgtctatgaatgggtgtgttttggagtgtgtgtttgcgtgtgtatgtgcatgtatctaggcatgtgttactgtgtgtatttttgttgttgttgttgttttgttttgttttgtttcttgagacagggtcttgatctgttacccagactgaagtgcagcggttcaatcagcgcttactgcagcctcaacctcccagactcaagccatcctcccacctcagcctcctgagtatctgggaccacaggcatgtgccaccgtgcctggctaattatttttatttttatttttgtggaaacacagtctcactatgttgcccagactggtcccaaactcctggactaaagcaatcctcccacctcggcctcccaaagtcctgggattataggcgtgagctactgcgcctagcctgtgtgtgtctttaatagtttgtacctgggtatctgcatgtgtccttgaactggtgtatgtgtaggtgtgtgtgtgtggtgtgttgcatgtgtctggatatccatgtataattctctttattaattgatggctgttggggcgtgtgtttgtgtttgtgtatttgaacatgcatttggct

SEQ ID NO: 315694 - DNA, 4001 bp, Homo sapiens
catgaaagaaacacttaataaagaatgttaatctgtttgtgtcatttaaaaaaaaaaggaagggggtgtagataaaacatttccacaactcttctttaataaatatcttaagtgtccttttacaaagcacacaggtaaattaatgtcatggttacaaggacatcaaaaaaaaaatctaaccactacctttaatcactatcttttgttctaaattttttctgactatttctaaatcaaatccaaccttaaacctatgacgattatgcactaagtttctctgaaagcatatactgtaaattctgaaaacaatttcacaaggctgctcctcatatggtttatataagagcataatcatctgattaagtgagggacagctcaaggtgattattttacagaggcctcattcactactatatacaagctcaagaatgaaacttcacatcccttacaatccctagagcagtgttttatttataggagttcctcaataaacacttgctgatttgaatgcatttaatacctgaaaatgctaggacacaaacaatttgctgggcttttttcaaactccaaatcaacccattttcattactctcaacgctccttcatgccagttaactagttggatgttttccatcactcgaaaaattggccatgtatattctgttgccaggatagtttccattctgcagtgtctctcctaaaaggggagaaactattaaatcaaaatggggtaacctcacaagtataactattacaacttgtataatagctcttttacttcaaacaacaacgacaacagaaaaagacctgtacctttttagtggaacttatgaatagaattattagcccagtaactaaagttgtatggtacacaatggtagaagacaagctaaaacgacattggcctgtaaaagttgctttcctgacctttctccctcttcaagatggttaaagtcacacacggacaaatgttgatgtacatttaacttctcaatgttgatccaaggggagaaaaaattgatcaatgtaggtgtaatcttcccctaaatgaggaatattagcaaggaaaaaacaaaaggatatagtgtctgcctgaaggaatcctcttagatataaaatcacaacatttgctatgaaataaactagaaagttttaaatgcgtaattacacgtgccaggagttatgcccacgttactccacaggcccacgctagtgggtgccaaagtcagaaaacctgcagcggcggtgagtcactccccagcagcactctggggaataagtgttggagccacagcacgtaccctatggcgcaagaccgctgattagaacagaggggaaaggggatgaggaaagaagtttcttcagcgcccgctccgggcaccagcgctgtcaaacctgccactacggaagccacagaacccggttacccgagtcaccccgagccccgcccactcaggttcctccccgcctggggcggggttggcgcgcgagggccgaggggcggcccgtgtcccgagacggctcctgggaggcgggctgcctgtctaagtgggggtggtgggattccggcggtacctgcgctggaagtccacggcgtagggcttcaagtacgggtcgatctccaggagtctggccagttcgggcacgtcagccagggcggcattgagcgccgcctcgtagtcctcgggccgagccgcgggagtcatcggagccgccatattccgccgcagtccaagtagccgaggcccgagaggtcgagtggggcctgagcgggcgctggagctctagctgggacgcggcggctagggcggagccggagggcgcctaggcgtgtcgaggcaagccgaggcgagccgcggcggtccggggccctttatagccgggacggaaggcctcctgccctttctccccccgccagcggggaggagcggatcccggggtgatgccgggacgcacgtccggagcgggtaggaggcaccgaggcctctccgcccactcacgcggctggcacctggaggccgcagggacctgccctttcctccccttaacggttttttcctgctggcggaggtcattctaggaggtgggtcccaagctgacctcgctcagccttggccttcctcaccctgacatattcttggcttttctttacccacttaagcacccactgacagcgaccccttcaaattggacataaggggtttttttggaaaggaccgtatttctcaaagttctgagacttttgaggggcagtatttcaaacatatcatgtaaattcacagagaggggaacagtcaagtgtagctagagtactactgctgaaaatgttaatacctcttacaaccaggactctcctaagtttgccaggtcacgtgaatttaaaattaaccaagacacagaatcctggaataccgttggaattctgctgttctggtactcttttctgcattaccaacagctaagaattttagccatgggaagaacttttctcattctccgtaaggccaaaaaggaaaaggcatttgcctgtgtttataattgttaacaagcttttcaacgattaaactacctttgataacacaaatgatatcattgaattggaactccactctgccacttacagtgataaggcaagaaacctctcttcctcttggcttgggaagctcccacttggaattcccttcttttattgccattaactgactagcttctatttcaataattgctttttaggaatacagagttggactccaagagagatggacccaccaaacccaggagggtccaagctgctttacacctagaaactagagaggattgaggatatttttcttgttaaaacccagaactggaggatcctaggggttatggaggagaaacagtattaatcagccgtgggccttgaattttaaaatatttcaaaggaaagtttttataaggggtttcatagacttgaaagataagtggatatgaagacagacctcagtgtgaaaaagtgaaggacttgaacgactttaagacgtgccttgttttccataaagatgacaaaaaactgctgcagacatttgtaaaatataaagcactaaaaaaggaagaaaattaaaaaaaaataaaaacccgaagcaggacaactattaataacagacccacagatctacatctccaagcctaaacttttttcagaaacccaggcttgtatcactgcctgtctactgagatttccatttagctggctaggagacctaaacaaactgtctgcaaaacgtgacctagaatccgtcttctcatccttcctgctgtcactcttatgcaggccactgttttccttcacttggaccagaatgtagctctctaactgacttcccctcttctactctttctcacctctactccattctctgtaccagtgtttctcacactttaatgtgcatatgaatcacctagggatcttaattgagttccgatgtggtgcttcagattgcatttttaacaagctcagaagtgattctgatgctggtggttggggacacagtttggtgagactctacactgagtaaatcagacgatgtcatttagcaacttaaatagcatagtatttcacttagggtaaaatagaaacagcttatcattctctaacaaggcttgtataatctggaccctgactacctttccagccacttttctcatcattttccagttttactatgctctagtcacactgactttcctggaactcagtgaatttgttgtataatagcctctaagattatttgcttgctgttctctctgttggaaattttcagggagctgagctctacttgcttaattttttccaagccttcattccagcctcagcaaaaatgtcacctcatacctgagaaacttctgattatagactcctcagtgtcttctgtataacttcaatctcttctatgcaacagttaacagaatctaggtgtttgtttttctcctatttattgacctttccctttagaacctaa

SEQ ID NO: 315695 - DNA, 4001 bp, Homo sapiens
gaagggatgagtgccattctattctgtgcaaaatttccctgacttcttagcttatttgatctggagagacacggttgggggggtatgctgactagatgataactgggtgttggggtgacaatgaaaattagataccaatatatacaagacttttgaatacgttaacggaaacattttatttaattattttaatgaatttatttttaagactgggtcttgctatgttgttcaggctgccctcaaactcctgggctcaagcaatcctcctgcctcagcctcctgagtagctgggactacaggtgcatgccactgcacttggttcaagggagaccttttaaatcatcatagaaataaagatgttgggcaaactgatcaactatttggaaaaaaatttacatctgacaccatatattgaatatatgttgccaaatgtaaaataacaaaatcaaaacttatgtgagttgatttgtcttatcttaggaagagcaaagaattttaagcatgaatgcaatggcagaaaccaaaaagctttctagatttaaaatcgaattttctttaaaataaataaaaaaccataagaagtccaaatagcataagatgtgtgcaccttggaaaaaggttttttttcttacataaaacaaaattttaaagtaaaaaaatttttttaaagtttttttgcacttattcagtgcacgtgatatgccagaaacaatgccaggaaccaggaattcaaagataaataagaaacaatcactacatttgagcatctcatatctagtaataaaaatagtaatttatataattgttagaacaatgctagagtagaagattgacaaggggctgtgacaacccagggtagagaagtctcagacaacatgattcttaggaagggacatgagatattccacaggaccaccaatcctcttttcggcaagtggtcaaaagtgggctaccattttttcctgtgttccactctccagtagcatgaactgagaccagggattccaaacataaccctgtgaagaccccctctggctcgcttactctctctagatcaccccactttataccctagagattaccttgtctgtggtggcactattttggtggcacggctttgatattaaggaagatgatggtcagaaaaagaaagcagaaaatatcttctaattttgaaccctactttatgtcaggcactatgctagcacaatacacactagaactctctaaggtagatattgtattattatttctacttaaaataaagaggctgaggtccagaaagtaaatctgagttctgtgcctatttaatctagatgacctctgcttacctgcttgcagggagtgcacatcaaaggaagactcaaggtggcaggaagcttgctgtttatttcaaacttaaaatagtggctgaaagagggtggtgattttgacctccttgtggagcatgaggagctcaggagagcatctccttcccgggctttcagaaagttgtttcatttcttaggtggtaacctattatatagaccttccttggtaaagtctttccacctttcagctattctccatcagctgctcaccatgattcttgggagaaggcaaaacctatgggaaatttaatgtggtatctggcacagagtaggcactgaaggcttggcagtttccttacccaactactttctaccccaacttagtgtgctaactgtatactagctttctttttctcttccttgctgtattgtcctgtcccatctcctctgctctcccacagggagtctagacttacctgttttctctcagcagagaatttcccatcctctcagtcctctcagggcttcccctccgtccctttaccacttccttcttgccttgtgctctgacagggcaactcctgacttaaagaaagggctgtgtggctctggccacccgtgcagagacagcagaaaggagaagggtgtctctgcagagggaaggaagaggctgggggaggagtgttagaggcacgcatgtgcagaatgtcctaacatgtcagtgcctgaaccaacctggctgttggccataaccagcaactacccgtcaatgagagcttcgaacctctggggaatcccaggtctgaaattacagatgggccatgggagtttttccactacagatatttacgtttataaatcacgttgtcttcttagaaaagtcagaaggaggttaaaacagtcaagccacagacctgtagaaaatatagtatcaacaactctcaaatctgaaaacaaacacccagtaacaaaatgggcaaaatatttgaacagacatttcaccaaaggaactatacagatgaacattaaaagatgctaaacattgtagttattagggaagtgtaaatcaaatccacaatggaacacttttacatacttattacaatggctataaaaccctgacaatatcaagtatggcaaggtatgcaaagcaactggaagtctcatgcattgctgatgagaatgcaaaatgacagcctttttggaaagaagtgataaggacagaaggcagggctttactgggtagaagagggtggttcactggcaaaggtcccaccctcaagccttgaaaccgaagccctaaatgagaacagttatccctgttatcctgcccaaatgttactctttagcctgtccagcccccctatcccgtgcccatataaaccccagacctcagctggcagacagacaagcggctgaacatcaagaggagaagaagcaactgagtgtcagagatgtggcttaacttcaggtggcatgacttcagggaggagcccggccagagacagcagacttcagggaaaggtcactttcttcctgcaccatcccctttgcagctccccttccactgagagccacttccaccatttaataaaatcgtccacatccatcaactttcaaaccattcatgcaacctgattcttcctggatgctgaacaagaacctgggtaccaacagggcagggtgtaaaaggctgccaccctgactctccattgagtgggttaacacttagctgtccacggatggcaactgctaaaagagcatgaattgtaacacatccctaaatgctgctgttgggctggagcccaaaagtgctcatcgaagccctggcacccgcttgcctgcgtgctcccgctcccacagagagtttgagcatggtggtggccaagtaagtaggccacacccctgtcgcaagtcccgagaaggggtcaagggaactctcccatctcagaagtatggcaatttcttataaaattgaacatagggttactgtacaacctggcaatttcactcctaggcatttagccaagtgaaacttatgtcctctaagactgtgtgtacaaatttttatatgtgctttactcataatagccgaaataccctggaaatagcccaactgatcttcattgagtgaattgctaaataagctctgtgttatattacatccacacaacagaatcctgaccatcattgaaaaggagtggactattaatacatgcaataacttggatcaatctcaaatgcattacactaagtgaaagagaccagacttaaagcctaccttctgtgacattagagataaggtgaaaccacaggaacagaaaacatattagtgttgccaggagcaaaaggtgggggaggtgttgactttcaaagcacaggaggaaattttttgttgttgttctttatcttgattgtgttagtgcccacatgactgtatgcatttctcataattcacagaactgtatactaataagggtgcacttcactgcacataaatgaatctcaacagacaaaaggttaaaaaagaaagaaatctcgggacaggaatcatggatttttgtattatccttgtatttgatggttgtttccagtttggtcactcatctgtttgttcattcctttaacaagtatgtgtcgagtgcctactatgtgctgggcactgtaggttcaatggtaagaaaagcagat

SEQ ID NO: 315696 - DNA, 4001 bp, Homo sapiens
tagaatatgtaaaaggcaagaatctgcctactcacaatttacttgcacaaattttcaagaaaactacataaggatgaagtgctctaggtcctaagttagtcttctttaataggaattcagtgttacacttttgagtatttgacaatcaaaaactaattgggtcacagtaagagaaagaaccaaatgtgcttttgccaaagaagctgcaataaaaccaagaatccaactcaccaggagtatctataatgttaatattgacatctttccacatggtgtaagtggctgctgactgaatagtgattcctctttgtctctctagttccatggaatccatgacagcaccaactccatctttacctttcacctaaacacaagcacagcaattcagactttctctgtccctgcattccaagaaggaaagaaatcttaactgaaatggaaacagttgccaggtgcagtggctcatgcctataatcccagcactgtgggagactgaggcaggatgataatttgagcccaagagtttgagaccagcctgagcaacaaagtgagacctcttctataaaaaataaaaataaaaccagaacacagatacttaacttaagcaactttcagataagcctaactgtcaaaagtccgctgttaccattgttttaatctttcaggtttataagctttattaaataatagcaacaaaacaattaaaatctggttctaattaatccggaatcaaccgtgaatatatacctcatgcatctttgcaattctgccagtgtagtaaaggactcgttctgttaatgtagttttcccagaatcaatgtgagctgagattccaatatttcgtattttttcattaggaatcacccctgatgaagaccatcggcaggccttccaattaacctgaaaaaaatacgagagctcaattctatgcaccttttataagagagaacaacagacaattaaaaggagtatggtggacattattcctccaagaaatctcactggatatgagatagcttgagaaaggcaccaggggaaacctttaagcctggaactcttgtaatcagaggacagacttcaaaacaagacagtaaagacgtattcttttaaaattaattaatgaataagttaaatttaattaaaatgggagacactttttactgcagatttgaaaatacacactggggcagataaaatcacaaagacagctccaaaaaatactttaatagaaaatacaaattttagcttaaatttaacttaatttttttccctttctcctttattgtagttcacagatgacaaatatgtttgagaacttatatgctctatgcagtgatgctagtagctccaagacagcccccaaagatttccaattccctccaaacaaaaacaattcatgaagcttgttttaactttactctggtggcaggggatggggatccctattagatggaatgaagatacaatataaacctttccctataggactgcacatccaaaatgcacaattattcacgggaaaagagaggcaaaaaaaaaaaaaaaaaaccttagaaaaggtggataaaatatcaaagtatctgagtgacagacacttttagttgattaaaccctagggataccagagagcgaaacaaacgagctaacgagctaatgtgcaggcaccgaggtgcttttcagcactgacgagcgactgccagtattcggagctgtcagtcatgaggacccagggggtgtcacggccttccattgcccagaagggatcacaaggttccgggaatggtcccgatttagcctctctatgctccggtacctgcttcctctgccagcctagggaggcgggggcccttccgcgccccagagccgcgacggctgcagctcccaggagtctcatggcaagcgcagagcacgcgtcaaagtcccgtggcgccgggtgggttcagctgccggtaacgcaccgggaagcggtcaaagtcacgccggcagccaatgttgtaagagcacttccggggcaaaggacgcgaggaaaaagagagtgaggaaaagaaagaagagcaactggattggaggcggagcagtgcctacgctgctcgcgcgccgtctgccgacttggaagagaaagtgcaatcgctttgcggagctaaagaagtgtttgctcccagtaagacggcataggtatatgggtgagggaagggagtccttttgtcttcgtcttcttttttaaatattacctctgtatgaagatacagaatttaaacatggttgttaggcctataaagcaatgtggagaaatgtatataacaatttaagtagaaaagagcaaaattgtctattacaaatattaataggtatatatatgacatggcctgaaaaagaacgtggacaaattatagtgaatgaactatcaattacaattacaaatacttttcctcatgtcaaaatgttatttgttattgttcgatgtcagacatttcatgtcctgtccatgtggaagactgcatccttgaccattctgcttggatgtgttaagaggcatgttgaacctaacaggtccaaaactgagcttcggatcttcttccccaaaccttccacagtcttatccatctcataaatgtaaactttagtgattctagccaaaaatattagtcgctttgacaccatgctgtgacatctccggtctaatcagtcagcatatcctgtaagctctactttcaaaaagacatccagggccggacgcggtggctcacacctgtagtcccagcactttggaaggccgaggcgggcagatcacgaggtcatgagatggagaccatcctggctaacacagtgaaaccccgtctctactaaaaatacaaaaaaaaattagccgggcgcggtggcgggcgcctgtagtcccagctactcgggaggctgaggcaggagaatggtgtgaacccaggaggcggagcttgcagtgagccgagatcacgccactgcactccaccctgggtgacagagcgagtctcaaaaaaaaaaaaaaaaaaagaaaatccagaacttacttctccccacctctcagtactgccgtttctggagggaactattgtaatagccttgtaaccgatctcactgcttctatccttgctgttgtcagtgggccggttcaggtgcttgacttcaccacacaaaagaatttgaaagcaagtacaaagtaagagtaggcaaaaaagtttattgtaaaccaaaagtacactctgagaggcagagtgggctgctcagaagagagacagacagcctttagtatctctagggaattccctttatgggtgaggcaggagaacagggtctagagacagggaaccgaaggccctgctgacttcctagagctgaaccaaaaggaaaaccccacctctccatgcccaagtaacaaaaggatcggaggctactcccaatgcactgcattgcagatgaaaaaatggaaagtacctctgactggtcccctctggcaaataatcagactggtagcaggccaagtcctcatgtgtaactttgtaacttcacttcagcctctgattggtcacctcctgcaaccaagcaggctggttatgggccactccttcatttacatagggtgtaaccaatgggaacgctctagagggtatttaaatcccagaaaattctgtaacaggtgctcttgagctgtggagtgtacttttgtttcaacacatctgtgccttcattgctccattctttcattgctttgcttatgtgttttgtccaattctttgttcaaacgccaagaacctgtatgactcatagtcaagacccttcactggtaacatgggagctgtacatatatattcataaaatactggtaaggtcaagtatgcaaaggtggacctgtggttggcacaggtacttggcatctacatgttctaacacaggagtccccaacctctgggccagagaccagtatcagtccatggcctgttaggaaccaggccacacagtaggaggtaagc

SEQ ID NO: 315697 - DNA, 4001 bp, Homo sapiens
gtccctggaacacggtggcggggtgccccaagtgggcatggccctggtggaggagggagggaggagagtggctctggggtctgggtgcagctttgttgctgtgtgaccttagcttactcgccctttctccctgggtaaaatgaggctgtcatcactaggagagctctgagacctccccagtccagcgccccgttgtttcccatgtgctgttgctgctctggcctctgtgagccccgggagtccgcagggagccaggctggtgattctacaccttcccgaggaggagtcccacctcccggttgagcagactgctcctgatcatcctctccagagagtgggtgtggggataacttcagccagtggctatgcttcagtcatttctgccaggtgtgacatgactgcctggcctggcgttttttcacatagcagcttgccttgcctccctccagcagctttggtccctattttagcggatgcctcttctgagagggaagtgcattggacctggaggtggaagatctacgcttagcacgggcctggctcctctctcattgactggccttacgccgaccacaaataattccccttacccagagtctttgagggtgaaatgaggcgatggggggaaagtggcttctaacctgtgaaacaccctgcagatgacaatggtttcataccaggcccataggacttcccagcataggccaaggccactgcctcatttccctcggccccaggaatttcttcctttctggagtgcttcatccaactgggtgcccaggcaggaacccctaagggccaatgagttgtctgcagagaagttctagcagttcaggagaggagctcaccttaggctggggcttgcggcagggatgttagcaaaggctccaggaaagaggcctgtggtgaactcggggcagggctttggagggagggctttgcggcaagcagaggggaggtgaaggcgtgggtagagtacatcagggcagcatggagaaggctgggtggcttgggggagggtggcgatggggtcataacaaaaacataagaaggtggtttggggccaggtgatggatgccttgggaactgctagcccaagaagtttgggctttttttgcaggagggcagccactgaggattcttgaggagagagagaccatagaatgaatgaaagagttggaaagactttaaagctctgggaggctgaatcctttatttcgctggaagaaaaactgaatgccaagagggcctcactttccccaaagctatacagccatcaggggcaatgctgggattcccccatggatctcttgactcctaatacagtgctctttctgatatgccatctggctccataatgaacattgtgttccaggaaaatcagtctgcgctgaacaggatggaattggggcaggacgtccagtgaggaggacattgaggcagtagagcagttgattgccgaatgaccacctaccctgacttaaaagatcaacctcagggaggattggagctttctagagtctcttgggacagcagaagcacaggccgggttggactgaatctttaagtggacatgagggacaaagtacctcctgttggtaaacatctcaccaccaacccactgtggtggctaaaatcccacctttagtcccagcaacatatgagcatgtcaccaggaggtcttcacaggcctgtctgccacctgagtgtagacatcttttggccctggagcccagagaggctgaatgtggagagggtggagagaggtctgtagtcctcagagaagacttgcagctttttcagagccaccaacccataaaaaaaaaaatccccaaacagaaaaatcctaactgtggtgaccaggtacctcctgagacatgaagcctccacttacctggaccctggaggcctctccgggcacagctgccaatgttgatcttagataagaccaccagcaagtaaacatccactgtgcaaagctgtgttatctttggggaactgaaatgtcccctgggagttggaaactcccctagccacataccacagagttgaggaaggaagagctgatggacggaagaaccatggcgggaggagtcatccggaagctacctcgctgccctgtcagttacggaacagaggagagatgccggctggaggacacagcaaatttgaaccaagaggagcttggaggaagcccgagcgacctggaggggactggctgaccttcctcattcttttcaagtgtgaataataaccaagcccagtttggcaactccttgagggtgaggacgaagccccattctcctttttggaacttggtggggctcaggaagcaggttctctccagtcggtggctttcctttctgttgcgggtctcttgagggcctgccttcatgaaggcacatgagtgactcatcatttgtgaattaattgctatatgtgaagggcatctgagaacaaattatcttcatagacttttcattataattttatttgtactgataattagttggtttagcaagctcttttttcatagatttggctaaacttcagtctgaaagaggcaaattctggggttctagaaagagattttattctttgatatagggctatttggtggggttgctttttgtcctagttgtagcttttataatttcgagattcacattttgcaatagaaatatacaggcataccttggaggcattacagctttggtcccagaccacaatgaagcaagtcacacgaattttgttggtttcccagtaaatataaaacgtatgctgataccatactatagtctaagtgtgcaacagcatatgtctaaatgaatatacatatatatttttttgagacaggttcttgctctgtcacccaggctggagtgcagtggcactatcatggctcactgcagcctccacctccctggactaagatgatcctcccacctcaggctcccaagtagctgggactacaggtcacaccaccacacccagttaatttttgtattttttgtagagacagagtcttgacatgttgcctaggctggtcttgaactcctggcttaagtgatctgcctgactttgcctcccaaagtgctgggattacagatgtgtagtctttgaaatccagtgtgtgttcttacagtgcatttcaatttggactagccatgtttcaaatgctcagcagccacatgcggctcattctagataggcggccatcgctcttaaatcctccctgaccttagccatgctctctcatccctcctcttcgccaagctctgcctctctcactggggcttccctagcctccggccatcttggggccaaagctctaacactttgcctctctcgtgtcttctgttcccctccagtggcttctgctttctgccttaaaatacacccaggttcctaatcctgaaaacgtctgttgtgcaccgatcccaccctcccctcgtgttaccatctccatttccttcccctttccttgtgtcctcttctttgctgtgtcctggcccctcaaaacttgaccttgcctctcatccccactgctgtactgaaactgttgtctcagcgttgctgatcatccagccttttagtctatggaccgctaagagccataggacgacctcagggtgggacgtggcttggagggccatctcgtctcaatttccagatacagacctgtgttgggttgtgttggattcatgaggaaagcttcataagttttatgcacgtttataagactccatccttggattctgatccagtagctctggcgtgggggctttagaatctgtttcaagtatctcaggtaattttgattataaattaccaagtatcccaggtaaattttgattataaatgcttgcttccagcagaaaatataaacatatggaagatgaaatctttctctctgaataacccaattcagtttccactcgtgaatatcttatataaccgtagtacatttatcaaaattaaaacaccagtgttagcacatt

SEQ ID NO: 315698 - DNA, 4001 bp, Homo sapiens
tttgacattccttgaataaactctatcactttaatatggaggatccaggaactgtaaaattggaaatatgaaatcatcctggaatggcttctaagaagccttaaaatatgccattaagtatgaagtcttgactataatatctaaataataaaatatacagaccttggttttgaaaatgcaagtagagttaatattttgctgggctgtaaccatatttattattacttcacttgtaccaaacacatatacttaaagaagctgaatttgtgcaataaacattcagcaaatccagttatgacattgtgcccagatgttcctgaagggtcatttggggaagtagtgaattctgttggtttccacaaagtctcctttcctcctgttggagctttgtttaatctagtttatccttaccttatcctagtctatcctacctgaagaggcaggtaatcataaaaacaaatgagacttcactgatttgtcactgacttccttacaaagctgtatgaacagcagcagggtaaacagaattgatgcaattatctgaaaaaatgcagggcagaaaacaaatcacaatattgaaagaaaaatgaataatctctaagaggattatccaaattgatcatgtctttggttgaatttaccgctgaacgctttctagatccaaaccctgcttttcttaatgtaacttagatattcacaaatcctacttgaggcaggaagtcagtcctcacttttaacgcttaaagaccacaatggacttttataagatatctcgatttttaaagtggagtttctgggctgatataaaatttattttagggaaatacaaatatgggacatttttgcatgaaagagagaaaggagagacaggaagaaagagacacaaagagatagagacggtaagaaagacactgacaaagtaaagggggaggagagagagagacagagacagagagaaagattgagagatcaaaaacatcactcaagaaagcaagaggagagaataattgagagaaacgcagagagacagaggcccagagaaactgaagaaagaggtagcgactcagggggaaatagagatggagactcagagagaagggagaaggcacagggagaggataggacccgcgagagaaagcctgagcgcgcgctgagacccacccagcattttcacggtttgcttgtggttctggtccctgagcgaggcacccacgacagcatcgccgcgcctcctccgccacagcttcctgccgatgagactgtagaggaccgtgagacagaagacaggaaggaagaagaagatgctggacacccacaccatgaccgtgagcagtccagagcgcaccgcaaactcggtggggcggcactcgttggtgtcccaagggtcggtgccgttctcgtgctccaccccgactagcacgaagatgggcccggcgctgcagaaggccacggcccagatgacgaagatgaccagcttcacccgccccttggtgaccaccaccttggcccggagtgggaagcagatggcgaagtagcgctcgacgctcagcgctgtgatggtgagcaccgtggcgtaggtgcagctctcactgacgaattggaagagtttgcagaggaggtcgccgaagttccagggccggtactgccagaggcgaacgaggtccaggggcatgcagaggaagatgagcagatcggagaaggccatgctggacaggtagaggttggtggtggtgcgcagctcgcggaagcgcgacaccaccagcatggtgagcaggttgccagcgatgcccaccacgaagagtgccacgcaggtggctgtgacgcccgccagcagcggcgcggggaagagctgcagcagctcgtcgcccagcgagtcgttgccgggggaagcatcccagtccaggtcggccagtgtgaggttgaaccccggctcttcgctgggcgtcgcgttccacatgctgccggctcagctgaacaggctctgggacgtgactgcgctgggaggctggaccgagctggctcccgaggaggtccgcttaggcgcgggagggtgcgagggaggagcgggtgcagacgcgtagggaggatgcttggagaagaaagagagggaggtgagaggcagaagccgaggaagaaggtgagatggggacaaggaagagggagagagactggtggtcagtgggtgagagagtgacccactgctttctctgacacctcccctttcccccaccaactcccccaaagtttctcccaacacatcctccggccggcgcccacacgcatacctgtcaccagccctgcctcgcatttgcgttctcgatccagttccatctcgcacttcccaaagcgtcgcagcgagtggggaccgcagggaccaggcgccgcgaagcgggagcgtgaggcgctctctccgaagccctgggcgacgctggactagtgtgccccggaaggacaggtcacacccgggggtgggggtgaagacgacggtggcggtggggaggacacctttagcagctgggacctgatttcttcctccacaaggctgcagctggctatggccctggtggaaagaaaaagcgagcttgaccaactcgacttgggaagggggatagagagagaaaagaaggaccttgtgtttgtattcataccggtgagcaccaaagaatagtctcacgcagttataggacccaggttcagcgatgtgactacttgtccaaggtcacacagcgagctggggactcggggaccagtgtcggatctcccacccggttgggacttctgagcgcacaggggcaagatatgtgagtaaaccctgtccagaatcccagtcctttgtatcactcggtagtggtagagagtctgctgtagggtatattacttttgcttgatgcaaacctggtggcggggtgccgaggttggtcagggagggaacaggagaaaggaaaaaggcagggttggaggtgtgtggaggcggcaagtgaagaagaggctgtgaggctggcgcgtcgagagtgtgcaggaaacattttttgaggcataactgagagagatcagccatttagtagccgtattcccttgggcaaggtcttcaacctcctgagcattacgtctttttctttgaattgcaatgatttgtgcggaccactgggggtgatatcaagtgtcagggaccaccggaggcactcaataaatagaagacgcgttgctgttgagaagtagaagctgtgccggtgggaacaggtcaaaggccacccctacactagcaaggtgaccctctggacgcggtctgtgcgtctcctgctcagagccagaaatcagcacccgaaggcatgagactgccagttgccagcgaattcacaaatccgaccggcccctcccggcccaccgacctcgggaccgccccaggaacatattcagcactgtggccagcgccacatccatcctaccgcaaagcgccgctggaggaatggcttccctgtcactcccaccgtttttaacttgcgcttctaacgcctcagtcctaccccacggaggagcagggcagactcccacgaagcacaggccggcgttagtcactgccttgaccatacacatcggcgctcacccgatgagataccacgtactgtgtatgagagagtatccccctcagttgaatgcgtttgtacttgcctttcacagacagtttgtaccacctctactacctaaattgttaatacttaaaagtccacaaagacctaagactgaatgtgtgcacaaatgcgtgaaagactccatgcagtaaattactacatgagagaagtttgatacaggaaatttaacatagtggtttggttgccgctggtgtgttagacattggaccaaactgagttttgtttcgttttgctttgttttgttttgttttgctggttttgttttgttttgttttgagacggagtctccctctgtcgcccaggctggagtgcagtggcgcgatctctgctcactgcaacctccgcctccca

SEQ ID NO: 315699 - DNA, 4001 bp, Homo sapiens
gcaggcggttcacctgaggtcaagagttcaagaccagcctggccaacatggcgaaaccctgtctctacaaaaatacaaaaattagccaggcatgatggcgggtgcctgcaatcccagctactcaggaggctgaggcaggagacttgcttgaacctaggaggcagaggttgcagtgagccgagatcatgccattgcactccagcctgggtgacagagcgagactccgtctaaaaagaaaaaaaagaaaaacttaatggaaggaagtctgatgtttccccagaacaaatgctcaaagcagtcactactcactggcactctagctggaccttgctcctgggcaagtgctacaaagaaaaacacctctaaggtggtgggaagaagaacgggacactgagaaaaagggggaatacagtgctgctgggaatggttaggtaactgatggctccggccctccctcaaatttctaacataaaaagatgttggtactgggaagagaaaataagaacaccataacaggctggctgcagtggctcacgcctgtaatcttggcacttagggaggccgaggcgggtgaattatttgagcccaggaatttccagaccagcctgggcaacatggcaaaatcccatctctattaaaaaatacaaacaaatttagccaggcatggtggccccttgcctgtagtcccagctacttggggggctgaggtggaaggatcacttgagcccaggaggtcaaagctgcagtgagccgagatcacagcactgcactccagcctgggtgacaaagtgagaccctgtctcaaaagaaaaaaaggaacaacaataagaacaccataacaaataaatattatttttggtgcattgacaattgtgtataaatcaacacttcattaatatgagaacagaaggatatcaatttgttggttgctgaccaatattatcaacaattcaaggctttactaacaaccaaccaatgatttggcaggtctctcaaacgaggggaaataaagaattttatgaattctcaaagatggaaaatagaaaactgatgaccacacagccttcaaaacttgcccaatacctctaatatccacggcaatcagttgctcacgtaaggaaccagcattttgtggagtagtagttaataaagatgacaagtgaagaatagagaataaacttaaattctacaaagatatgaaaagttattgaggcacaagtccaaaggctataataaagaaaaaagaaaaaaagttttgaaaaattaaaatgtaaataaagatgtggtgggagatctatcagggaagtgcaggaagaaccaagcaactcacaaaccaccctctggctggatgtgcacagcctgcccagtcccgtccggcgagtcacctcagtcccatccaggtaaggccggacaggtggctccccaggtggcaagaggcaagcgagcggcccaggtcatacaccgggcccctggcaccctcagcctggacaggaagggcgcgcgggattcagcccagacgagggagggaacgcgaagactcagccggtctgggcgcgccgttctggccccagggcccgcgggtgctgcaggtggccgcgtccagggcggtaggtggggcctgcccgctcgcctcccgaggccggaccccgggactcagcgaaacccagtcagacccgcgccccacgcccgcccccaagtcaccttctgcacgctggagccgcagacccgcgccgcccggtcatagacgtggcagcggatcacagaactgcccacatccagccccagcacgaagccggggtaccgcggctcctgcgctctctgctccgggtccgtgagcagccccgacatcccgatcccgcacgcctctccgctacagccgcctacccagagggcgcgctacaaatcccaatgctccagagtccccgggcggcccaacccgggccccaacccggctcagccggagagcctagagaggcctggcccctgccgccggctccaccccgacgccgtgacgccacgggcgcgcgccggcggccgcgcgggaggggtggaggtgagcgggtttgcgccgtgatctgcagccccagatcgccagccatgctcagcctccagtcgccggccgcggttggattgacttggcccttaactcttgttttttttctttttgagacggagtctcactctgtcgccccggctggagtgcggtggcgcgatctcggctcactgcaacctccgcctcccgggttcaagcgattctcttgcctcagcctcccgagtagctgggattacaggcgcgctccaccacgcccggctatttttgtatttttagtagagaaggggtttcaccatgttgatcaggctggtctcgatctcctgatctcgtgatccgctcgcctcggcttcccaaattgctgcgattgcaggcgtgagccaccgagcccggcggcccttaactcttaattttttcttttgcttctccagcttcctgagaggcagcgccagcgtttctcttaaccctagctacatttgaagaatctctgttaaagaaaaatagctaccccatatgctaatcgtaaggagagaagtataggctagtttatataaaaatctcaaaaagtttggaggtgccataaggcacatttattcatttctcaactatgattatgacttgagggttggagaaatttttatctgagtaactttggcagactaacctgtgtctgcgttcgtgcagaatttttcaagcttaaaacatttgtagaggtcactaccatatatagtttccatttttttgctaacattttgggtgcgactttatttcagtattattaaatgcacagccattgaatatgctagagttaaatgaaataaagtgctgtttttcaaaaatgaaataaaacaagtgacataaaaaattcaaaatttggccaaaagtattaatatttattaacaaactgagagctccccacgacttctcttcccagaaaacctggtaaagtttgcacacaatacaaagcggtaaatatttgccaaatgaaatacaacgcaaggaagaagacttttctcagccctctagtgggaaagaaaggagaaagcttaaggtggctgctttgaccatcacactccactccagcggttgcttttttttggaatctgaaagcctcacagagaccctttaccttttgttgctgcccaaggggatgggctcatccagacacttggccaaaaggaacaaggtgtcctgtggaaatttcgagattcttgcggcttaggttcctgggcctggagctttcccggggagggtcctgatctgcaagtagtggggaggtggttccacctgcgccacccacctctccactgccaccagcaatctgtgaagccggggcctgaaaatattccttatcttctttttgtaaaattagcaaacatatgaatatatgttttgtgtgaaaacgtttaacagtgccaactggtatgtcaattaaaaggtaaaagataatcattttggctgggcgcgggggctcacgactgtaatcccagcactttcggaggccgaggcgggcggatcacttgaggtcaggagtttgagagcagcctgggcaacatggtgaaaccccgtctctacaaaaatacaaaacttagccgggcgtggtagcgggctcctgcaatcccagctacgggggaggctgaggcaggagaattacttgaagccgggaggcggaggttgcagtgagccgagatcatgccactgcactccagcctgggcgacagagcaagactctgcctcaaaatacatacatacatacatacatacatacatacatacatacatacatacttacatacatacatacatacatactcattttgaatcaaaactttttttagacagggtcttgctctgtcgcccaggctggagtgctgtggtgccatctcagctcactgcagcctcgacctcccgggctcaggcgatccaactgccttagcctcccatgtagctg

SEQ ID NO: 315700 - DNA, 4001 bp, Homo sapiens
tctgtctcaaaaaaaaaaaaaaaaaaaaaaaaaggaatattctcttaatttctaggacagctaaaatttagttaaaatttgagaaccgctgggtcacgaggtcaggagatcgagaccatcctggctaacatggtgaaaccccgtctctactaaaaatacaaaaaaagaaaaaaattagtcgggtgtgatggcgggcgcctgtagtcccagctactcgggaggctgaggcaggagaatggcgtgaaccctaaagaaatgtaaacaaggagataatggaaagctagactgctggtatctttctttagctgtgggcacagaagcccaagagggacacctaggcacctgaaatgagaattcctggggtgatgccagcctccctgtgtgggcctcaggtatggcagccacagggcatccaccctgacccaatgacgctgcacaagactgatgagctcacatcagacagattgaccctgtccacctgttcctggttcataaatccttctctctctccctacccccactcccagatactggttaagatctgcctttcccctagccccttaccctgccactgttctcctgaactgtgccccagttccaccttccccagtggttctcacagctggctagctctgactcctaaggtcctacgggccttctggacaagaaaactctgtctacatactggggtaggggaaccacagacggggtgaagagggagcagcaaataatctgtgctgactttttcccaaaatgaaaacattttcagcagctgttttccaaatacttaagatgttcaatcttggttgtagataaatgtaccacttttctctgccctaggcacgttattgaaagcgttattaaagggtgtaacttacaagtcaacggtgtcaaatgctaccagctcttacttaaagcatactgcaggctcagcccacctacaccctggaggaaccaaagttggtccgcggaacgtgcagaggagcagcttgcaactacccactctcctttccgcaggtgtgatgcaaacctccccaggcagcgctttggagcccctcagccagtcgcctcagctcggacgcagcgagtgaagctgtccttcctctcccaccaactgtgcacgccccgcacctcacctattcgcctcgccagccctgccccgatcaacgatggcatcccccggcagcctgcctattccccccctcaacctggacccccaaacgccgaaggaaaacggtcccacaaatacaaagaaaaacccaagccaaagggcaggcgacggggagtggtgagaaaggaacaagatgcacgaagagggagagcacccagaggggaaataacccaatgttcccactgcaagggcctctcctgaccccatttttctccttccggagcgctccgcagagcaccaactgggaaagcgagggcgccccaaaccagagccggaggcaccctctaacccgcgcaacttggaatcccctcccggaaagccaacttaggaaatgtttacacgcacctcgtctcaacacctcgttacagatggggaagtggatccaagcgcaaagggcggccggagcggaacgcacaagcgaccgagctgcctggaaggacgcgcgccccgcccggcccgcccccgacgggaaggccggtccactgcctgcgttccgccggccgcgagcctgctggggggcacttcggggctcaggctccccgccctgcgggaccgcgggtggctgcgaccccagcccggttccccgccagcctgtcccctagcaatgcctccccgtacccgggtcccgcagacttacgcgcaagccgcgcgtagggcccagaagcagcagaaccagcaacagagggaggatgcgaaccaggaaccccggcatgaccaccagcctcccggctctgcagtcggcgcccaggccggccgcttcgcgtcacttgactaaggacccacggcctggcaccgcccctcgtcggcccagcagccagccctcgcgcctgctcagccccgcgccccgccccgctgtggccgagccgggcgggtgggggcggctaggaggctgcgcgccgccgcgtgactccaggatagtactatctgggttttgcaggcgtcttccctgggaagggaccctttggaactgcagtccggagggcctgctttcagcagcttgataacgcgcctcggggattggacatgaatcatggtctccctgttccctggctgccttgagagagcagaagagggaaattgttaatcattaaacctaaacgccctagatggaatccgcgtctcatatacgggctctttgaataactctaagccgggggttagcaaaatgtggtcggtccctggagccactgtatcaactcacctggaacttgttagaatgaaaatcctgctcacgcctgtaatcccagcactttgggaggccgaggcgggcggatcgcctgaggtcaggagttccagaccagcctgaccagtatgatgaaaccccgtctctactaaaaatacaaaaattagccgggcgtggtggcaggcgcctgtaatcccagctactgaggaggctgagacaggagaatcgcttgaacccgggaggtggaggttgcagtaaaccgagatcgagccattgcgctccagcctgggcaataagagcgaaattccgtatcaaaaaaaaattttcttttttaaaataaccttagtttatgccttggtgttccaaaaagcctttttacattgtataacaaagtagccaaaattctatttgttcactcctttctcctttcctaccggacatgtccttgagagattgagaaagtatcagaaaggacatttcattgagagattgagaaagtatcagttactggcttttcttaggtttttgttttttggtttggggggttgtttttttgttttgtttttgtgttttttgagacagggtctcactctgtcacccaggctggagtggggcgcaatcacggcttactgcagctttggcctcctgggctcaagcaattctcccgtctcagcctaccaagtggctgggactacaggcgtgcgccaccacacccggctaatttttgtattttttgtagagacagggtctcaccacgtttcccaggcaggtcttgaagttctgggatcaagcaatctacctgcctggaactcccaaaatgctggaattacagacatgagccaccgtgcctggcttcttttcatgcctgtagtaccaattccgtgtccttgcactgtgaagtcctttccaagctctgcaattctagttcagtattaaagaacaagggctctggaggaagtacacttgagttggaattccagctctgccacttactgtctgtgtaactgtgggcaaattacttaacctctctgagcttagtttctttgttggtaaagcagggctaataatatcaaattcactggataattggggaaattaccagagatgatgacgataagaagcttggtatatacaggatgttagtgggacagttgatgaaatcagaattagacttgtaggttagattagtaccatgcatcaatgttaatttcctttttgggggggtggggggacagagtctcactctgtcacccaggctggagtgcagtggcacaatctcggctcactgcaacctccgcctcccaggttcaagtgattctcccacctcagcctccaaagtagctgggattacaggcacccaccactaggcttggctaatttttgtatttttagtagagatggggtatcaccatgttagccaggctggtctggagctcttgacctcaagtgatttgcccacctcggcctcccaaagtgctgggattacaggcatgagccactgtgcccggccgcatcaatgttaactttctgattttgataatggtacacggtctaaatattaaataatagttttgtattagtgtattgatttgggtaacggtaatggtaattttggtaatggttatataaaagaacatccttgttttt

SEQ ID NO: 315701 - DNA, 4001 bp, Homo sapiens
accctaaaatttggggagaaatactattgtttttcaaatatatatattgtttattaacgtgtaatgatgtagtatttcttaacaaatagtttaaaatattctctagggctgggcacagtggctgacgcctataattccagcactttgggaggccgaggcaggcagattacctgaggtcaggagttcaagaccagcctggccaacatggtaaaaccctgtctctactaaaaattcaaaaattagccaggcatggtggtggatgcatgtaatcccagctactcgggaggctgaggcaggagaatcacttgaacctgggaggtggaagttgtagtgagccaagatcgtgccactgcactccagcctgggcaaaagagcgagactctgtctcaaaaaaaaaaaaaaaaaaaaaaaaaggaatattctcttaatttctaggacagctaaaatttagttaaaatttgagaaccgctgggtcacgaggtcaggagatcgagaccatcctggctaacatggtgaaaccccgtctctactaaaaatacaaaaaaagaaaaaaattagtcgggtgtgatggcgggcgcctgtagtcccagctactcgggaggctgaggcaggagaatggcgtgaaccctaaagaaatgtaaacaaggagataatggaaagctagactgctggtatctttctttagctgtgggcacagaagcccaagagggacacctaggcacctgaaatgagaattcctggggtgatgccagcctccctgtgtgggcctcaggtatggcagccacagggcatccaccctgacccaatgacgctgcacaagactgatgagctcacatcagacagattgaccctgtccacctgttcctggttcataaatccttctctctctccctacccccactcccagatactggttaagatctgcctttcccctagccccttaccctgccactgttctcctgaactgtgccccagttccaccttccccagtggttctcacagctggctagctctgactcctaaggtcctacgggccttctggacaagaaaactctgtctacatactggggtaggggaaccacagacggggtgaagagggagcagcaaataatctgtgctgactttttcccaaaatgaaaacattttcagcagctgttttccaaatacttaagatgttcaatcttggttgtagataaatgtaccacttttctctgccctaggcacgttattgaaagcgttattaaagggtgtaacttacaagtcaacggtgtcaaatgctaccagctcttacttaaagcatactgcaggctcagcccacctacaccctggaggaaccaaagttggtccgcggaacgtgcagaggagcagcttgcaactacccactctcctttccgcaggtgtgatgcaaacctccccaggcagcgctttggagcccctcagccagtcgcctcagctcggacgcagcgagtgaagctgtccttcctctcccaccaactgtgcacgccccgcacctcacctattcgcctcgccagccctgccccgatcaacgatggcatcccccggcagcctgcctattccccccctcaacctggacccccaaacgccgaaggaaaacggtcccacaaatacaaagaaaaacccaagccaaagggcaggcgacggggagtggtgagaaaggaacaagatgcacgaagagggagagcacccagaggggaaataacccaatgttcccactgcaagggcctctcctgaccccatttttctccttccggagcgctccgcagagcaccaactgggaaagcgagggcgccccaaaccagagccggaggcaccctctaacccgcgcaacttggaatcccctcccggaaagccaacttaggaaatgtttacacgcacctcgtctcaacacctcgttacagatggggaagtggatccaagcgcaaagggcggccggagcggaacgcacaagcgaccgagctgcctggaaggacgcgcgccccgcccggcccgcccccgacgggaaggccggtccactgcctgcgttccgccggccgcgagcctgctggggggcacttcggggctcaggctccccgccctgcgggaccgcgggtggctgcgaccccagcccggttccccgccagcctgtcccctagcaatgcctccccgtacccgggtcccgcagacttacgcgcaagccgcgcgtagggcccagaagcagcagaaccagcaacagagggaggatgcgaaccaggaaccccggcatgaccaccagcctcccggctctgcagtcggcgcccaggccggccgcttcgcgtcacttgactaaggacccacggcctggcaccgcccctcgtcggcccagcagccagccctcgcgcctgctcagccccgcgccccgccccgctgtggccgagccgggcgggtgggggcggctaggaggctgcgcgccgccgcgtgactccaggatagtactatctgggttttgcaggcgtcttccctgggaagggaccctttggaactgcagtccggagggcctgctttcagcagcttgataacgcgcctcggggattggacatgaatcatggtctccctgttccctggctgccttgagagagcagaagagggaaattgttaatcattaaacctaaacgccctagatggaatccgcgtctcatatacgggctctttgaataactctaagccgggggttagcaaaatgtggtcggtccctggagccactgtatcaactcacctggaacttgttagaatgaaaatcctgctcacgcctgtaatcccagcactttgggaggccgaggcgggcggatcgcctgaggtcaggagttccagaccagcctgaccagtatgatgaaaccccgtctctactaaaaatacaaaaattagccgggcgtggtggcaggcgcctgtaatcccagctactgaggaggctgagacaggagaatcgcttgaacccgggaggtggaggttgcagtaaaccgagatcgagccattgcgctccagcctgggcaataagagcgaaattccgtatcaaaaaaaaattttcttttttaaaataaccttagtttatgccttggtgttccaaaaagcctttttacattgtataacaaagtagccaaaattctatttgttcactcctttctcctttcctaccggacatgtccttgagagattgagaaagtatcagaaaggacatttcattgagagattgagaaagtatcagttactggcttttcttaggtttttgttttttggtttggggggttgtttttttgttttgtttttgtgttttttgagacagggtctcactctgtcacccaggctggagtggggcgcaatcacggcttactgcagctttggcctcctgggctcaagcaattctcccgtctcagcctaccaagtggctgggactacaggcgtgcgccaccacacccggctaatttttgtattttttgtagagacagggtctcaccacgtttcccaggcaggtcttgaagttctgggatcaagcaatctacctgcctggaactcccaaaatgctggaattacagacatgagccaccgtgcctggcttcttttcatgcctgtagtaccaattccgtgtccttgcactgtgaagtcctttccaagctctgcaattctagttcagtattaaagaacaagggctctggaggaagtacacttgagttggaattccagctctgccacttactgtctgtgtaactgtgggcaaattacttaacctctctgagcttagtttctttgttggtaaagcagggctaataatatcaaattcactggataattggggaaattaccagagatgatgacgataagaagcttggtatatacaggatgttagtgggacagttgatgaaatcagaattagacttgtaggttagattagtaccatgcatcaatgttaatttcctttttgggggggtggggggacagagtctcactctgtcacccaggctggagtgcag

SEQ ID NO: 315702 - DNA, 4001 bp, Homo sapiens
attacagtcagccctctgtatctgtaatttcagtccgtggttggttgaatccaaggatacaaaactgtggatacaaaaaaaaaagaccgcactggccgggcgcggtggctcatgcctgtaatcccagcactttggaaggccgaggtgggtggatcacttgaggtcaggcgtttgagactagtctggccaacacagtgaaaccccgtctccactaaaatcacaaaaattagccgggcgtggtggcgcatgcctgtaatcccagctactcagaaggctgaggcaggacaatcccttgaacccaggaggcggaggttgcagtgagccgcgatcgcaccactgcactccagcctgggcaacagagcgagtcttcgcctcaaaaaaaaaaaaaaaaaaaaaaaaagaccacacagagatatatctatttatacacacaacagaaagtctcttcaaacacaccaagaaatacagagcatgagaaggaaacaggaataaactcttgcccatccctctttctgccttctacacgtcctgagtccttctgaggtcagaaaagtgtcaaacgtgtctgcattttactgtttggtctctgccacgtgcaaggatgaaagggcactgaggatatacaaacactttctcctaccctttcatctggctggctcccacttggcattcaaaggtcaaggtagcctcctccaaactccacgttgagctgcacctcccctgagctcccacatctgggcctccctctcccagggctaatccagctgtcatgtatttctggcgtgatgtggctgtctcccttgacacgctctgggctcttccaaggcaacagcctggtcttggtaacaaccgtgtcctcggtctgctgtctggcacaaacaaggtgccgtgaatatttgctggttgcatgaatgaggacagcagtcccaccctgtcccgggagtgcctagaattccactgtttgtggccaacccagaatacataacctgggggccggagagccagctgggacccagaggcccgggttcctcagaacggtttctctccaaaacgtgggcatcccacctggctgacggtaacggaggagggtctaagatttagagatacaccagccttgaaagagaggctgagtgaacctttggctggcctctatcgggagggcccagcctgggtctgtgagggtcagtaaagccggccacaatgtgagagggctgagttcgggagcccccagatgagggactttctacgcggatgagagggacagccgagcaccagggtcccctctccaagggaattctctctgttgtggatgccgcctagggtagcccccctaaattccaagggtcagtagggccccccttacactttgaagtgatcggaaagtgatgtgacgctccggggatcccaccaggctcagagatacccctggttagggctccgacaagtcgttcccctcaaaggctcgccgcggccgcccttactgcaggcgatggaggagatgcggatgcagcccgcgccccgacccgccctgccagctcagcgcccgcgccgcaggccccggagcccagcccgttgtctggccgcccgcgttccctgcacgctgggccgagcacacttgccctctagctccgtggcagccgcgcagccccactacgcccagccagcccgcagcggtaaccgctagagcgtcgcgccaagcaggcgccgcggggcagccctgccgccggggtcctcgcagggaaaaaggccgtcgccatggagacgcgggggcgccggcggccgttgggccgcgcaagtactgtcaaggacagttttcgggacgggggacgcggctccaggcacccaacagcactgacggcgaacacttcacgggcgcgcgatgcctcgacaaggcggccgccaccaccacctcagctgccctcgcgggcagcacggcgcggcaaaagcgcacgtcgcctagcgatggcgcggggcggggacacgggctgtaccggcccgtcggagacttccgcttccggggccgccgccatcgctctcccgggcttagaaggcccggctactgacgcgcagtgccagaccttacccctcacggtccttaagtctcggtcgccctcgcctcgcagcctgccacccgcgctcagctgcccgcctcctcagccagccatgctggagcatctgagctcgctgcccacgcagatggtgagggcgcaacccggggacctctgcacgccgttcttgtgcctggcagcttcgaagcccatgttggagcaccgacccggtgctgcgctgttccgggcccggatggttaccgtccaccctctttcccgaattgcctcctgggtccccttctcttctactccgcgagaatctcctgtccattctccgtgagggtgtttcagttcctcccgggaagcccagaatttaatatcttgcccaggcccttaggagagcgggagaccctgatgttggggttaccctgtgccagagttgtgaggtcagggcaggaattgtatgttctcggcggtggaaccaattctttttttcctctgcttcaccccaggattacaagggccagaagctagctgaacagatgtttcagggaattattcttttttctgcagtaagtattggttttacatttaatctccgcccccgcctccctcccaaccctcagtttgagtgtgtttaatatacttcatttgtctctagatagttggatttatctacgggtacgtggctgaacagttcgggtggactgtctatatagttatggccggatttgctttttcatgtttggtaagaaatttgtgggtattagtggcagcttgggttttgtgagtcgggttggtttggttagacctactcagtagtgagacccaaagccaacgtttccctcatccttccaaacagcgtttccctttgctatcattggaaaagtagaatgccaaaatagtgtcagatggtgcgaactatataaaaggacacagcttatttcctttggcggctactctggctaataatcttaaggtcaaagccagcaggagttttcatggtgctcacgttgtcccttcaccttttatttatttatttatttaaattttttgagacggagtttcactcttgttgcccaggctgcagtgcactggggcgatttcggctcactgcaccttctgcctcccgggtttaatagattttcctgcctcagcctcccgagtagctgtgactacaggagcccaccaccacacccagctaatttttgtatttttagtaaagacagggcttcactgtgttggccaggctggtctcaagcaatccgcccaccttggcctcccagagtgcttggattacaggcgagagccaccacgcctggcccccacctttcttttaggtcttaaagccatttgtataggcagtgagcctgttcccatcatcatacagtattttgcatggatggtggcacagagcctttataggaatatggatttttttttttgtttttttgttccctcagcataggagtcatttgggaacctggcattatacgtaatgattttttaaacttttaatagctataatttatgcatttcctcttttctggcccagctgacacttcctccatggcccatctatcgccggcatcctctcaagtggttacctgttcaagaatcaagcacagacgacaagaaaccaggggaaagaaaaattaagaggcatgctaaaaataattgaggttttcatgattcagcacctgcttttgtttctgtgagatgagctaaattgctttcataccccagataagagctaaaaccacctaatgctcttatggcacagctgtgtatagatttagttctctttatacttcatttctagcccagttgggttttgatttatataagtagtttagaccttctcttcataatcttgctctgagatggggaacagaacacacaagtatgaagtttctttcaggtgtaaataatgaaaaataaatgcctcataaa

SEQ ID NO: 315703 - DNA, 4001 bp, Homo sapiens
catctctgttagctagctattcatctcttaagaaggtggtgtctaattgtcacaatgtcctggttggtcctcctcagctcatctgaccttcactttttcaaaacaattcagtggaaacaagatagtaggtggaactaaatttatttaaaaaataaattccttcaacaagctctggataaaatgtttccttaaagacattttaccaaccaagatatcgtgaacctaccttttaaccctttcttacttcatcttcacccatagtagtacccaacccttacataaggctattaattttacaaagcactttcaaacatagcgtattgcaatgcaagttagttcatttgtttttttagacagggtctcaccatgttgcccaggctggcctctaactcctaggctcaagcaagcctcctgcctcagcctcccaagtagcagggactacagacaaagtaagtttgaattaacttcatcctgggaaaattgtgtgcctaccaggcacttaatttctcaaggcctttgtaaagaagagaaatatgttgaaaaactgtttaaaaaattgggggctgggcactgtggctcatgcctataatcccaaaatgaaaacaacaaggctaacgcgggcagatcacctgagctgaggagttcaagaccagcctgggtaacattgtgaaagctcatctctacaaaatatacaaaaattagccaggcatggtgacgtgcatctgtagtcccaagcatttgggaggctaaggcaggaggatcccctgagccagggaggtcaaggctgcagtaagccatattcatgccactgcactccagcctgggtgacaaagcgacaccctgtctcaaaaaaataaaaaataaaaagcaataaaaactgtggatcagccaggcactgtggctgatacccataatcccaactattcaggtggctggggtgggaggctgcctgagcccaggagttccagaccagcctgagcaacatagtatgaccatcccccaaccccatatctaaaaaaaattttttttaaaaatgggatcacaggccagattacaaattagggggaaaatacacatctttctttctttccttttttttttttttcgagacagagtctggctctgtcagccaggctgcagtgcagtggtgccgtcttggctcactgcaacctctgcctctcagattcaagcaattcttgtgcctcaacctcccgagtagcagggactacaggtgtgcgccaccacgcccagctaattttaatagagagagggtttcaccatgttggccaggctggtctcgaactcctgacctcaggtgatccacctgcctcggccttccaaagtgctgggattacaggcctgagccaccaggcccagcccacacacacctttccaaagcagtatatatgaagtacaacgtgtcagtgaacttcttctcatatacatcagggcgccgtggctcacgtctgtaatcccagcactttgggaggccaaggcaggtggatcaagaggtcaggagttcgagaccagcctgtccaagatggtgaaaccccatctctactaaaaatacaaaaaattagccaggcatggtggcaggtgcctgtaatcccagctatttgagaggctgaggcaagagaatcccttgaacccgggaggcggaggttgcagtgagctgagaccgtgccactgcactccagcctgggcaacagagtaagactctgtctcaaaaaaaaaaaaaaaaaaagagaagtatatacatcagtatataccctaagtcatatgcctctatcacattatgggctgaccttatctacagaagctggcagaggggagctgttcggacaaagccccaacatctgcctgcgatgaggcaacttccaccaccactgagaaaacgatcttgcactcaaataaatcccacttaattaatggtacaagagataatgtttttagtttcttgacttccagttagcagttacgggatcaagaggcacacttggctggaaacaagaaaaacacaattctatcaagtatctgacatacttaagtagactggcaaggcagaaaccagttgctcctaaaacttccacagttacctacatgcaaaacgccagttatcatggagtacgtctaatccatattgtctttcctggggctattcctggtaagagagctttcctgatctggttagaaggaattctcaaaacgaaattgcacacagacgctggatctgtaatagttaactacattttcgtaagagtatataattgtgtacaatttgattagcaacacagttggtcctcagtatcagtcggggattggctccaggactccccatgtatacaaaaattcacggatgctcaagtcccttatgtaaaatggcatattacagtcagccctctgtatctgtaatttcagtccgtggttggttgaatccaaggatacaaaactgtggatacaaaaaaaaaagaccgcactggccgggcgcggtggctcatgcctgtaatcccagcactttggaaggccgaggtgggtggatcacttgaggtcaggcgtttgagactagtctggccaacacagtgaaaccccgtctccactaaaatcacaaaaattagccgggcgtggtggcgcatgcctgtaatcccagctactcagaaggctgaggcaggacaatcccttgaacccaggaggcggaggttgcagtgagccgcgatcgcaccactgcactccagcctgggcaacagagcgagtcttcgcctcaaaaaaaaaaaaaaaaaaaaaaaaagaccacacagagatatatctatttatacacacaacagaaagtctcttcaaacacaccaagaaatacagagcatgagaaggaaacaggaataaactcttgcccatccctctttctgccttctacacgtcctgagtccttctgaggtcagaaaagtgtcaaacgtgtctgcattttactgtttggtctctgccacgtgcaaggatgaaagggcactgaggatatacaaacactttctcctaccctttcatctggctggctcccacttggcattcaaaggtcaaggtagcctcctccaaactccacgttgagctgcacctcccctgagctcccacatctgggcctccctctcccagggctaatccagctgtcatgtatttctggcgtgatgtggctgtctcccttgacacgctctgggctcttccaaggcaacagcctggtcttggtaacaaccgtgtcctcggtctgctgtctggcacaaacaaggtgccgtgaatatttgctggttgcatgaatgaggacagcagtcccaccctgtcccgggagtgcctagaattccactgtttgtggccaacccagaatacataacctgggggccggagagccagctgggacccagaggcccgggttcctcagaacggtttctctccaaaacgtgggcatcccacctggctgacggtaacggaggagggtctaagatttagagatacaccagccttgaaagagaggctgagtgaacctttggctggcctctatcgggagggcccagcctgggtctgtgagggtcagtaaagccggccacaatgtgagagggctgagttcgggagcccccagatgagggactttctacgcggatgagagggacagccgagcaccagggtcccctctccaagggaattctctctgttgtggatgccgcctagggtagcccccctaaattccaagggtcagtagggccccccttacactttgaagtgatcggaaagtgatgtgacgctccggggatcccaccaggctcagagatacccctggttagggctccgacaagtcgttcccctcaaaggctcgccgcggccgcccttactgcaggcgatggaggagatgcggatgcagcccgcgccccgacccgccctgccagctcagcgcccgcgccgcaggccccggagcccagcccgttgtctggccgcccgcgttccctgcacgctgggccgagcacact

SEQ ID NO: 315704 - DNA, 4001 bp, Homo sapiens
gagcccattgacctccagtcttctctatttcattatctcatgagactgggattaggagcctgggaagtcagggtctataggaggctgcaggtttatcaggtcaaacccagaacacatcctcagggcaagcaatctgaggaatctcagtatgcaggaccagttcagcaagaggtttaggttcaaatcaggagtgagggcaaagtctggctcatggtggaaccttagaaaagtccccaggcaccatgtgaggccatgtgccatgaagcccaattgcaggacagaaaaggatgcccttctacccacacagttggccagacccaaccctgccaagaacacgccttctggttccaagataacaaaaacaagtcctaggtcacaccacccacagtggtgagagcccaagggctgaagtaggcaaaggccaggctcccataactgagcccatagccattttccccactgggcagagtaaaagctaaagaagccttggggcgaaggtcaggaagctgtagaggggtataggaacaacaaagacccaaacagctcatctgtactacatatgtactattgcatctactttaataaatgcctaccataaatgttgcaagctgacttcatcagcaagtatggactgagcagggtaaggaggctgggaattgaggttccagctctactataggctttctgagtggctgggacacctccatttctctcactgggcctcatccgcaaaatgagacatggggtgagattaacactacgctcttcccttaacaacctcaggctctctgatactgtccactgcaacacagatctcaaacaccggtttaccccacacccaaatatggtggttacttctagactttgaccattttgcttgcctagttctcagctctccggtaagaaaagacagccatgcctgacttctgttgtgaaagggaacacagagggcatcgtcatggggattccgaaaatgggtccagttttggccagggggacccctggagcttgcccattggacttggagctaaaagcatcttagcaactaagacagccggtctttatagcctggatgaaatttgtatctatttcccagatggacaagagcctagaagatcccagccttgccactgggtatgagcacaggacagggggacgctcaatgctaaggctgccagagaaaatacaggacttccggttaaatttgaatttcaaataaacaagtaatttttaaagtataagtatgtgcatacaatgtttaggacttaacaattattcgtcgtttatcttaactcaaatttaactggacgtggcccggcgcagtggctcacgcctgtaatcccagcactttggaaggctgaggcgggcgcatcacctgaggtcaggagttcgagaccagcctgaccaacgtggtgaaaccccgtctcttctaaaaatacaaaaattagccgggtgtggtgggcgcccgtaatcccagctactcgggagactgaggcatgagaatcatttgaacaggggaggcggaggttgcagtgagccgagatcgcgccactgcactccagcctgggtgacagagtgagattctaactcaaaaaaaatgtaactggacgctttgcatttttatttgctaagtcctccaattctatccaagacacggtctctccgaaactccgggaggctccagagcaaaacaacggaaataggaagactaccggtcttgactcctccccgccatcaaagaaggctggtaccatttccggctttccctagacagtagggggccggaagtgacgtcatcctaaggtagggccttagcgagggaaatggctgccgcgtaatgcccggtgatgcgagaaagaagggcctgctgccaccaggacccgtcatcgcccagcccagggaccgcttctgaaggccatgcgagccctggcggcgcagacttaccagcccacagctccggccgcggtgcccagcgctggagaacggaagtactagggggtgggcggagcggaagccggaagtgtgggtgggtggagcggcgcaggcgggtgcgagctctggctgaagccggtgtccgggaggggagagtttagcatattggctctttgctggccactgacagacctggaaggagtcaccttcagtcctcattttttaaatctctacattgagggtaataatccccgcctcaccgattgccgattttttttttgagacggggtctcattctgtcgcccagactggagtgcagagtcgcggtttcggcccaatgcaacctccgcctcccggattcaagcgattctcatgcctcagcctcccgagtagctgggattacaggcatgtgccaccactccgggctaatttttgtattttttagtagagacgggctttcgccatgttgcccaggctggtctcgaacgcctaacctcaagcgatccacccacctcagcctccgaaagtgatgggattacagacttcagccgccgcacccggcctctcccttcctttatcctgtacggtcagtcagcagatgcaccctgagtgtcaggcactgactgggctgagcaaacgaactgagaatcactacttccccacaactcaccccttctggagccagattaagtaattcccgctcctctccatggcttttattccacaacttattattgttcttccctctcccaccatgggccaccaaatacagctctggcttagcaagagttccattctgcgatcctcaagcacataagcggcatgtaaacgctaatgactctgggcctacctcgctgtccctactctcatccggggcctaccctgtgttggctggatgccttcccacattcataagatgagtcctgatcagactccaaaaatacaaaacagttcactgtttttactgatgttttcttagggagatagaggagagagttgcatcacaaatcacacacttgatttcctaacaattttattgaaacatgtttcttggcagggcgcagtgtttcacgcctgtaatcccaacattggggaggccaaggtgggcggatcgcttgagcctaggaatgcgagaccagcctgggaacatggcgaaacttatctctaccaaaaaaaaaagagccaggtgtggtggcatgctcctgtagtcccagctactcaggaggctgagatgggaggatcacctgagcctgggaggtagaggctgcagtgaaccttgatcacgccactgcactccaacctgggcccctgtctcaaaaaaaaaccaacaaacaaaaacacatttctttctcttggttttgaggtggagtcttgctctgtcacccaggctggactgcaatggcacagtctcagctcacggccactgcactgcagcctgggcacgatgtcggctcactgcaacctccgcctcccaggttcaagcaattctcctgcctcagcctcccgaatagctgggactacaggcgcccgccaccacgtccagctaatttttgtatttttagtagagacagagtttcaccatgttggccaggctggtctcgaactcctgaccttgtgatccaccgcccttggcctcccaaagtgcagggattacaggcgtataaacaattacaggcgcccggcctatataaacaaccttcatctttccccatgctggagaacactaattgccactgcttggtgtctgtgtttccctggatggctgccctcacactttatgcttgaataaattcttttaactggatatcgaaccttttgatgatttttaggttgacattagaaatgtgtttttgggacaggtgcagtggctcatgcctgcaatcccagtactttgggaggctgaggcaggtgggatcatttgaggtcaggagttcgagactggcctaaccaatatggtgaaaccccatctctactaaaaaatacaaaaattagctgggcatgggccgggcacagtggctcacacctgtaatcctagcactttgggaggctgaggcaggtggatcacctga

SEQ ID NO: 315705 - DNA, 4001 bp, Homo sapiens
aacttaccctgtgcctgtggtgcttgttggagctctctgttgtccaggagaccagcagcccagaaagagacccaagtctccgtggaaacgtcaacactagattctgacgttgtagtggaatacgggcaattatagctctggcctcctacaaagtactggtcttggcaaggcagaatggtgttctgtgaaattcagtatggggggagtgaggggtcccaaaagatggggtgatggagatttagaagggggaaagggtgggagaaataccgaaattacatgcagtgaaatataaagaaaaaaaatcagaaaaggtgttaagtatagatccatattaattttggggtggtcaaattataattactaaaagggaatgagtttcttggtttacccagaatttcccttaggccctctgagcaaaagagcagactagcattgaatgggtgaaatttgtacatatccaggaggattgtctgttgcaacgaccagcccatctaatagtctacccagatctaaataaagggaattctacttaatgattcaaaaccataagaactatttggttctttctgcaaataccttaattatatttctaaaactcctgaaggacaaagaacgcagaatgctaaagctgaaatggatgtgacataatatagactaacgtcttcatttttgtttctgaatcatacttgccttattccttcctttttcctccgtctgacctaacatactgctggctcatagtccatcaatctatctgtctgtctgtctgtctgcctatcatctatctatctatctatctatctatctatctatctatctatctatctatctatctctgtcccagagataattaaaacattttgctcccaacactaagcacaggaccacaaagctgctccaagtaaacgtataatcaaagctgaaagaagttcgttagcaaagacagcaagctctagttctgtccatcactagggctcagtgcccctccaaagttatcttgccattaactggcatgtattctccactgtgttctgatccagtgaacactctcctgccttccacttcttgaacctcaaacacacagtctttccatacgtccaggcaggggcaggtatgcagccttcctgggttaatttgtacaacaccaaatttaaattatttgtcaatgtttaatcaggtaaaagccattcattttagcagagcccagctttggaaaaactctttttgactactacagggcttctttggacattaacataaacagagagaaaacaaataagaagaaaaaagagaaaaaaaagttaagtcaattcaatcgcactttgttaatgttctcggtaaattaagttttgaaaaattccagttctgaagcaagtccagcttgggcagtgcagaccaaagaaattcagccaaaagtttatcaagtgcaattttcttttattttaaaagcatgtttgcagactctttccctgaggttttttattttttattttattttttggaatcagagctaagctattatgcaattgatacctgagaagaaaacaaacttcaaatatccctagacaagttcatgtccaagtgtttgcaaatatatgcataatctagaggaagaggtagaatgaaaagtgagtgcaggtggagggggaagttggggagaaagtaaggaaagtagtaataacagaaagagagagagagggcgagagagagaaaggagagaaagaagagggagagagggagagaaagagagagagagagagagaaagcagatagaggatactaaaagagacacagggcagcagagaggatctgttttaactggcgggtagcggagaaatcttgctccgaaggtggaataaattctaaatgcaaagcttattaactttcagagacccaagtttgccagcggactagctaacgccagttcctcacttaccatcttgcagtggaagaaagcgctgcagaaactgagcccactcaatttttcagtaaaaccagtgggagctttaaatgagactgaggggaggagctaggagaggcgagttctaatctgcgggagctcccggtgacgcccagagctcccggcgagcgccgctctgtgatttggtgagaggctgtcaaaccggtgacgtgagccaggagtcacccagcagaagacaaagtcactcgcgctctgggcggccaccgcgccgggaccagggacctgccgatctggccaccggccgtggggcagaggcaggacctccggccctctcgctccgggtgcgcggcgctgcttcacacccggccccagtgtggactcgccgcgggcggggagacgggcggggagacgggcggggagacgggcggcgaccccgcagccgggaccgaggcgagggccgggctccctcccgctccacgcgcagcgcggggcagggccgagccgggccgggcgagaagatggtccaggtgcctggacgtggggtaagaaaagcccaaaccggcatcacaggggtcaagggactctttagggaagcccatctaactggccccagagttagtatgcttcctgtgtatttttttctggctacgcgataacaatattaacttgctgtatgacgttgtcaattgacttttttttttttctattgggtgtgtcttactttcccctatttctgaaatgagtgttaaatatggaggtgatatatatccatcctggaatgtaagcttcactggaatagcaattcctgtttattttgttccctgctgtctccaaaataccagaaacgctttctcacatgtaataagtgctcaacaaagatttgtaaaaacaattaattaagttacaaatttcggaatccaagtatctttttatattgtacctttcttcacattataataaaataaatgattataattaagaaaacttggtgtatgttaatatctttcaattaaagcatttgatttcctgtcttttctcttaccttttattctcacagttcctattatatctagaggagaaagaggagtaacaccatctttaaaaccatttagccaccactaatagccaacttttatttcaacttactaacgtaatagatataaagcaatttacattaaccctgggaggtaggtactcttattgtctggtataacaggttgactgatgaagcactaacattaagaaatttcaccaatgattatacagttaagaagtagcagacttgggatttaaacccaagctggctgaagcatccatgctcctagctccatgtatgtggtatctgacccaccttggcttatgtccactgcacattatagacatttatgtaatggttactcttatgggtgggttgtgtttccccaaattcatatgttgaacccctaaccccaaagttactgtatttggagataaggcctttaaagaggtaattaagtctaaataaagtcatatgtgagaccctaatccaataaaactggtgcccttataagggacaccaggggtggcacacacacagtaaaggccatgtaggggcacagtgagaaggcacctgtctccaagccaagagcagatgcctcaggggaagccaacaaccctgccaacaccatgctcttgaaatttcagcctccagaatttttgggggaaaaaaaaaattctgttgttcaatctatcctgtctatggtattttgttatggtaaccctagcaaactaacaccagacagggagtaggaattgagaaaacttctgagcctgttctgcacagctctttctctaaaatacttttgactgttatttatttttccttgaactatacttatgacccacagcacttaacaaggtgactagcacacagcagatacgtattaagtgctctgtgtccaaatttaagaaaagaatagatgatgaagacgaagaaggtgccagacttgttggggccctttcctcctgttccaatgctgtttatttgcaagctttcttttttttttagacgaagtcttgctctgtcctctctcaccaggct

SEQ ID NO: 315706 - DNA, 4001 bp, Homo sapiens
acgcggcagcgccagcccacaatgcaggactcaagccaggaatgggaacggatccgggcatcccgcagcaccgtgcaccgccggatacacacaccatcttcgaccaccacgccaggtcccaggctcacattggggccaatgctgcagttctggccgatgcgggcacttgggtcctgagagcggtgggaaaaatacaagtgggccacttgtctcccaagactgagggggttaatgatgggctgggcaagggcctcaccaccagcacgttgcccacaatgccagggcctgagcacagccgctcaggctgcttctgcctcagtgactgcaggaagaggcacatgccagtgaggaagtccttgggctgcccaatgtccatccagaagcctgtagggagggatgcatcaggggcctcagcccagccacagaccacccccaccctgtggcctccctgcctcaccctgtaactccatggcatatagctgcccctccttggccataatggggaagacctccttctcaatggacgtaggctgcagctgtgggagtgggcagcttgtgagcagggtcatggcggtgatggcctgccccaccccagcccaccaacagctgtctcctacacacctggatgcgctgcagcactgcagggctcaggatgtacatgcctgcgttgatcttattggacacaaacacctgtggcttctccacgaaccggtgaatgcggcctgtgtcagcctcacacaccaccacaccgtacttggagggttcctccaccttggtcacctgaatgcaaggaaggggacctcggacctagtccagtgttcctaagccttgatacacatgccgttccagatctcaagagactctgccccaagtgcttaaagatacatactgcacagctctgtatccataacatccgaaggcagatgaaggctagggggcatgggaggctgggcatggagggtgaaagtgtcaagagagagaagacctggcgccttaccaggatggagccctcctggccatggtgccggtggaactgcaccatggcttggaaggggaaatcgcagatcacgtcactgttgaggacgaagaaagggtctgcagtctcagagagtaggtcacgggccagcgccaggggcccagctgggggaaggggacaggtcaccaccttgctggaggtctgagtccctggattcaggctcagcaggcccactccaggctgggtcttacccttttcctggccttaaaccctcccccaagggacctttctgcctctactgacctgtccccaaaggctcctcttcatgggacatggagattcggattcccagctggaaggaagaggcccccccagtcaggttctaccaggatgggaagttgggcggggaccgagaataagggccaagagtctgtgcctcaccctctgctcctgtgccttcatttccttctccagcacctgcgacatgtagctcacggccaggatcacgtggtccacgcctgcctgtcagaacgcaggccgacgggcgggctcagtcagaaggtacgggagcccctgacccctagtcgctggccatccctagtcccgccagatccgaacgcgactctgatcccgacccagggtcttaccgcggctagcgcctccacttggtgcagcaagatgggcttattgcagaagtccaccagtggcttcggggtgctcagcgtcagcggccgtagccgcgtcccatagccccccactaagatcagtgccttcatcgcgcctgcggacgttgagggggtgtcccgggctctgaggtgcctgcagcccgcctggccggtccctgccgcgcactcccaacgccgtgcccggccccgcgcccttcaccaacccgcctgacagactctggctccacctcgtccgcccggtcgccctgacgccggatccagggccgccacaacacagaacgcgacaccgggtagacggctgctggccccgaactcaggccggacccggcgcgggcagtgacgcgaccaccgcgggccaatcggctgccgcgtacgtggcacggccgccggcgtcggaacgttggagcgcagcgctgcgacagacgtagccaatgagcgcccgagtacgccgggctgccatggagacccgggccgggacccgcgggtcagctggccattggcggatccaaaggcggaactggcgccaagggcgaggccttgttccctgcttcgccgcggtccagcagccgccggccccgccccacggccccggcctcgccccgagggtgaccagggaaggctcccgggccacgggattttcacaaagacagactcgcctccgtttctagcggctttatttttgacatacacgacctcagacacaagcggggcgggcagcgctaggtgtacagaaaggagcgggctcggaccgagcaccccctcccccgcacgcaaggtccaaagcaaacgcaactgcggcgggagccaccggcgcaggcctcgggcggtggagacaggcttagcttccaggaaagagcagcagagagcgattcccagaacgcgagggcttacagttccccgagaagcaaaagaaccaggtccttcccagggttctccattattttttcctcattaaaatatattttaagtcagcacaaacataaccaaattgtacagctttaaagttcaaagcagtctgcatctagggaacgtgcatgtggtcaggagtgagcgcgtgagcagcggctacgtaactagcacaggtgccaggccccttgatgggaatccccatgctcactgcacaggcccagagagggaggggtggggtccctggcaagttgctacactggtccccttcctcttttaagcaccacccgtcccaccccaccctcaggggctggtgtcagcttggcccagggaagcactatagagagggctcacctgagcaccccaacccatgatcccatgttgcactttgttcccaagttggggctaagaaggctgggcctggcagggacagggctctctggcatggggcagggagaaagcagtggcagacagtatgcacacacacttgcccactaccattaaataacagggctgggtctccaggtgtccaaagtgctgaaaagaggggccctgctctaagggagcagcagcaaatcccaggccttcccactctttgtagtgccaggaaaatactgaatgtaagtgggtgcagctttgctcgctgtgaggagcagcagaatgcggcagcctctcctcccagaatcgaggaatctgggaggcacaggacatccccaaaaggtcccaaacagttccagaccctatgtcttaccctccaccctaccagggaatgactatctacactaatgaagggctactgcccccatggctgaagccacagaatggtacaggagagaagactgtaatttgtgaccagaaacaggcaagctgtccctcccagccccaaagaatgggaacctgcccaccagtggcaccagggctgggggctaggagagatggcatccatcaaggagcccttaagaggctgcatctttaaggaccaggaaatgagtccatcagttaccaaggcttctcacagctggcaggcttacctttaaagccaaacaggcacttgcctaaagtgacaatgaacagtgtggccctaggctcaaaggagagggtgctaaccttggcaatggctgaaatcggtgtcacctcctggccatctgttagaagcagcagatctgtgccattaagggctggcagccaaaatgactaaaaccatgagaaaggaagggtcactcctcaagccctcactgccccactctaagggttgagggccatattctaggcccacagaaatggtgctgggtcaacagggaaacaccaatttattctgctatcaggtctttataaaaaggcaacacctgtggaggaagggcatggggcaaaagctcacctcagaagtggaagtgttctgctgaggaaagcatgaaggaatgagtatatactaa

SEQ ID NO: 315707 - DNA, 4001 bp, Homo sapiens
tatttttcaaagcccataaattaaatttcagtccttctaacaccagttatttcatctatcagcataaagatgaatctttccaatgagttgtaagactcaaaactaggcagaaaaatgctttgcaagtcgactagtaatcgggaaagagctggacaatggggtttacatttgctccttaggtcagaaactaaaggtttgtgtgtcttaacagctccctggacctaagcaccactggtgccttggtttaaaagagttaaaatcagctaccttataatcttttactcattgttcgacaaatactttttgaatgattaccgggtgctaagcaaccattcaagaggacctcctaagatgtgacccttgagcagcaccttttaaaaagaatgttaaaattctgcctgaacaaggcactactatctgacgtagagcaccaaatccacctcgaagtatacaatcccaccccccgaatgaaatttaattaagttttttcctaaagctaggccctcaacagcgtacagaggaggtgtatcttaatgaagtaaatcgcaattcaaaactgcacggtttcccgctggcaaaactgacttagtgaaggtcagaaagaactccaggccaatgaaaattttaatacagaggtgaaagcgaaggtgcccaattcaaaagcgggacgaaagtaagaggaacggtctaagaaaagtgagttggaggagagatgagcagcagcggtcaaacgtgctctccccgccgggtacgtcaaggcggcaacttttccagcactccggaactccggactgcccaggcctcgggcgagctggcacggctcgcgtcccggggagggaccccaaaggcggggaagcgggttaccccgcaaaccagcaagctcgacagggagcaagctggacgggggcgggacctggacacacaccctttcctctctgagaaggaagcggggagggagaacggagtgcgcgaccctggggccaccagccctcacgcgggcctgcaggggcgttgggggagggggaagacagtgcagctccgaggggttcgtccagaaccggcctaaccgccgcggagcccaaggctggcggggggaatggagcgggcctcgccgagggcaggcgggaaacggggtggcgggaagaccagaggccggcccagctccaacgccgcacaggaggccccgaccctgccctgccttcggcgggccccgggatcgccacaacgggcccccagcctcccagagggacggggtgggagccgaggaagcccccaccccgacacgcagacacacaagcccgctcgccgccctacccccaccctcgcgccgcgctcgcgggctctgcgccccacagcggcgcgggggaggcgggggccagcgacgcggccgcggggagctgatgccctccccgacgcccggacctcgacacgcagacaagatcaacaaagcatcgccgctcccgagataaaacatgccacaggccccgaccagggactctacgacgcgtggctgcccggggcgcagggctgcgcggacgggctgggggaagggggtggggaagggcctcgcggggtggctccccggtccgggagcctcgcctccgccgggatgcggtgctgcagggacccccacgctgaccttggagtctccgttgcacagagccatcggggccagggccggagccgcggcggtgacggcgacagtacgagacggggcgggagggtgccggaagggtcggcgccgcgggctgaggttgagaaggaggcctggtcgaggagcagccggcagcggagaggagccagccgccagaaaagcgccgaatggagcaacagcagcggagcgcgggccccagcgccgcgggagagaagaccagcagcgcgcacgctgcccccgcctcctgcttccgccccggccggccactgggaggagccagagcccgttcggcttggcagccgagcctcagataccctccgcagccgccgccaaaccggccggccctcgagaggaggggctcgcggcgcccggccccgcccccagcccggtccccgccggcaaagccggccgggtctcccgcggcccgcccttgggaggaggagcccgcggcatccaccggctccgcccctcctgccctcgcaccgaggagcccgccccggaggaggggcctgtggcgccggccaggagaaaaaccgaagccgaatccgagctagtttgctgctgccggatttgcctgctaccttggatgacttcgggaggctggcggcaccgaagaggcctcctgagagctgggcccctggcggaactcttagccggtggcgtggccttatctcaggttgctggacatgaaggaggccaaggctgctttggaaagttccgtggccatatctcaaggatgtcattgtaggaactgatcacttagatacttcaaaagttatacagctccccacaaatacagcaggtgcagtatttccaaagaaaagggagtttgggagtggtaatctggtgagcagctggcccagggaactggtcgtgaagctctgtttgcacaacagtgtttttattggaattgtttgtggggaaggggctgcagtccctccacctaccccttggcaaccatcatgatgatgaggtgttactttgaatttggttacctagaggcctaaatcgagattggggtataaagaataatacttgagatggcttccagctaacaaagcctttccacaaatatttttattataatacagccaacattttgctgcagtcattcttgtgtcagactgtagctagggtattaaggagccagagtgagaaaatactttaaaagctaactttaaccaatcccgtgaaagtagtaaggtaggattgatgttcttatcctttttacaaatgaggaaattgaggcttagtgagataatgtgcctctcagtatatatagaatgtaaggcctgcccaatctgggaaagtgtagacagtttattagtgaaatatttacaaaaacgaaaggcttaaggtcctagtgggcctgagacttaagtatttcgcttacctttttttgaacggaaaattgaatatttgaactctccaaagccatggatactggcttctctgggtaggtctgtatgcacaatctaaagaagagtgcagtaaccaataggagaacctcaacttacataaacatccacccctaatggagtggaatgtgatgtgatatactggcattaaggattggctaagtcccatctatcttaaacaatgcttagtttaaatatattctaggctgggcgtggtggctcacacctgtaatcccagcactttgggaggcctaggcgggtggattacctgaggtcagagttccagaacaggctggccaacatcatgaaacctgtctctactaaaaatacaaaaattagccaggcgtggtggcatgcgcctataatcccagctactcgggaggctgaggcaggagaatcgcttgaacccgggaggtggaggttgcagggagccaagatcatgccattgcacaccagcctgggtgacaacagcgaaactccatctcaaaataaacaaataaataaataaattctagtggtcacctgtgcttaatggctaagaatgttggcatgcacacaatataggatcctgatattctttcttctttagcttctgactctattgacccatccctctttgttgaaactggattttccttaaaatgcaccaaaaagttgtctttttatctctgtgattgctcttggttgcctttgctagctccttttcctatgtctggccttcaggagctttaagtgttggatttcttcagtatttctattcctaatccttttctcatcttactcttccttggagcacttgtttaaaaatacagacttgttggccaggtgcggtggctcacacctgtaatcccagcactttgacaggccaaggcaggtggatcacctgaggtcaggagttcgagaccagcttggccaacatggtgaaaccc

SEQ ID NO: 315708 - DNA, 4001 bp, Homo sapiens
agcacagagccagtcacactaggagccaggatatctgctccctgccccagccagggagggcccacttccctgtccccttcaagtttcattttcccctcctaaggcctcttaaatgttaagagaacattctctatcccaagcaggggtcactgaaaaaagagttccacttgacaggtaagcaaatcaaggtcatggagcccctatccctagactcaggctggtctctttgtctttccagcagctgtgactcaggcgggaagtagtgagtggcaggacaagggtgtggtgctggcagccaggcaggaagcagggggaacaacgggacagaggcaggggcacagcccaggagcagctccagcagagaagggggacaggagcagaggtgggtggagccccaggatggcatctgggtggaatgggtggggtgaagagctctcgggcagcccacaggctaagtgccctggcagctgtggggtagtagcttcactctccccatctctggctgggtcctctttccatcaggacctgagggatgccccctaccagataagctggcaagaggcttatctgtgagttttgcacacacccagctcccctcgcacctgcctctcagaggggtggctgagtccagattttttttttgaaacacagtctcgctctgttgctcaggctggagtgcaatagcatgatcttggctcactgcaacctttgcctcccggttcaacctctgcctcccggttcaagcaattctcctgcctcagcctccccagtagctgggactacaggcatgtgccaccacgcccggctaatttttgtatttttagtagagacagggtttcaccatgttggccaggctggtctcgaactcctgacctcaagtgatccacctgctttggcctcccaaagtgctgggattacaggcgtgagccaccgcgtccagcctgagtccagatttctgcaaagatgctgggtaggggaactgaggcaatagaaggtggcatgaatcagcccctcctgcccgcagagggccccaccaagtgctctgtccccagctgggtaagaccagagaggcctgcagaggttccctggggtggccttggcattcccactgagtcacacctcttcccaccaaggaagaaacctctgcagcctttgccctgtggcgcagttagggcccacagcaggtaggcagtaatcatagtgatgtgctgggtggtggcagctgctctgcactagaacatctgcttccactttgggagtgctgagccccagaggagggaaccgatgagagaagggagacagtaccactccacctgcgtgaacaagaccagcagggcccctgcagcaggagagacaggcccacaggtcttgtcacttgatgcttagtccaggccccagcattcaagtcacagcatctgttcatcttggaccctctaactccttaataggctttgatctgctgggaggctgggacttgctactatcctttctggcttcagtttcccctgggcagagctgtcaagcctcaagcagccagccagcctgcctcccattttcagatcctctcccagaaggaggtccagacttgccacagccctgatgtccactctgatccttcctgagatcctcaagagcttcagctcctttcctgccctttctctggcacctcatctgtgaaatgggacaacgctgtctccttctgagagatgggtaaggattaaatgcaaagctcttctcacagtgtggggcacatgtgagcattcaggtaaaagttatcactatttatctaccctttgaaagagtacagatttccccaaacctctcatttcctgcaacctgcagagaagactgctgtggtcatctcatttgaaggaaagcttctgaagattttcagataaagagcagatgaagagcaatggacagcggctaacaggctgattcagagctgtggtggttccctgctgggactcagcataacctgggacaggagtcagagctactggctcctctgttggctttccgctgtgtcgtcacttcccttcagtataacccggcactcctacacagctggggcctccttcctgcccaggagcctcactgctgacattgctcactggctgcacacacccagaaagccaggcacacctccctggagagaacccccatactggtgggctccgtgggaacacgtggggccaggaagagcagccagctgacgtggcaggcccgagggcagagattctcagaagcagcagcggctgggaccacagggtagacttgggcagcggcccagctcaaacccacaacaccaggcccgcccacactgccacaactccccagcctatcccagtgggatatggtggggcaggtgggggtagccctgagcccaccacaaaggcagcccggacaccacctccttctcttatcccaggaaggtgccacatctccagctcagcctgtggttctcagatcccgtgcacccccacgtcccctgcagtcctagggacccatgccccgccaccaccagggggcgcccggcagccggagacactgtggaaggaagtgggggctgggcagcactggggagcgttttgtttcagaaaagcagcctcagccaggggcgactggggaaggtgtcccacccaccagcccgtccctgggaagcccccagcctgcagagactcggcacacacagaaaccatggcaacgggagggaggggcagagaccccgccagacaaaggccctctgagccccgcccctggcgtctcttccttcctccaggtgctgctccccggcccccctcattccctccgagaaggctcagcacgggtccggcactgggaggcagggactcgaggtcttgaaagggaccggcaacactcccacccatgtgtgtggcatggccctataacggatgcctgaacagaccaacagactccacacctccctcccgccagtctctggcactcggctgcctccagcggcttccaggggttcacagtgcccaaaggggagcactaccaagcagggcctggcttcctactgccaagtcagagatctctgtgttagggaaactgaggcctcaggtcctgcccacacatgggaaagtctttctggggcaaggtgtgtctccctcagtggggccctttccactgcacagagggaaactcaggcaccgggtgaggaaggctggcctgatataaaggaggccccagacctgttcatcgctggcgcctcaggccccaggtaccgcctgtgcaggagccaggaggtgctggacaagacgcggatcacgcggagctgggccatttggcaccgtctccctggaggcctcttcatttcaggcatccctccgctgttcccaaggcacctgaatgacctcttttcccttctgattcatggcggtggactctgggaaagataacgggagcctaggcctcatctatgaaatgtaccccttgagggagggtgccaaacccaaggcctgccctgagtagcctcttcaaagtcaccccaaactgcctcagggcccaacccaagccagcagctgtccttgtgtccacaggccaggagaccatgctaagaatcacggcactggcggggcggggtggctcacgcctgtattcccagcactttgggaggctgaggtgggcggatcacctgaggtcaggagttcgagaccagcctgaccaacatggagaaaccctgtctctactaaaaatacaaaattagccgggcatggtggcacatgcctgtaatcccagctactctggaggctgaggcaggagaatcacttaaacctgggaggcggaggttgtggtgagccgagattgcatcactgcactctagcctgggcaacaagagcgaaactcagtctcagaaaaaaaaaaaaaaaatcacagcatcacagattctagtgctggatacagagagggaagaggacagtctgaggtctcatggtgaggaactggaccctctgggacccacagtcttgggtggc

SEQ ID NO: 315709 - DNA, 4001 bp, Homo sapiens
taggattctaacgtcttccttggctctcctgtttccctacaatttatcctccacatggcagccaagggcatcctactgaaagaaatcacatcacccccttgctcggaaactttctgtggttccccaatgccctgagaatagatgaagcccccacacacactggtttggactctgcagcagttggaggctgtaggctggcagttggaagcaaagactctgaggagcagtttgcaaacttgccagctacttgttactttggacaagtaccagaaactccctgtacctcggttttcttatcagtaaaatgggcctaacggttatacatacccaaagcacaggcagaggtcaggactccaggaggaaacatgtaaaacatgcagaatgtgcatggcacatagaaagccctcaataagggtgaggtgttatagtagtgatttctttttttttgagactgagtctgactctatcacccaagctggagcgcagtggcatgatcttggctcactgcaacctccgcctcctgggttcaagtgattcttgtgcctcagctccccaagtagctgggattacaggcgcctgccaccacacccggctaatttttgtatttttagtagagatggggttttgccatgttggccaggctggtctcaaactcctgacctcagatgatctgcctgcctcggcctcccaaagtgctggattgcaggtgtgagccaccgtgcacggccctttttttttttttaatagagatgaagtctcaccatgttgtccaggctggtctcaaactcctgggctcaggcaatcctcccgtcttggcctcccaaagtgctgggattacaggcatgaaccactgtgcctggcccaatagtagcgatttctgtaaggctttatgattgtccccactcaagggtccacctcatgtccctccacttgcaacacactggcactccaaccatctggcttgccttgctctctccatccctcgatcttccctcccatccccctaccctgttaaattaatccctcctccccacctttcattccctggctgtgagctgggcttctctgagtcccattgtcctcgggcttccccttccccagccagatcccactattctggtcgtgggtctctcccactcatatccctaattccaggccccttgcagggtggcaggtaaatatgtatcaacttaaatgaataaggccgggtgcggtggctcgagcctgtaatcccagcactttggaaggctgaggtgggcagatcatgaggtcaagagatcgactatcctggccaacatggtgaaaccccatctctactaaaaatacaaaaattagctgggcgtggcagcgcatgcctgtaatcccggctacttgcgaggctgaggcaggacaatcgcttgaacccaagaggcagaggttgcagtgagctgagatcgcaccattgccctccagcccggcaacagaggtagactctgtctcaaaatcaatcaatcaatccatcaatcaatctcttcatcctggagctgggagctgctgcccctctggaaatattcatgtagttgtatacgcagagaaaagagaaaccaatagtgcctgggaaggtcaggaagctttctttgaggaggtgatgcagggagtgctagagggagaagaacagtgcggaagaatattgcaagaagatggaagagtacatgcaaaggtagggtggtaggtctgagaggcaggggtctggggaagggctagcgagaaaattaaggctgagagctgaagaaacaaaccccttgctttgcagctgagtcagctgaggtccagagtgggccaggagccagtcacagtcatcagtgaggtacatcgtgggcatctcagtttcttcatactcaggaatccaggagtcctttcaggagagttcattttgggggcagagggcagctgcctagccagggcctcacgagcaccagaggaggcatgacttgaccccatgcccaccaggcccagcaccgcttggactagaccataaaggacaatggaatgacatcagcagagttgagggtggcccctcagctggaatggagaagtggcagctgctggttcacccctactgccagaatagtcttggggctcaccacaggcagcacagcaggtccagcttggcctgagttcctatcgagcagtagccctgagcaggttgaggaatgaagaccctctcagtgggctgtgacatgcttgcctgcaggctctaggaaggggaagctgctagcacttccccaaaggcagtttcggggtgggtgtgcctgtccctgcccagagtccaggactaggtaggaccccacagggatgcccagagttcaggatcctgaccaccctacctccacggctcccagatgacagggagtccctggccaaggacctgtgaccaactcaatcacagccttgcagctactgcttgtagacctcgtggctacagcttgctcccgccttactgccctggggcaggttctacttcctggttcaactcctgcgctttccccttcctgcttcttagcccagtggaagttctgaaactggagtcagccatcctgccctccctccctgctcccttgcagacccctcttcccaggcctctcttcgtccaggaggaaaactcaaaagcctgggggtcctggatcccaaagtccccctttctggtcatccaccctcttcacagatcattggctttgacctggagaattcaggccccagcaccccttccccataagcttctggattaggcaagggggcccaacctgacacaggggtggcggctggggggcagtgcgggaggatccagaggaaggggtcatctgttcaaccactgttccctgaacatattgcctgccaatgtgctgagaaccctatggtaaaagaggcagctgggccctgtccttgaggaacacacaccaaacaaacagggaaatgaacttcaccatttcagaggaaatcaacagggtgacactagagccactgggaggtatgtgcaggagaagatagtctgaggaggggatctttgaatcatgtggaaggaccagtcttgtaacaagccagaagagagtgacgacagaggcagcagcaagtgcaagggccctgggttgggaaggagctggatgctcccaaaccagagaggagtccagccgggccagaatagcgagagcaagagaagactggtgtgagaggggactgccatgaggcatcatggaggaacaagccacacagggggttccaaagtctccaggggatgctgaggtaggggcaccaacatctccaagccagtgatccacacctagccctacaaacccaactggttctggcattcagggtgttcctgtatgactggggaggagctacccaagccctgcagggaactcaggagctctcagggctttggggccaaggcctaaacttaacctccctccttttctttgtccttgaagagttcatggtacaacctgccactgtgcctgttgcataggcagtctccaaaggccacctcccctgggaagcccagggtccttggggggcctgggaaatgataatcaattctattcccaggagctactgctttgttcatgttattgcctagtcctccttgccatgctttccaaaggctggggctggtagcctctcccgtgactcgttagggctgtcattagcactgcttcctggaatttaatttaatgaaggagcaaaaacagccctaatgaaggtgatgcaacagcaaacagccaagcaaggtgcaccttgccagctgggctcaggggcttcctgtagattgtgactaggagcaagggagtaataggggaggagggacctgttgcgggagggaagctggtcactgagttctggacgcacaagcatcgctctgcctgtaccgtatggagcaaatactgcgatcaaggccaagcagacagagttagggaagtgggccttgtcaggagtgacttcaggctgttggagaaaaagctttt

SEQ ID NO: 315710 - DNA, 4001 bp, Homo sapiens
cattccgccgcgtcgacacccactcactgccgctgccgcactcacagcagagacaggaagaggcaagcgcccaacgcaaagcagcccaggaggctgggccgccgccccttcccgccccttctcttcctccctgaggcagcagcgaagcggatgccattttgaaacctccaaggctgtgccccggaggccgggtccgcagggacagtcaacagatggcccataatggacatacatgctgttcctcggccacaggtccagcacgaaaagccctgcttttcacagcctgggagccctatgacagttctgaagtcgaggggccacacccccccatgcacttctcagcctacaacggtgctgcgctgttgcaagggcctccctccccccaactctaaaacccccaaatcaaaattagactgccactgggcaccacacctacttccagtgggaagctggatggggacagccagtaggcccaccgtctttgcaaaaggccagctgggatgctcagaggcaccctggcccacccccagctggcccctcaactcctcattcagctagtccaccatcccccttcacagggtcccaagatccaacaagccccccaactctcagaggctacatcccaggccttgcagcccagaaggggtgtgggcagcccagcacctactagcagatctcctgggctcacccgcaggggcagcaatatgtcggctgtctcaccacttccacttccccccactcctctagcagccaccatcttttctggccttggaggcggccacaaccctaactcctccactctctctcctacttcccagactggccttcgaaactggaaaacatagagcctccttgggaagcctgaggcctggccccctcccccagcgtgaccagtggagcctcaatccagccccgtgggggttctgcataaggcagcctaggccctctccaacccagggctcccgcctcctagcccagcccacttggtgcaggaagggtggagggatctggggaaggccagagtgtaagaggacttaggggaggatcagcagagggtttcgggagtgatgcctgcagagaaggatctggagggcaggaagcagggagcagggctcgctgaaggggttccagctggagatggggctcaagagcagtttcccactcgagaggttccttgggtcagagtgcacaggtggaggatacagattccagactagggatggggcacagaaggagaaggagggagtgggtggggggcctggcaggggccccgcgggatgctcatgcccaataggaataaaaggcgcaggtgaggaaaacaagcggagcctgagggttggggaacaagtggcgggcatcctgggggtttgggcaaagtgtagggaaggatggcggggctctgaagttctgtgaagctagttagcaaggggggatggccaagcagggcactggaccgcgggtgttggggcactgttgactggatttggaggtctggggtctgggatgagacaggggtctggtctagagtctgggcaggatcaaaggtctagtccaatctagagttttcaaccctggtcctggcccaggtgtggggtcccagacagcccgggtctgggagtttgaagccctagtctgggaggtcaaagtccttgtctggggattcgagctgggaatcaaggatcccagtgcgggacgcggcctcacccaacagcagcaacttcacctcccgcgccgccttctctccgtcctcccgcaggttcttgtcgatcatcttagagcgctcggccgccgccttgtcctcggcgctcacggtgcagcccatcccgccgtccgccggcccggccgccgcccggcccccacacggcccacggcccggctcggccccgcccgacccactccgctcccaccaccagccctctgcgggaagcactcgggtcggcagttccgagcgactgcgggaggcgccttccctaccgccgcgcaccgacggcggggcgggccgggggtggggcctgggcgaaccaagcctgtgactgggccggggcgggcttgcaggcggggccagaggagattagaggctgttgattggctcgagggcggagcgaagggggaagttaggcgcagcccaggctcgggcctgggctgcaggcggggccacgcggagaaaaggcaataggggtggttccaaaccccgggacccggcactgggcgggctgcaggcgggaccgggctgtgattgggtgcggagcgccgggagctctgttgctggacagccgggagggcggatctgttaacccgagggtggggatccggtgccctcgagggcagagcaggaaccagccctctgagcttctgcgagttgggcgagttaggtggaggaggcgtgtctttgtcatttgttaaagttaatgagtccagtaaacttgttttgggatctacgaactcgggagcctttctggactgcggttttctcagtcttaaggcgggtttaccgccttctccctctgggttgcagctagtcgaaaaaggaaaaaaaaaggccgggcgcagtggctcacgccagtaatcccagcactttaggaggccgaggcgggcagatcacttgaggtcaggagttctagaccagcctggccaacatggtgaaaccccatctctactaaaaatacaaaaattacccgggcgtggtcgtgggcgcctgtaatcccacctgctcaggaggctgaggcgggagaactgcttcaacccgggtggcggaggttgcagtgagccgagatcgcgccattcattgcactccagcttgggcgacagagcaagactccgtctcaaaaaaaaaaaaaaaaattggtttccatctttacacctttgcctaggctgtctcctttagctgggtggcttctcatatccatccttccccaatctaccgggaggcattcttcggcaggcagccatcctggactccaatctgggaccaggcaatcaggacccaagggagaaagggagagaggatgagagggtggagagggaggaagagaggagggcgggcaggcagggtgagggggttgggagggaagaaagaggaagaagttgccactggacttctagaaacaaaagtggccatgatcttatgacctgtctcttccatggcctgtccacgtctggaggtggccatgatcccacatcccaccctcctgtggcctgtccccactgggcaatggctgcaaccctatggccaggcaaaggtggggtggaagcagcagtgtttctagctgaacatttcaagtctttctgatcctgtgctccaggagcagcccagagccccaccctcgattggacatttgaagggtctgccaaaaattaaccacgaaggcattttgtgtgaccccagtgccatgaggctaggaggccccagcccaaagggaaggcccctgaagcaagacagggtgcttgccaccaacagcccggtgtttagcataaaccccttccttagaaccttggtacacattttggctgggcatggttgctcatgcctataatcccagcaactctgggaggctgaagcaggcagatctcttgaggtcaggagttcgagaccagcctgaccaacatggagaaaccctgtctctactaaaatacaaaaaattagcggggtgtggtggtgggcacatgtaatcccagctacttgggagactgaggcaggagaatcacttgaacccaggaggcggaggttgcagtgagctgagatcatgccattgcactctagcctgggcaagagtgaaactccatttcaaaaaaaaaaaaaaagaccgggcacggtggctcacgcctgtaatcccagtactgggaggccgaggcggcagatcacgaggtcaggagatggagaccatcctggctaacacggtgtattttgtactaaaaatacaaaaaattagccggcgtggtggcgggcgcctgtagtaccagctactcaggaggctgaggcaggagaatggtgtgaacccagg

SEQ ID NO: 315711 - DNA, 4001 bp, Homo sapiens
ggggcaggggtcagcaggggccagatcatcccggccatggggcaagaaagtttaaattgcattccaagtatgaaggaaacaactggagggtgttgaaggcagaatgacatcatctgaattttttttttttttttttttggagacggagtcttgctctgtcacccaggcttgagtgcagtggcgcgatcttggctcactgcagcctgtctcccaggctcaagcgattcccctgcctcagcctctgagtagctgggattacaaggcgcgcccccacgcccagctaatttttttgtatttttggtagagacggggttttgccatgttggccaggctggtctcaaactcctggcctcaggtgatccgcccacctcggcctcccagagtgctaggattacaggcgtgagctaccgtgcaccgtgcccggccaacatgatctgatttttaaagttccttctggttgctatgagtagtagaacctgaggataagagagatgggaggataggaggtgggcaccattcgagggaaatggagtgaagcctgtggagacagggctgtcccgtctccggggagaagagagctggtgagggggcggggagcaattataacgggagtgagtttttgtttcctccagcaggtttgggcgggctggtccccattcagccttccctccaaatgggcgtggctcagacacctaaagatcggtctaaaggggctcccaatgtccccgtatctgctttcccgcctttgtgcacctctctacctctaggaagccttccttgccctgtcctgggtcttggccagcggtgggctccccagggacctcaccaggacggcattttgcgaggtaaaaagccaggaggctcagcagtggaccgagagctgcgcagggtgcaaccttgcagggtgctacctgcccttggccctgcccaccgcagcccctccctaattcttattttcccccttgtccactcccagtgcaacctcctagttcttcacctcccccaggttctctcacccacgccccgcccaaggcgtcctcccccgattctggcctctcctgcagagccgaagccggaagcggcctcggggtgcgctgcaccgcctcttccggggcctctctaggccggagcgcgggatttcggtggccgggagaggccggaacggcttcgcggggcagcggcgcctcctggcgggcctggggtgcggcgcgggagccgaggccgacctagcacctccccgcgccccagcccccgcctcgcggcccccactcacggtggcccccgccttgcctgctctcctgtctcgctctgcctccgggcctggcccccgcctccgccgacctgccactccttggccgtcgaggcccggtctccgcagagctgcagccgtcacgcgtcctcttgcaactagccctctgtggcaccccatcccccttgccccgcgcggggccccacctcgccagggtctcctccgcgatagccgccatcggcttaccctcagaacgtccccagtgacacccgcctttctgcttcgtccagcctagcgtcttcacaccctccgtcatgagacgctccctccttctcgcgcttccacttcacagcagagattagacggtgatgtgggtgattctcccgctgggcacctcgcctgcttcctgagggcggagtagctccgcatcgcccatgccagcctagggccgctgcgccgtgggggctcggatgacttgctgagtttgatttcagagtcatcgggaggatagagaggaactgggtaaaatttgctctcagaggctcacgcctgtcatcccagcactctgggaggccaaggcgggcggatcacgaggtcaggagatcgagaccatcctggctaacacggtgaaaccccgtctctattaaaaatacaaaaaattagccgggcgcggtagcgggcgcctgtagtcccagctactcgggaggctgaggcaggagaatggcgtgaacccgggaggcggagcttgcagtgagccgagatcgcgccactgcactccggcctgggcgaaagagtgagactcagtctcaaaaaaaaaaaaaaaaatttctctcagaacacatagtcaatggcggacatagtcaatggcgggtctgggggtccggcctcttcctctactccgggcttcccccaaggtcaggcagtccgtggggggtctggctggctccctgcagtacacacctgcgccgatgcccagcgttgaggccctacccatcccgggggacctttcccctcccgcctcccgcccttctgtcggctttcttcccacggatctgccaggaagccttccaggactgtcctggagcatcaaggctcgaccgcacggccatgggtaccgaccatcccagccacacggctgggcaacgtgtggtgggtcaccgcgcagccagactccggctggtgaccgccaggggtcagcagaggcctccttttgcatagcttggcggattaggtcgctggctaatcctgtgtgtgtagccaggcggtttgtagacttgtgtggttggaaagtagttttatgctttcagatttttccagggctgctcttctttctaagcaaccttcagtcaattattactgctccgcgttgttggaaagtcagttgctgggtgactttaaactagggtccaggcagacatcttttttcttttcttttttttttggagacagggtcttgctctgtagcccaggctggaatgcaatggcgaactcggctcactgcaacctccgcctcccgggttgaagcgattctctggaggtgcctcagcctccagagtagctgggactacaggtgtgtgccaccatgaccggctaatttttgtatttttagtagagacagggttttgccatgttgccaggctggtcttgaactcctgaccttaagtgaatcccaaagtgctgggactacaggcatgagccaccacacctggcctaggcagacatctgaattgtcccctgggtctctccacggctccttgccatccttgcctgcgtcttggacccgctgtgtccctagccaccagcacttgaccaggcaggtcagtggccaagctgcacactccctgatgtccagacccccactatccaatctctgtctactgttttccagctcagtttccagcacccccatcctggaagtctttcactgagctcaaacctaccctcctaccagctgcttccattctctcacctcaataccttcttctttccagtctttcttcctcccacccacagacggagtctcactctgttgcccaggctggattgcagtggtgtgatctcggttcactgcagcctctgcctctcaggtttaagcaattctgcttcagcctcccgagtagctgggattacaggtgtgcgccatcacacctggctaatttttgtatttttagtagagacggggtttcaccatgttggccaggctgatctcaaactcctgacctcatgatccacccgcctcggcctcccaaagtgctggaattacaggcgtgagccaccgtgcccggccaactttccagtctttcttaaaagccactgttggctctgcccctctcacttcacacaagttgtttacactggctctttccagttctacctcactttctcctctgcccactccaggcaggcctgtccctccctcacaaaagtgccctggtcagggtccttagggatccacaggtgtccgaattcagtggtccatcctctaccctcaactccttggcagcatctgacacttacctggctccaggtgcccatgctctcccagttttcctctcacctcctggctactcccgcccagctcctttgctggttctgcctcatcttccagggctcagtgcttactgccgccctcctctgtctgaacttagcttcttcccatcccatggctttaaacaccacttgctttgcttcccagatccaaagcttcatcactggccactctactgaactcaacgcatacacccagcagttg

SEQ ID NO: 315712 - DNA, 4001 bp, Homo sapiens
gataccggagtccttccacagccgctggatgatgtccgacatctccttgggcatcgtgccctcctcgatagtgtctgccatgtgcatcagcttccgggcgtcgtcctgggggcagggtgagagtggctggtggcggccagggactcgggcccagccgcgagcctcgagtccccagaggcccgctcagcccgcctcctggcacacctggcgtgcagagtctccgtactggatgttgagtgtggtcatggcgcgtacgatggccaggatggactgcaacgtgttgccgtagatgatggcgataaactcgaggcactcttccagcgagtacccgtcctggtggataatcctgaggccgaggagagcagaatcagcgcctcgtggggaagtggggaaggacccagacccaggggcctcgggacaggcaggggcactcacttcatctgcttgacgatggtgctcttcccggactcaccggcacctgaaagagacgcggcgcctcagagctgcgctgaccagcctgccccctccagcaaggaggccaggaggacggggacctcccgagttggcagggtggacccgcagcgaagaggcctgagcgccagccccgaccccgtagccacacctacccccccatccaaattaagtcctgacatcctgaagtcacaaggtttgcaaatgccaggaaagtgaagaaaggaagccaacgaggggactcaacgacctcaactgttctgggacaggggagtccccaagaccccggcacaggcagcctttattatgctgtgagactgcaatgaagaaatcccggagcgtcatcgccacctcgtgggagcctctggtaccgcaagcactgggttatttgaggcgggtaaaccccttgcatttcacctgaaggggtgcaggtgtctccaggaggctcagagggaattagctcttttgggtaggagggagggcagagttgacatcctttctgagcttgcccctgcgagggcgttgggcacagttaatgagatttccggcttagcctctctgccttgggggaaagtgggactggcttggtccctcacccacctccagctggttgaccagaccctggggagcttgggtggagcccctcttgaagctgctttttccccttgagaggtcaggcagtgaccttgaggcaggcctggatcagccccatctctcctcagtgcccatggtccagtggacgcggctttatctactcccactgggcctcagtacccgccagcccctctggctgctttgtaggtctatcagccacagccctctggcacctgagggccattcgttgtggatctgggtggtcctagaggctccccactcccaggaggactatggccatccccttcccaaagtagcagcccaataacgggctcccagtgaggctcctggcttctgagcattgcctagcaggcgtatcaaaccaaaggctgcatgaagcttgcgggaacccagccacggaaaagtcggcatcacacacccgtgcaagagtgtggttggcacgcacttctggggagggtgggtcacctgaggcagagccgtctggagaggggctttgtgggatgtccagccctgggggactaggacaccacctgtcaggcctggccttgcttggccagggctcccaccctgtgccctactctgtcacaggctcatactgcttcccagggaatccttgcttcacagaagggctgcctgcctgcctccagaccaatgacctggtggcagtggccccacctgggcccacacccctacccagaagcagcagcttcacggttcgagcatccttctcagcgtcctctttcagcttcttttccagctccctggagtgcttctcctcagcactggccccagcccccatggtcccagcagcaggcgaagggacagagtgagcaggtggttcttctggatggaggggatccccagaacctggcctcccaggcacccttctggccccaggaggacctgcaatcaactggctctctacggacctgtgcaatccctggtggggctgcttagtgggatttgggggctaggggtgtccaagagccaatcagagacaaggacaggtgaatccagctcagcccccccaacccttctaatcgggctggcatagccccaatccctcaaccgctgactctgcactccggctgtccttctgtccccgcaaccctccaggagaggccctggcactgcctgggagtggggagacatgttcagtagggtcagggctgagaaaggggaaggcagaaccttgagccctgggggtgaggacaatggaggtggggctggcagtgagagggcataattgggagaaacatgcctgctgcctgcccggcaccaggctcagcaccactccttatcttgttgtaagctcacactggccctggagtatggatgcccatatcatcagcctcattttactgatgaggaagtaaaggctgaaagggtcacacagtaggaagtggttaagaagggctggtgactctggactgggattttatgacctgcagggaatccagagagagggaaacagtgggcattgcattcatcccatatcacaggctggagctgccccaaggaggtcctctgcttccagcggactgtggtgggcatgcatatctgctctgtgtgcctcggtgtatgtgtcttttttttttttttttctgagatggagtctcgctctgttgctcaggctggagtgcagtggcgcaatctcagctcactgcaagctccacctcccaggttcacgccattctcctgcctcagcctcctgagtagctgggacaacaggtgcccgccactacgtcgggctactttttttgtattttagtaaagacagggtttcaccgtgttagccaggatggtctcagtctcctgacctcgtgatctgcccgcctcggcctcccaaagtgctgggattacaggcatgagccaccgtgcctggccttttttttttttttttttttttttttttgagacagagtttcactctgttgccaggcttgagtgctgtgacacgatcttggctcactgcaaccttcaactccctggtttaagcttctcccacctcagcctcccaagtagctgggattacgggcatgtgccaccatacccagctaattttttgtgtatttttagtagagacggggtttcaccatgttggtcaggatggtctcgatctcctgaccttgtgatccacccacctcggcctcccaaagtgctgggattcaggtgtgagccacctcgcccggccatgggtgtgtcttttgctggcaccaagcgagcaataacttgacacatttgtgcatgaatacctgtgtgtacatgtgtgcctgcatgtttatgcctttgtgagtgcatgtgctcttataggaatcacgtgcctgtgcgcatgcttatgtatgtgtgcacatgtatacacatgtgtatgcatgtgtgaatatgctttgtgtattctcttcatgcacacataggcttgtgtgttttgcagtttgtgtaggtttgcatgtgtgcacttgcttatacgcaggggtgtaaacatgcctgtttgtacctgagcatatgtgtgcctgtgcatgtccatctctgcctgtgtatgactgtgtgtgtgcatgcatgcttgcaggcgcctgtgcctatatgtacacttgaatttgggtgcaacaaagtctctaatctgcagaagtggccaggctcttccagagaatgttttgcaggcctgttgccaggtggagaaattgcatcccagagcaggtgtagtgttccctggggtatggaggaatggggctcacctatcctgctcctgctctgtctgctgtgggtgctctgaggcctgcctaagattatctccagggcctgcctgcctcagcttagggggtctggtgctctgttcaggtgcagggctcactgccgggcagaaattgttcaggttgagctcccaggttctagagacttcccaccctcaacttccatag

SEQ ID NO: 315713 - DNA, 4001 bp, Homo sapiens
cactgccaagttacttaaaacctcacagacaatttccttacctgtggaagtagataatggtgttactgtgagatataagtagaataacttacagcactgccccagcccagaagagatattttaataaataagtccataacagacgcagattaaaatagtcagcaaggtaaagaaactgatgatacagccagctgacttcaataacatgcctaagagaaatcacaccatctcaggcagtatttggtaaggccagaagaatgtccaacacttagttccaattcttaattttcaaattgccccagagtctatttttaaagtgtaaaagtatgtgctgacatacttacatgccaattgtttaaaagaaacaattctacaggttaacaaaggccaaagactcggaataacttcctaaataatgtttatgggcccacaaagagttgaaccaacctaaaatatcacaagctgtatcaatcagttttataaatgtatatacagagggttgacaacgttcaataagatgatattttaaaagtttctatttcagtttcaaattcatctacaaaccaaaatgcaacatggaaaatcttaaaatgtctttaagccacatactgaaatatacagtaaattttcagagcctaggatcagtagtaaaccaaaagccccaaactgaagagtattaaaatgaacaatggcagagactcgaagcacacaattttgaatgcacctaatcagccgtcctcctctccgactagaaataacttccctcccatcttaaattaagtagcgtgtgttctgtctctgtcctagaagatgtacttaatggtcataaactctgtttgcaacactgagacggactcataataaaagttctaatcaacaattaaattttgaacgttttaagaaaacttcccgctaagccacacgccaagctactttgtcggtggctgagagggagaaagatgcatccttatcctttatggaaagagaaagggaaggagtgggagaaaagggaacacaaggagacgaaaaataacaaagtattgcttgtataaacaaatgaaagcctggtttcaaacttttgaaaattcaacgttcccttagcgaatagcaatacatatcaaagtatatggcaatcatctgtgttctgaagcagaaaaaggtggagagaaaagcaaaacactttttattgtactgaactcacaagtattcaaaattcatcaatcccctcccatccccaaactctggacattatatcatttccaaaataaatctgaaacaaaaccattggactaattttggactcagcgtagaacttttatgagtcttccaagcactctccacccaacagccctgctgggcagtcccgaatacccgttattttgggggcacgcacgggctcgtgctctgagttcctggaaggaggcctcggggagtgacgagaaaccaggggggtctgcaggacttggaccgccgaccgttcctcgctccccggggcgagcggtctggaccgcccgggaagtgcctgcgccggcggtcgtggggccagttcccgcgtggcagctgggcgcgacacaggcgcgccctcctcgtccctcccgggcagcgtcggccgcccgagcccggggagacccgccccgccccgcgccgtcacccgggccccgttccgcaggggtggctcgcggcgccccacgtccctgcgagaagcccgggatcgcttcgcggggcgcaccgacgagccgccgctcgcgagctcgccgcctacctggagggagctcaggcccgcgtcgaccgcgcgctgccggtgtccgctgggcgctcagcagcccctggagcgcggagccggcgtggagagcgcagctcacagccgagaccagagccgccggccacacccagtcccgcacctcccagcagccaactccgcggcgcgccggagccggggcggggacgtggctggaggcgcgaggcgcgaggcacgaggcgcgcgggcccggcggggacgtgccggggacgcgcagaccctcggagcgcgcgcagcccgggcggggggcgaagggagcgggcgccgcgcgcagcttctgcttcctattttctctctcgtttcctgccagaaggagaagaaaaacattcattcccgggcagtttcgttttcttgttggtgtggcgccggggcacgctgctaagtagcgcccgtctaagtggcgtggccagtttcctttccggcgctgacaggcgccagtttgcttgttagcaggatcgaagggcagagctagaagaccccaaaggccccatttaggtttcccattctggaattctaaatgtcagaaagtaaactgaagcccagagttgcacaaccttgcgttgcagtccccgctcttccatcactagttgtaggaccgtgtaccgtctcgggcctaagtttcgtcatcgccaaaataaagatactgatacctgcctcataaaggtgctaagcatattaaatgaagtgatgtttgcacgaagcctgcctccaaataaatggccaatacttggaagttattgttcctattgtcattgataaaactggaaggccttccagatatccctgccaagtcgctcttctctgcatgagttaaacaccacatgcatctcaatcgagtttttttttttttcacatttatctgggtgttttatgtttaaaatgtcataaaataaatgcatctatccaatttgcttcctctgaagtcagtaccgcctgggagcatttttcctctccccacccccatttttcttctgagttaattccagtttgacagactgttgctatagcattccttctctgacgtcaaacaatttaaagaaacagccctgggtagcgaaaactgcagaggagttctttgtggagtttctgtgccggagaaatgttcgaacaatatcatcagataactttaacaacccctcagccttccaatcctccttctgtagctgcttcccactatcacctggaataaatctattagtcccttgaaagaggtgatgccatgataaacacaccctgtttgtgactgtggggaaaatgtgaccgttttgtataaaagccaggccgtgacaaaaatagaagcagctgtttctattttctttatccacagataaagaaactgtggataatttttcccccaaaattttcatttttactaatattaggagcatttttccattaagaagaaagaaatgccaaatattctgcatatcaaagtgtcagaagagctcgttgggacatgagtgttttgcatctgtaactatttatgttttaatgattaaatcctgagttttatgattgtcgtttttcggaggaagcaaagggaaattgttaaagagtgcctattacggaccatgctctctgctttcttatactgtacttaatcctcataattaccttgaagtgtgaattttatccccattttacagataagcaaactgatgccctggtaagattaatttatcggagtcacgaaggtattggtagagccctgcatgacatcagattggatcaactccaaagcccacattctttcttttttttgtttgtttttttgttttgagacggagtcactgtgcagtgatgtgatgtcagctcactgcaacctccacctccaggattcaagcgattctcgtgtctcagcctcccaagtctgggattacaggcacaagccaccacgcccggctgattttttgtatttttagtagacacggggtttcaccgtgttgaccaggctggtctcaatctgctgacctcaggtgatccgcccacctcggcctcccaaagtgctggaattacaggcgtgagccaccgatcccggccccatattctttctttagattcttttctgccttgttcctgtgcactagcatttaccagatgttataaagctttgagagctggttgttgggttaagattatttgttgaaaaacaagttgctggtatttaggaaaacacagtgggaagcaatgagatagtctattc

SEQ ID NO: 315714 - DNA, 4001 bp, Homo sapiens
atctctcagccaggcacaacagcccacacctgtaataccagaaacttcgggaggctgagttgggtggatcacttgagaccagccttggcaatatagtgaaagcccgtgtctgctaaaaaaaattagccaggcgtgatggtgtgcttctgtagtcccagctacttggagactgaggtggtaagactgcttgagcctgggtggtccaggttgcagtgagttgtgattgtgccactgcactcaggcccaagcaaaaaaaccaaaatcaaaacccctgatctctcattcataaagagacctaatcataccttttccataggttccacatttgatggcttaatatcaggattagtttcaagttttcttttcttttctagttccttctgcctgtcaagtttctgctgctgttttagttcttcaagctgtcagagccataagggaaataggtgaaccagtgactagtgttgttaccttactctgaaaaatatcacacataacacactacaccactcaatgaaaattctggctaacataacttaccctctgtttccttagctcagcttccctaagaagagcctccttaaagggagcactgtttggaactcctgggtctttcctaggcttcttgtgaccccgctttttagcctcctttcttaattttcgatgatgttctcgaacctattaaaataaagagattttgtctgcttacaaaaatatctttatacttaagcagaattcaagtgagaaaccaatctggctgcaatttagttatgcctataaaatgtcctaggaaaatggagctttaattggaatcttacaaagtaatgcatatgtaagtataaaacagcaagaaattgtaactagaaggctctctatgcagagattaacatgctgaacaaatttagagacttatcaccaaatcactgcactttctcacagctgcactcctgatgcctaagagcttgtgcccatggtcagtctatccaatgccatttcccaaaaccaaatcacattaacccagactttcccgcaaaggaacagggcaaaatcagtttagcaatgtgtttggtacagctctctcaagcactacacttacctttttttggattttataccgcttatggcaggtcatgcgtttacttgctttctttaactctacaaagaaacacatcacaaatctgttaacccaaatgattagttctgggttaacgcactatggagttatatccttttcttgtgttattggctaccaaacctaacgttaagtctaatgcgaaatgcctaatgcaaacatacgtgctactttcaaatcccagagaattaaattcagtagatccagaatggagtcaaaattccctgcacttaccctcacaatattagaatgggatcatacacaacagcgtatgagacacaaaacgacaaccacttcgtgtcaaacagcacgaatcataaggcaggagaggaacactgagtctgggaggcgattctcagctctcacctgggccagtctgcacgtggccacggaaagaaaatattgggcctcaaacctggctcagacgctgcttccttacgaaaatctagcctagtcttccccaccctctgcccggcttcgttccgcagaatgagcccgcgcggttaacatgatcgccgtagggacttccaactctcggttctaccaggaaatagggccaaggcctacgcgtaggctcccacccccataccagcagagacaaagccgtagccgtagaagagcgtcgtggtggctgcagcaacttccagacgtgggtccctccacgcccgcctcccgaccccacttactaggccttttcatattggctgtagaaggaagcacaaacacatcaacctgcctccgctggcgccacgtgtgaactgaagccactgacgagcgtcacgcacttacgctgccgccgtaaagtgcgtcaccgcctctctgcgtgcgcgggcacgcagtgtcgcgcggagcagggatcgcttggcggccgcgggactggttttgcggcggcaccgggaggggtaagggaggtgagggcggcgggtgccgaagcgacggcagcggccgcggccggaggagcaatagcagcagccgtggcggccacggggcggggcgcggcggtcggtgaccgcggccggggctgcaggcggcggagcggctgggtaaggccgggcccagggcgggtggggccgctcccccttggtcagctgccgggcctttgtgtgggcccgggcgggcgggagccgcggcggaagccccgccccggccgtggggacgcgcgggtcgggccgggcgcgcggggttgggcggggcgcggcggctggcctccggatgggcccagtagccttgtcgcacctgccggcagggacaaaggcgcactacgggtcggaaactccccgcgctcctctttcccgctcgtcgcggggcagcttcaaagctgtcaacgtttccctcagtccccaataccagtgacaggtcgggaaagtccttcatttcctccgttgctcagggcctcttttttttgttgtggtttcttgacggttcgacacaaactcttagtgattttctttccgtattttttccgggtattttaatcaatgggacttgtatttatagtagaggccagatatttcagcttctcaacaccacaaagaatccgggattttgggaactgtgtatatttcttggtttggggaagcacagttttgttattataataagttttaatttaaaggggaagaaagagttgcaaaaatatagaaaaagccctgaaaaataagtacacggtatagtggatatagaaattcttacaataattatagaagcgtatgttggggtgaattgttttaattaacttactttccaacacaggattcttgacaaataattttaggtattatttttttctccatttggctatgtgcttttccccaaaaagtgcaaattggactcatgcacataaaagagtagcataatttttgctttattacttacaggtcgcccatatttgattttgagctccaaaatggaagattggaaaatatgttttgaagaggtgtttcaaattaaaacaataaagagtttatgtgtggatgaatggaagggccttgaccgctttctttggctttgggaatgtacaaaatacctcaaatgttaatatcctaccaaaattcccaagataagtaaattgtggtgtatctatatgatagattactatcaagtcatcaaacatcatgaggaagaatgttgacttggaagaaccttcactaaaacacaggctgtagaataatatatgtggtttgttaacattttggtaaaaaataataggtaactaaggcataaataccaaaaaccgaatgacaacgttaagagtggtttttttcttggaagtaggtttataggtgttttttttcctttgagtcctgttttccaagattttgttttaaacatgtattgtattgctaaatattactagaaatataggagagggctaaagttcataaacggtcgaaatacactgtttgtctatagtaagtcgatattctcccagttgcacattattaagtattcttaactgtccactataaattattgattgttagacttttgaacttgtaactgtaatcaaggccattttaaaacttggcattgaactctggaatctgtctttcctcttcatggaaagacaaaattgctgaagggatgcttacaggcattttttttttttttttttttttttttttgagacaaggtctgactttgttgcccaggctggagttcagtaaagtgatcatggctcactgaagccttgtgctcctaggctcaagcagtcctctcacctcagcatcccaagtagctgggattactgatgtgcagcaccacacccagctaattttaatttttgtagagaaaagatcaatctatgttatccagtctggtcttgaactctctgcctcaagcggtcatcctgcctcagcctctccaagtgctg

SEQ ID NO: 315715 - DNA, 4001 bp, Homo sapiens
tgactttttatggctgcataataacctatgaagcataactaattgcctgataaaatttaaccaattctctattgttggacatttttggctagtttttaacctattaaaacaacattgacgtgaaaatccatagagctaaatctttaatacaacctaaattttcttagaataaatttctagaaatggaatcctggctcaattacattttatacattcccaagtggaagtgccttacattcactaacatgcccatttcctcacattcctcatctctacctcacttttaaagtttatctttgtttcttaattaacagtgttttgtaaaattgtaaatgactgcaatagatggtatgaaaaggacaatctttaccatttaaattttaattaccatttgcacttgagaaaagaagcaacccttcagtgttgtgttctgatgtttttctcaagcactgttttactacacatgagctttacatttaaaaagaacaacttcaatttatagtttcagaataaacctaatgcaatcgttgtatgttaagaatttagaaatgcctccaagttagtcaaaactcagcttttcttgcaaccgcaagcaaagaccaaaaaccctaaaattaagggacagatctgctcagtctgttgaaattcaaaaaggctgggaagaaattaagcagaaaccgacgtcttcgctgttaagaccctgtgctgccagcatcgaaacatctccagtgaacgcttaggaaattgtttctttaaattaatactacttaacacgcctccttttccctggaaacgcatttcctaaagcaacagcattcctgaaaaacaagcataaccctgtccgcagagcagcaagacttaaaaagcagagcagagctccggacaggcagagtgtctgcccctccgcccgccagtcccggattaaccaagttatgcgaagtgactaactcgtgacagcctcgggcgctggacgccggccacgccgccacgtctttcaggtcccaccgctcctaccagcagcctgacccaggatggctctactccccagccttcaatccctggacctgggtttggaattaggagacttccgtcgagggtcaattgtgcgggatcctggccattccatacaaaatctcacgactggcaaaagagagggggacccctcgagcagaggtcagatatcacaagggacccgggtttttccaccccgccctcattcccagcgtggggtctcagatgagtgggaaaacctcaaatatggatcagaaatcatgcaagttcggactctggccttaggagaaaactcttaacggagatggaatgtcacgagggatccagccacccccatccactcattgactggatgaagttttgcgatgggaaaatccaggtcaggagttacggacgacctgcaccgcccggagctccttctgggtccggagtttgggaaaagtgcgggttaggggttaaaggtcacggaagaacttccccactccccccgcctctttcgtccgcgggccggttcaagaggtattcggaaccaggggaggagagcggcggccatcgtacctgagcaggagccagcgcctgctggagctgctgctgctcctcgctgatcttttgcttcagtttcttgaacatggcgcagcgtacgtacggtcctgagtgtcaacgaaacctgaagggcgagagcccggggagtcccggccgcgacggctacggcgacttctttacaccagggacagcgggggccgggcctcgccgtctcctccttgaggctgtgggcaagtccggacactcgtcctgagggtgtcggcgtcgccgccgccgcgtctctttcttccgggtgccactggctggcctcggccccccatccagccccgggagccgcggcggcgacgacaacggcagcaggtgaactgtgcgccaagggcgcttgcgcggcctacgtggagctcacagaggctaactacggagcaccggatgggacaagcacaatgtcgggtcccgcacatgcgcgctcggccggtcgcttccgaactcgctgcactggaggacgcaaggttcggtcctgcctgatttcgttgcgtgcggagaccgccgtcgcggctcagaaccggagcgtgggctagtctgaacactaccctgactctcacctgggctttggccctgcgaaatcagacggggagagtgctgcttctatcgatggcagcagggccgacgggcccaccgcaaagaacacagggatgagcgtcaaggatgggagaaggggagatccagagaacctgacgcgggccctaattgatagtgttcttttctttagtagctgtagctaggattctgtgtcttcggtgccagaggggcccgcttcccttccctgaactcttccagcgtcgggaagtccctgataccaggcgccaggggtccaaatgttttatgccaatactgtaaaacctcaagtgtttggacacctgctttattcttttcttcaccgaaatcgtgtatttcacgaattcattcaaaaacctttatcaggccttggagatgttaaaagaatttacagcctagtggaagacacagattcctaattagtccaaatttactcctaacacctgcaatcatcctacaagatcttaatgtttatgtgcctcatttatctaaaaccctgaactttggctgcctgtgaatcctcaggtccatttcagcaacccacttttgcatgctgtacctttgatatcatctgaaactgcttacattgtctccggtatcagaatctaacagtatatgctgatctccacgttctagcaaattttgtttaccagcaataataggagcaacctgctctcgagagtccatattctgatccctaaatgtattagagccacagtggggcctggaacactgccttaacacctgggctaagtcctcttatatctcgtagtgaacaccttatgtatgtaaggtgtccccagcccccgggccacaaacgggtaccagcccatggcctgttaggaaccgggctacacagcaagaagtgaatctctggcaagccagggaagcttaatctgtatttacagctgctccccatggttcacattatcgtctgagctccacctcctgtcagatcagctgtggcatgagattctcataggagctggaactactgtgaactaggcatgagagggatctaggttatgctccttatgagaatctaatgcctgatgatctgtcactgtctcccatcacccccagatgggaccatctagttgcaggaaaataagctcagggctcccaccgattctacattatggtgagttgtgtaattgtttcattatatattacaatgcaataataatagaaataaagggcacaataaatataatgcacttgaatcgtccaaaaccatccttccccatccacctagcccccacccccaggaaaaaattgtcttccatgaaacaggtccctggcacccaaaagattggggaccactgccttatatagttactgagagttttttctgggcttttttgttttgttttgttttgtttttcaggagtacttaactctcagccgggtacagtggctcatatctgtaatcccagcactttaggaggccgaggcggacagatcatttgaggtcaggagttcgagaccagcctggccatcgtggtgaaacccggtctccactaaaaatacaaaaattagctgggtctggtggtacatgcctgtaatccaagctaatcgggagattgaggcaggagaattgcttgaacccaggaggcggaggctgcagtgagctgaggtcgtgccactaccctccaacctgggagacagagtgagactccatctcaaaataaaaataaaaagagtacttaactctcaactgacggaagttcaataggccttcaactgctttcagctccagatgcccaatatacatcttccccccaattttcacaattttgcatcaaagtttgtcaattttatatgtatacata

SEQ ID NO: 315716 - DNA, 4001 bp, Homo sapiens
tggagatgggtagatcagtagatagaaaagaaaaagactttttttacattgtatccttctgtattaaatttccttttatcaaaagcatatagctgattttaaaatagcttaattaaaaatacagcaatatagagcttagtctccttttacataatggtttctaaccacagactggtatgtaatgatcagtggtattcctaatagtaattaacctagagaaattaatgaatgatttattttataaacaaggataaagtcaacatccctttaattaatccattaatcaaagggagaaaaagaaagggggcctataaaactcaagcagaaggttgaaaaaaatcttctaaagatcatgtttaagaaaggctgcatcccagagtctggatgccagaaatgccaacgaccttcttgaaaaacaaggaagtatctttacgtgattgtcaaattgggttgggaggtcccaaggtgtggacaaggctttttaaaaacttcattcttttacgtttatacttttgcatatttcatattatacacaacatatttacagtggtagtcatacactataaataattaaacacacaacatttggggagatgcatgctcaaaaatgttttactgatagggagtgcaattaaaaggtttggaagctgctgaggtagtaaaaaatattgatgcagtgaaaagaaaaacattaaatggtcattctgtggtcaagggatgagaagtaaaagctatgaagcagttaatgtacaatgcctgcaacttttgagtactcttcaactttttcctgcatctattccaaaaccaaatcctgccatttttccaataggatatttcctgagtttgccccttcataaccattctgaccatctaaatcttatcaattcacgcttttggaaaggcctctggcccttatgtaaagagccctccacttgcttgcatcttgcacagaactgtaaaaaggtcctttaaatgctcagacagcttccaactatctccaaaagtgaaagtacttacccatgattgtaaatatccctgtcccactctcaaactgtccgctccccatagaccaactggagctctttaaataagtcagacaaatatattcctcattcctcaaaggactcaccctccctttcacattccggttgtgcagattaaacatactccacaccatcaaaccaagttatttttcctcgagaactctcttagaggttcctttttctctaacagcctgcccacctctgattcctgggattttcgtgttgacgggatcgttgggatctttcctctcttctcatctttccagtaacccattagcattagcaggattattggacaggcctccgtttgcattaatatctccaatgattctgtgatctccgccctaaagacctttgatttcttttggtcgcgcctccccttcgggacaccaagtttgtttagggcctgagcacaggggcccagcaggttctttccgacgtcagcggctgcgtacggaggccgacttaggcaggccgctccaggaacaaggccgtgcggacaggactgacctaggcgcttttccccgtcgctcccagaggagaaacgtaccggggaggggacagaccgtgagcaagtggtccaagtctgcgcagggtgaccccgaaggcccaccggagaggccgaggcttgtgggctactagaactaggcctggtaggtgaaggaggcgggtgaagggccggatccaggactgaatccgggagaggcggggcgaggaggggactccggtgtagctgcttgggcagctcccgcggcccctctggcgggggtgaccgttattggactcgcagagggaagagttgggtagcgtcccctactcacctagaagcgctgccgcctgaggctccagctgcccccctcccaattcaagccacgtcagctcgggaagcccgtacgcgacaccttccaccgccgcgccccgccagggactcagccactagcagttgggacggaagatgggattaagacaccgaccaatcaggactatcggcaggacgttaccagggagaccaggcacaccttgtttgttaccaacctatcaacaatgacggaaaccaatcaacgacagaagatgctccgcttcctcaaagaaacagccaatggaccctaaagagtgaatgaggggagtgattagacgcgagtaggtgccccggaacaagatctggggagggacaggaagtgtcgagtgggcgggcgttctgggaaaggtcagatgttctcagtgtgaagtggttatgctggcttcctccaattcctcctcttcgtcggttgtgactgaccgagacagcggcttgggcttcggcagagacttgagactgcgggcacccgctgccattaggattgttgaatgagctgtgagaagggagtgggggatatgggactcttagattgaaaaaatactggagcctcttagttgttcgtctagtttcaccttttgattttgttgatgaaaaataattaaccacagaagtaacttgcccaaagtcaaacagcgacttagtgatggaactcggactagaacccggtgtcagtatgaaagaggatcagcaatgtctgtaaggacatgattgtgagagagagagtagtgaatactaggaaggtgcctcttacaaagtggagcctaagccaggacctaagcaaagattgagagttgagggctcaggctctgcaatgagtgtcagtgaggagctccagcaaaagactgaaatcactcatgctttccttaaacccctaaggaaagggaaggaaagtagccagtttccaatgagctgtcatttcaggcactctcttggcaataagagtaatgttagtttgaatttattgaatcttgctgtgcactcagctggcccattgtatgtatactcatcttaatgattacataacttcacaattcaaacatcagctaagtaaggcctttcctggctgcccatcttacggaactggaggtcattattctaagtgaaataagtctggcacagaaagacaaatatcccatggtctcactcatgtgggagcttaaaaagttgatctcatggagtagagataagtaccagaggctgggaaggtggagttgggggagggagggaagagattggttaatgggtacaaacgtagatagaaggaataagttcaagtgtttgatagcacagtagggtgactatagttaacaatatgttatatatttcaaaataactaggagattagaaatgttccaaacacaaaaatgataaatgtttgaggtgatagatatcctaaacaccctgatttgatcattacacattgtatgcatatatcaaactaccacaccccataaatatgtacaaatatgtatcaatacaaacataaataaaattgcaatttcctgcatgcactatatacttcttctttgcttctttttcccctaagcattttgccatctaaagtactatatatttcatttatctggtatctctcttctcattagattataagctccaggaaggtagtaattttgatctcagctttatctccaggtcccagaaaagtatagaggagggcactcaatatctgttaaattaataaagtatatatgattatccttatcttaaatgtgagacaataagacttcagaaggttaaataatttgcacaaggtcacatggtgaggggcagagacagaatttgaatgctgcagtacttaatgaatacatcatattcttatatccctgattgtatccacccagcaaagtcctaaacctgcatcagtccaaccattggtctctacttctacctttggggagcaaaatgctgcaggagacatcaggacaatgtcatcagtgacatcaatgtcctgaccactgcacattcagtttccagctgaactccatcttcagcacactcccaaatccttcttgtcttcagcttcctctcctatttgccacaattattcaaacctttaacatcctctttaagtcccaacc

SEQ ID NO: 315717 - DNA, 4001 bp, Homo sapiens
aacaaatatccatattctcataccaacaataactcatgggtaaatttcaatgagtttaaagaaaattttgtgaacctaagagcgtatcaaaacgggttttacttttgaaccaagccgagccatatattttcattgcctgtggctatgcagcgtcagtaagctaaaaatacttttctttcttctaagttgggaagagcaagttaagtccaaacaatcggatgtgtatcattttctctcatcttaaattttttactagaaaacactcaaaataactgaagcaaagaagaggcatctgtttcatatctgcacacacatacacagaaacatccctctagcttgcatctatctacctagcaatattaaacaagctatatttgcatcatcagcaaagtctgccaacatttcaccacttacagctatttattattattttttggttggggagaaagctgcataagtattgaaaactaaccacaagtaaaagcttgcaaaaaaaatatgtataggatacgtccttaacaagaggacatggtgctgactttgaatttacgttaaaagtaaattcaaattcaaattctgaatttacatttaaagtaaattatgtttgtgaaaattacattaaattagattctaaaataggatagaaactttaagttcttctacaggtcttgctcaagttgggtttgctgtgcatggcaaagtgaaaacctgtgtttctcctctttggcttcccgaagctaactgtaacatacatgcatctctgtgatgaagtaaaagctacttaggaagacaagtaaacctgtttttaaagaaataaactactgcaggatggtgaatggtatgtagtgtggacttttcccacacatccagcatctctaaagacatcctattaaattaaaagaataagaaataagaaactagcaggtccagatctaggttccttccattcgactgggccatgactttaattaagctgctgggtcatggcttaattttcccttgaaaaacagcacagtttgagaaatctctgccaaactcttcattttttaagcaactgacaaagtcaacaagaaagcaaatacctagaatccacggaacaatgctcctcagagcagggctggcagaagcggcggagggctaccagtttccctgccccgattgcagctgggcctttgacaagagctcgggtaaaggactatctgtgcacccgcccaccaaacgcccagcgggacgatgggctggtgctacgaagttctaaacctaaccgctgggaggaagaagcgggaggatgagaatgtcatctcccctgacactctggtgccggcagtcctgaaacgctcacctctgacgtccctgaaggtcagaggtggcaaccacagtgccaatagctcaccaaagccacttttcctgcccgggtggaggcgcggggcaaagttggccaccggctgcgcgcgtcccgttagccgtaccttgtaactgggcggagagggactcctggtgctgctggtacttgagcgccaccgcctcggctttccgcagctgcgtctgcagctcgtagtagagcatcgcgccgtagagaaagccgaacacgacggtcagcagcagcagcgtctggaaaatccgcttctgctttcgggagcacatcccgtttcccatagtcccgcctggacccaaagccgcggccgcccccgccgtctcctccccttggtccgagcgagcgtctcagcagcggccgccgcagtaggtggccagacgcagcatgaggaggagatgccagacacaaaagccggcccggaggggaagtggcgcccgctcagcccccgcgcggcgcggggcgcgcagccatcgacgccgcccgggcagctgcagccaaacttctgcgaggctcgttctccgcgaatgcccggggccgggaggaggccctccgcatacttcagagccggctgccctcgcgcctgtccccagatgcctcctgccttttttccttcttcccactttttggccccgctgcccccgggcagttcttggagtcccgccctggccactccccgccctatcgcggcggctcccactgcacgactttgttgccacctaagggagggggtgcgcgcccaacaaagggaccaggactccgggccgcgcccccgtgcggcctgcccaatgggtggaagggtgggggccagctgtctcggctggttttggggacggcacagcggtgtcactgacgggtcggctggtgcctctgccgccccgccacctcctgcccaacttacgtgtcacccacggcccggctattctggccaacgggattccgggaggaagtcccactcggcctccttgctcattgggcccgtccgagcagacgctccctcccttcggggaggcagtgccgggctcgattggatgccggctttgtccgtccgaccccagggccgcaccttccctcccagtgccggggccggctaggggctctgtgggcagcgcggccgcctggcgccggggtgcgcccacgtggagtcggagagggtgggaagaggcaggcggaagggcgaagggcggggagctttgggtgggcgggggacttgtccgggcctgagtctgggtgaggttcggtgaacacgtgtgtgtgtgtgtgtgtgtgtgtgtgtgtgttccagttctcgttcggaacgcacgtggagagcggagtaaaatgtgtgtatgaacgaaagaatggatggcagtaactgtgtgcactctgctgagtacactttctttccctgtccaataaactgatgcggcagacacatgggatagctacatagcacaatcccggtagtcaaaccagagatgccatgtcgactgccttaccccatccagtgtactagcctagatgtgtgtgtgcccacagatggcccggcaggagtcgggagactggaagcacgctagacttaatgttcaattgtccacgtgggctggggaaatcggcttgccattggcagagaggaaagaaatggtctcacatttctcctctagctgcaaatagaataatttaaaaacaaatcgtacagactgaaatgagtatccattcattttgtcatatgtatttgttttattggtggcaaaacacatcagttacatttctaaattacattttaaagggcaacaaaggttccctatgtaaaaactagtacagcacaggaaaggtagtaaccacaaacctcttcgaagaaatgtatactgcatttattttttctgtgtacttgaggggaataattaaggttatgcacaaatgataatttttgtttctgctgttgacctgaattctaagaaaagtaaattttatctgtctgtatagtgtggtgtaatttatgatacactgcataatttttatattctaactggactttagtcgttaccattgctaatgggcctgagtgctcaaaatgggggtaaatctctttagctaaatgcaacagaaagacagttcctggtgcaaaagtttttttaggtggactctgaaattataggttgctaaagccctaaaataaactgaatttataacgatgctaccctgtggcatttataccactgtaaaaataaagtgtgtcttgcatgtgcttttccttaataaataataacttgcgttaaattattcaaaatgctttcgtgtgcagatacactgtctcactgatcacagccagggtgttagactttcatgttggtaaagaagccaaagtttatcaaagtgactatgacagctctaggaccttttaggtcttgcataaagttagttactcagcaagattagaatccagatccaaaccctgctctatgtctttttcttcaatagaaacaatgttctcattctattaaacaagttacagtaagaaattatatctccattaacatgagaatctgattgtaaaagaaaacagtctaaaggagtttgggagttttgttgtgtaaatactacataatcttccttattattaaatctaccactttaaattcctcttttt

SEQ ID NO: 315718 - DNA, 4001 bp, Homo sapiens
gcacaagctggtccttctgcctggaatactactattcccctaaatatctgtattgtccactctttacttccttcagaagcatctgttcgaatgtgacttgagaagaggcccttcctgaccactctatcaaaaatagcacccactcaccattctgtatccccttaacctgctttatttttatcactggtaattaccacctaccatgtattttttcatttcccttctttccctaccatcatccaaatgtcagctccagaacagggaccatgtttgttctgttcactgctttatctctagagccttagaattctgcctgccagagtaggagctcaaaactttgtttttgtgactgacaacctctgatccctggtccctctccaatttgtccctctccatcaggcaggcccctcccgtcttcgaagctcccatcatcgccccacccctcctcttgccaatatcctgagttcctttgcctttaatcaaacctgttggaagacgctcctggctggatgcattccactgtccacgcttgctgtttggtgtctcaccataagaaagcccattcccaagcacaaatcctgtcaactctgggttctccaagccagcctggttttcacgttaagaaacttttagccctctcatgtggttagctggcaacagaccctaccttcaaaacacacaaaccgacaagcttgcctgtctccactcatctctgcatccagctgcctttcactagggaaagggggggtgcagggacgcctcttccccgcagcgctccggggtcagagacccccagcccctctcacctacattatagcccttccctcaccgcaggcacaaatctccatccggctgcgggaccctctcctcaccctcacagcacactccgttctaggaaccccactccgtctccactctccggaagcctgctcgcccagacctccatgtagcggcatctaaaggctgggaccctccccagctgcaaacgctctcctcgaggattctgcagcactctcccggccctcccgctccccactatcccgtggctggtttgcaccggtcctctaccctcggaagcccttacgaccctacgactggcaggacgcgcgccgacgggctcccccgcagctgcgtccactcggttaaccccggcccccgggactgtcctcggcgtggctgactctcttcccaggcccagcacggagagcggcccgcggcaggcgagcgtaaatgtgtgctaagtgcacgagtgcgtcccgactggtagtggtgcattcttcacccgggaggagcgccattcccggcggccggaccaggaaaacgctccgcttccggcactgctggcacttggggcgggcgctgggcccgaccgcggccgcggactagccagggtccgggagtcccgcgaggccgcctctcccaggaggctcccaccgggcagggggcacctcccgccacccaggcggaaacactcgggccgggaccccgccgcagtcgccagccagccggcgaccggacgcccgggcgcggggttgcgggcgcctcgccaaggtcaccggcgccgcggcggcaactcaccccgtggaggtggaagccctcggcgccgcctgcgggctgctcagcgctgacgcccaggcccatggcagcggctccgctcggcacccaggtccagtcccgctgcgcctacccggaccgacccgacgccagtagcaccgactcgctctctcggcgctcgattcctgcgccttgtgacgtgaggcgttttgttcctcccactccagacactggacgctcctagcaaccggctagcagctcggtttccaaggactgtaacgccttcaaccgcccgccgcgatagagtgcccacgaccctgcctcgggaatcccgctctgcaccgccccaccagacccggactcggagccgcgagcggcccgagatgagcagcaatgactcctcccttatggtgcgtggcccgggcgctgtccgagggctccctcgtgactccccgcccctgacccagagaccgtctgccctgctactctcctgccacccttcgctgtcctcagttatatcaggcggtcctgccttttcttgccccactccccctggcaagggcgtcttctccggtggcttctgcgcaccctgagccccaaattagcatccccgtttcttgagctaccccaaaccagctcatccaatcactatcattatcccttcttgtcatcatcccttcttccacccagctcactctcgcctgcgcctcccaccccagttgatggcttcaccatttaatctcctagccttaactcatacctcttccctatactcatcttctaatcctgtctacaagaaatgccagctccttgatgtctcctgggttttctttttatctttttatcttctagcccagaaccagcaccatctctcccccctgagagcctgcaacagcctccctcccatctggtttctctgctgtggctcttttcagcatcagtagtccctgctgccaccacggcacacaccccccacatgcaaaagcagccagagtggttgttgcaaaaatgtacatctgaaaacatccctcgccttaaaaccattctgctttctgttacccttaggatggtgtctgggctctttcatatggcccatgaggatgtttacagtccaaccacatctgctcccaacctagcacccacaaaccttagaggaagtgaaacttaactttaaaatctcagcccctttgtcaagctgtagtttccatgggcttaagcttccttagctgtgaaagatactgagaggaccatgcacaggatagtggatatgaagcccacaataacttgtaactacaattcgtataatttttcttattatttgtcctcatttttccccccttattcccttcctaagacaaagccttggttgaattccccatcatagttgaaccagaatctgttggtaatcccccaaacaaacacctccaaactctttcctgggaaaactgcatggagctgctcccagggctgttagaggacaggatgaggcctgaatgtttcctctttctcttccctttgcagaactgaggaggagcaggggatagggaagggagcaggtctcatcccatctgggacagaacagagacagagaagggactgggctattgcagttatgtcttccttcatacaggctgggatcatttactatagccaggaaaagtacttccaccatgtgcagcaggctgcagctgtgggcctggaaaaattcagcaatgaccctgtgttgaagttctttaaagcctatggagtcctcaaagaaggtaaggacttggcagtgttggtcttgtgaccccaggcactagctgggccctaacactctggctccacctggatgccttcttgtatcctagttatggtcccataaaaacagtttcacactcagcggctggattcccacgggaatccacagaggcctacgtaatccatatctagttgacttttgagacctcagagcgctgactatccctgctctgcacctcgggttccctctctgtaaaatgagtggttggagagatagctgcatgattcttgaagtaattccaggcctggaagctgagaactggtaatgcaggcaaaggagggggaagaggtaggtgtgaggacaggtgggtatggtacaggtacagggagaggagtgagacccatgcaggtgcagatgggctgacattcagaaggtggtcctaggctgaggactggcagaatagcccatggccaaatgtctgaggacatggagggataaatgtaatcagtggctcttgagcagtagctgagaatgccctgcctgaggtccttcttcagaactgacgcagctaataattgcagcctcacacatatccccacaagtactcacagggtgaacctttcaagtccaagatttccagcccctaacagcctggaccatgttaccagcaactctttcaaagagccccaatcttcagggaacttgg

SEQ ID NO: 315719 - DNA, 4001 bp, Homo sapiens
gttcctttgcctttaatcaaacctgttggaagacgctcctggctggatgcattccactgtccacgcttgctgtttggtgtctcaccataagaaagcccattcccaagcacaaatcctgtcaactctgggttctccaagccagcctggttttcacgttaagaaacttttagccctctcatgtggttagctggcaacagaccctaccttcaaaacacacaaaccgacaagcttgcctgtctccactcatctctgcatccagctgcctttcactagggaaagggggggtgcagggacgcctcttccccgcagcgctccggggtcagagacccccagcccctctcacctacattatagcccttccctcaccgcaggcacaaatctccatccggctgcgggaccctctcctcaccctcacagcacactccgttctaggaaccccactccgtctccactctccggaagcctgctcgcccagacctccatgtagcggcatctaaaggctgggaccctccccagctgcaaacgctctcctcgaggattctgcagcactctcccggccctcccgctccccactatcccgtggctggtttgcaccggtcctctaccctcggaagcccttacgaccctacgactggcaggacgcgcgccgacgggctcccccgcagctgcgtccactcggttaaccccggcccccgggactgtcctcggcgtggctgactctcttcccaggcccagcacggagagcggcccgcggcaggcgagcgtaaatgtgtgctaagtgcacgagtgcgtcccgactggtagtggtgcattcttcacccgggaggagcgccattcccggcggccggaccaggaaaacgctccgcttccggcactgctggcacttggggcgggcgctgggcccgaccgcggccgcggactagccagggtccgggagtcccgcgaggccgcctctcccaggaggctcccaccgggcagggggcacctcccgccacccaggcggaaacactcgggccgggaccccgccgcagtcgccagccagccggcgaccggacgcccgggcgcggggttgcgggcgcctcgccaaggtcaccggcgccgcggcggcaactcaccccgtggaggtggaagccctcggcgccgcctgcgggctgctcagcgctgacgcccaggcccatggcagcggctccgctcggcacccaggtccagtcccgctgcgcctacccggaccgacccgacgccagtagcaccgactcgctctctcggcgctcgattcctgcgccttgtgacgtgaggcgttttgttcctcccactccagacactggacgctcctagcaaccggctagcagctcggtttccaaggactgtaacgccttcaaccgcccgccgcgatagagtgcccacgaccctgcctcgggaatcccgctctgcaccgccccaccagacccggactcggagccgcgagcggcccgagatgagcagcaatgactcctcccttatggtgcgtggcccgggcgctgtccgagggctccctcgtgactccccgcccctgacccagagaccgtctgccctgctactctcctgccacccttcgctgtcctcagttatatcaggcggtcctgccttttcttgccccactccccctggcaagggcgtcttctccggtggcttctgcgcaccctgagccccaaattagcatccccgtttcttgagctaccccaaaccagctcatccaatcactatcattatcccttcttgtcatcatcccttcttccacccagctcactctcgcctgcgcctcccaccccagttgatggcttcaccatttaatctcctagccttaactcatacctcttccctatactcatcttctaatcctgtctacaagaaatgccagctccttgatgtctcctgggttttctttttatctttttatcttctagcccagaaccagcaccatctctcccccctgagagcctgcaacagcctccctcccatctggtttctctgctgtggctcttttcagcatcagtagtccctgctgccaccacggcacacaccccccacatgcaaaagcagccagagtggttgttgcaaaaatgtacatctgaaaacatccctcgccttaaaaccattctgctttctgttacccttaggatggtgtctgggctctttcatatggcccatgaggatgtttacagtccaaccacatctgctcccaacctagcacccacaaaccttagaggaagtgaaacttaactttaaaatctcagcccctttgtcaagctgtagtttccatgggcttaagcttccttagctgtgaaagatactgagaggaccatgcacaggatagtggatatgaagcccacaataacttgtaactacaattcgtataatttttcttattatttgtcctcatttttccccccttattcccttcctaagacaaagccttggttgaattccccatcatagttgaaccagaatctgttggtaatcccccaaacaaacacctccaaactctttcctgggaaaactgcatggagctgctcccagggctgttagaggacaggatgaggcctgaatgtttcctctttctcttccctttgcagaactgaggaggagcaggggatagggaagggagcaggtctcatcccatctgggacagaacagagacagagaagggactgggctattgcagttatgtcttccttcatacaggctgggatcatttactatagccaggaaaagtacttccaccatgtgcagcaggctgcagctgtgggcctggaaaaattcagcaatgaccctgtgttgaagttctttaaagcctatggagtcctcaaagaaggtaaggacttggcagtgttggtcttgtgaccccaggcactagctgggccctaacactctggctccacctggatgccttcttgtatcctagttatggtcccataaaaacagtttcacactcagcggctggattcccacgggaatccacagaggcctacgtaatccatatctagttgacttttgagacctcagagcgctgactatccctgctctgcacctcgggttccctctctgtaaaatgagtggttggagagatagctgcatgattcttgaagtaattccaggcctggaagctgagaactggtaatgcaggcaaaggagggggaagaggtaggtgtgaggacaggtgggtatggtacaggtacagggagaggagtgagacccatgcaggtgcagatgggctgacattcagaaggtggtcctaggctgaggactggcagaatagcccatggccaaatgtctgaggacatggagggataaatgtaatcagtggctcttgagcagtagctgagaatgccctgcctgaggtccttcttcagaactgacgcagctaataattgcagcctcacacatatccccacaagtactcacagggtgaacctttcaagtccaagatttccagcccctaacagcctggaccatgttaccagcaactctttcaaagagccccaatcttcagggaacttgggtcactggggacctttcagaccagttagtccagcaggtagtagtgctgagctgttgggtcagctacagagtctcatgtcctctagtcctggagcttgagagtataactatgtggactgtctttgcagagcacatccaggatgccatcagtgacctggaaagcatcaggcatcacccagacgtgtccctgtgctccaccatggccctcatttatgctcacaaaagatgtgaaatcattggtgagtgccaccatgctcaaccaggcctgacccaccaggggaaggaaagccctgccccagagataacacagcccctcaagggctgccaaaggaggtatgtgccctggtggctgtgcagatgctgttaaccagtgagaagtggctgctgctcctctccccctggaggcctgggagaagactccatgcctgggcccaactgagtggaagcaggcagagcccatgaca

SEQ ID NO: 315720 - DNA, 4001 bp, Homo sapiens
ccaaggccctggaaggcgccctgcggaagcgcgctcagccgcgggctcagagtcacccctaagtaccgcaggcggctcaggttgcggaaggcggcggcgggcagggtgcgcagctgggtgcggttcagccacagctcctgcaggccccccatctccccgaagagcacccccgggagctctgccagcgggttctcgaacagagtcaacagagtcagattgtgcgaatgaagaaagagcgcagaggggagaaacgcaaggtggtttctcgaaagcgtcaaagaactgaggtttgggagccggtcgaaggccccgggtgcgatggaacggatgtgatttcggtggaactgcagctccgtcagggcgcccaggctgttcaacagccccgaatccagagacacaaggcggttcgagtggagcagaagtctctcgagcttagcctgtgctccaagcaaccccttgggcaggtgggtcaggttgtttcccgataaatccaacaacttcaggttctccagattcgtgaagagactggcaggaaggaaatcgagctgattctggttcagagcgagctcctgcaggttaaccagtttctgaaacatgttttggtcaatgccccttagcgcattgtggtccaaaaacaactgctccaggagcaccatcttatccagcagcgcacctggaagatgcgtgattttgttgcgcgacagcctcagggttttcagttttatcaggtcactgaaggtgccgggggcaacggcggaaatgtggctgtcggagatcatgaggcgctgcaggacggtcatgccgctgaagctctggctctgcaggacgccgcggcccattccgaagagcaggatgtgcgtgaggttggtgggcaggcctagcgcggagatgcgcgccacgtcgccccccgagcactgcgcggcgtcccggaagacacacttgcaagctggcggacaggggaagggctgggcgcgcagaagcccgagcaccgcgcacagtagagtccccctcagcatgtctgaaaaagcaaccgtgggagtgtggtcaacacacaggagcgttcgcgcctgtactgaaccctgggatcctgcactttgtgcagaggcacaatcctttcgccagaattctcactccctcttttcttaggactacagatttccctacgtggtgaaaagacactcattctacactgcgtggcctcatgcttttgctttattgattttccactctcagtttaaagcattgagattacagagttttcaagctaccgaatagccaatactttaaagtccttacatagagaattaaaataatcattctcacattcaagctcacagacatcacaaagcaatgtccattgtgaaaacggctctgctcttgactttataacttaccctgcattggctataaccaacagtcaagaagggaacagcaaagtctgcagccaccaccatctgattcttttgctcacaatcatgctatttccacagtaccaagttactctattaaaggacacccccaaaacagcgaacaccttcaatcaacagccaacaaaagcatataataatacctatcactttacgccatgcattgttctcagctctttatttatactacatgcatttaatccttacaataaccttaggaggtaagtatattatccccgattcaaggatgaaggcacagaggcacagaaaggctcaacagtataactagggtcacatagaatttgagggtagtatttctgacttagccataaagagctactatttctaagatgcttaactaaaggtaatactcacggcactgaattttctgggaaatgcacaccatactactaacctgccaaaacaatgtttcctaagcgaaattttacataaattgcttctcgtgcaattttacttctcatgcacacacagactaaagagccctctaatttcctatactaatgtttaaaatatttggccttacctgaaatggttctgcactccaaagtaactgaaagacttagagctctgcatgtgattcgacactttccacaggaagagggtggtatccttgcatcctgaggataaagactttaccagagtaggtcaggaaaggaccctatctcagagcccttgttctggtttttaatgacaaatatcttcaaaccgagagaccatatataacctgattcctactgtcaaagccaagagcagtggggagagtttttccataaatggcacaatataactctatgatgccagggaagttcagtgatacagctggatcactgcagtagccacacccctagatgggccacacttcccctgggtcttccttttcatgccacatggccctaatttcccacccaggttttttttttttttttttttttttttttttttttttttggtatgtgttgtttttctttctccgcttagcaataaagctaagaacattctcaaatcctccatttttttcttccttttgggactaataaggctaagaacatctttgaacttgttcaacaatggcattgctaggttgcaggatgctcacttgttgtttttttggtgggggagggggactctgtcgcccaggctggggtgcagtggtgcgatctcggctcactgcaacctcctgctccctggttcaagcaattctcctgcctcggcctcacaagtagctgggattacaggcacacaccatcacgcccagctaattttttgtattttagtagagacggggttttaccgtgttgccctggctggtcttgaactcctgagctcaggcaatccgcccgcctcggcctcccaaactgctgggattacaggcatgagccaccacgcccggccgctcacatgttcagtttaactggggaaagtcaaactgctctccaaagtggttgtgttggtctacgatgacacctgccatttgtgagagttcctgtgcttcctctctgcccacacgtggcacttcctgctttttgccatttctatgaaagatatctcagcatgattttaacttttcctttccctgtttaatgatgaacttgaacaccttttcacataattaaggcccacttgtgcttcatttgagaaagctgggtttccttttgcccatttgtctataggcaaaacgtgtctacgtgtcttttgaacacactgataatgctgtctgcattaagacttccggccagccgccctgtccgggagggaggtgggggggtcagccccccgcccggccggccgccccatccgggaggtgaggggcgcctctgcccggccgcccctactgggaagtgaggacccctctgcccggccagccgccccatccgggaggtggggggcgcttctgcccggccgcccctactgggaagtgaggagcccctctgcccggccacgaccccgtctgggaggtgtgcctagcggctcattggggatgggccatgatgacaatggcagttttgtggaatagaaaggcgggaagggtggggaaaaaattgagaaatcggatggttgccgggtctgtgtggatagaagtagacatgggagacttttcattttgttctgtactaagaaaaattcttctgccttgggatcctgttgatctgtgaccttatccccaaccctgtgctctctgaaacatgtgctgtgtccactcagggttaaatggattaagggcggtgcaagatgtgctttgttaaacagatgcttgaaggcagcatgctcgttaagagtcatcaccactccctaatctcaagtacccagggacacaaacactgcggaaggccgcagggtcctctgcctaggaaaaccagagacctttgttcacttgtttatctgctgaccttccctccactgttgtcctatgaccctgccaaatccccctctgcgagaaacacccaagaatgatcaataaaaaaaaaaaaaaaaaaaaaaaagacttctatccttcaagacaccataaaaaaggggaaaagataaaccacaaactaaagatatttgtaacaccta

SEQ ID NO: 315721 - DNA, 4001 bp, Homo sapiens
tcctccctccaggggcctttgggacaccctgctctgctcactaccgtgctggaagagcgagatttctggggaatgtggtgagggctggccccggtgcaaagctggcctggcctgtccagggtggcccacaccagaagcagacggctgaggccatgagacccagagtcccaggtcctggcttgagatgtccagagactgtgcagttaagggtgaagggtgggggaggtgggcagcccattttactaacaacttgagaaacagggaagccccaactgatgtctggttataacaaaatcgagccaggttttcagaaggagtcagactcaaatgctgagaggggaaaaaaaaaaaatctctgagcttatataaaacagctgagctgccagtttattctgggcttctggtggtttgggctgaccaggcttggtggagtctggggacctgcctcagggactggccccctggcctggagccaggggttctgggggcctggctcaatccagggcctctgtggtggcacacagcaggccagccagaagagccaggcccagcgcggccacggcgaccagcgccacgtcccacaagacccccgggcgcacccaggacgcctgcagctgccagccacagctgcccagctggtagcctgtcagccggcccagcgggccatgggcagcgaggctggggctggcacagcggacctgcagcagggcctcgggcgtgcggtcctccagccagaggcgcagataggtgaggctgcagtcacagtgccaggggttctgcgtcacatcgagggtctgcagctggggcaggtggtcaaaggctcccgggggcacggactgaaggctgttgttggccagcagaaggtggcgggtgcgggccggcagggcaggcagggccgtgagtccgtggcccctgcagtccacccacagccccatggtttccagggcgcggcaggtacatgggctggggcagtccttggtggcctctgctgtggcccagagcaggaacagggctccccaggcaggcatgggacaggctggctgcagagagaggggctgtgagggagggcctggcagcctggaccgatcctcagggacggcaagcactggggatgtagcggagcctgacatgggacggggtgcactcacctcccttctcgggtctcagccttctcctctgggaaaccagctggtgactagggaaggtggagtgtgcccagcccaggcctggctaactgtctctggacaccgtagaaggccgggcggtgagggcggctgtggattgggtaagtttgtttttgggaaggggaagggacttcctggcccttagcagagaccccatcccctgcttggggatgagaggagcagatggctgctaaatgagtcccagcccaggaccacagtccccagagactaggaaagagccttggagggccctgcaggctgcgcccagcaccccccaccagctaagtgagctgttacctgattcccagatgcagaagacagcaggacagggacactggctggagcagggaggggaactcagtgggaccccatctggaaaaccactcatctgggctaacactgacttggggaaactgaggcccagagagggaaagcaatgtgcccagggccaccggtgtggtgtcagaggccagactcacactcgggtctcggcaaccgtggccctctgtttggttcttccccacaggcgtttcccctccaccagcagagctccccctacccacagcaggtttccagtgaataagtgtcaaatcaactcactcatcttgactcagccaaggagatggtgtctcagagggaatgtcccacccaaccctgtcttgttaaagggacaggaactgacctcctctctccctgtgggaggccatgctgggtaatacggagggccacttacctgtgaagcctttggtcaggtgctcctgtctggcctgaaaggtcctggctgaggcctgggtggcaactctatgggatacagctgaggtggccgctgcgggagcgggcggaaggaagtgatgaaaatagcctggcttatccccccagtgcagccttggggcctatttccagaggcaggaggccctcaggggcccgcgccttgggcacagaaccacatctcaaccccggtttatagaagggggtcccactgtgccgccagtgccttgatgggctttggaatcaggtctgtggaggactgagggtggcccctcacctgctcccagaaggtgggaactaggagacccctgagaaacgtggctctgctggttgttcctccgaatctcagttttcctcatctgtaaagtgggagcagtgaccggtcctgcctgcctcacagaggtgtgggctgggcagctcccactggctgagaacaccatggtggggagagtgacttcatttttaactctcctccctcctcctgtatactcaaggacggagtctcttcttggtgccatggtgtttttagctcctgcctagtgcttctccatgcctctttctaacaaacagctgtaggcctgggaagcagagcctctaccaagtgtgaatctctagctagaattttggcctatggttttaacatttgcagtacattttcttctagagcacattctacttaggggagggacaccattttccatttatgttagtgacataaagcttcctttaaaagataaatatattttgggatggagaattgcttgaacccaggaggcagaggtggcagtgagccgagaccgtgccattgcactccagcctgggtgacagagcgagactccgtcttaaaaaataaataaaacagggtaaaaacacagaagttacagaagcctggcaggaaaagccaaagacagaaggctgacggaggctttaaacgcacttcgttgacattcaggaccctcgggaatattcctcggccctacgggggtgggggtgtgcttgttcttattttggtctcacatccttctcaggccagccttcctcctcctgcatggccaagcagggtgagtccttccttgggaggccgcctgttctctccccgcctcctggttctggatttgggtagggcaggatttgggtgttcaccctcctaggaggccctgagaggctgccaggccccagctctgcttcctccacccactgatgctgggctcagagaagggtggggaaggtgctgttcccccactgatgtcacacctgctcgggggcctggttgctgctgggggtcccctggtatgtgctcagtggggactctgaccggagcctggaccatggagaggagcctcagcctgtctggcccttccctccctccccatggagccttggcatgttccacctcctctgccctgcacacattcaccagtgagccccacgcaggtgggtaaggggttctggagtgagtgggggtgctggagctgccaggccaggtgttgtgaccagatctggtggggcctgtgccctccttcctcttgagcctctgagatttccttattttcagcatgtacaacttaaaacaaaaaactagatcaacatagatgggttttgtgaatttaaaaaactacataaataacaaataaatgatttttgttgtgggaaattagaatgttcagatgaactggaagaagaaaataaaaatttccctccatcccaacatcaggcaaggctttttccccatgtgtatttacccatatgggtaaatacatacccatctgcccaagaggcacaggataatgcaggaagtggatctgtaaacagcctgggtgagcctgcaagtggattctcccagagcctccagagaggaatgcagccctgccagcagcttgatttccacctacaagtgatgcagggcaggtgagcccccaaatcagggctttgcccctgagggctcttggctttggccaggaaagaagtcaaagagccagtggtgaagaaagccgctttattgaagcagcagtgcatagcagaggtgctgctctctgggagcagggctac

SEQ ID NO: 315722 - DNA, 4001 bp, Homo sapiens
agacagggtttcactcccttcacacagactagagtacgatggtgcaatctgattttggctcactgcaacctctgcctcccaggctcaggcgattctgctgccttagcatcccaagtagccgggactacaggcgcctgccaccacacctggctaattttttgtattttcagtagagacggggtttcaccgtggtctcaatctcctgacctcgtgatccccctgcctcagcctcccaaagtgctgggattacaagcgtgagccaccatgcccgactaatattttattttttgtagaggcggggttttgccgtgttgcccaggctagtctcaaactcctgggcccacctcagcctcccaaagtgctgggattacaggcataagctactgcgcccagccctggttgttaaacaatgtgaatgtattattcaatcaaatatcattatggttttaaaaattagtttttaggcagggagcggtggctcacacctgtaatcccagctactcaagtggatgaggcacaagaatcgcttgaatccaggaggtggaggttgcagtgagccaagatcgcaccactgcaacagagtcttagtattgacttagcatatgccaggcactagggtagatgccattctcaaaagttgggagacagataatcaaataactccttataatgcagtgatgcaggccagcaatagggacacagagagaggccactggccttgctgggatggaaaagtgaagaaccaggtaaggtttccttcaataagtactttctgggccaagtcttgaaagagtaaaactaagaccaactacctaggaccagctgctgcagcacttctgatgcctgtcacgccacagaaaaaccggtaaacagaagcactgaaaggacatcatcactcttaactattgtacaccagtccctccaatgtggcagagtgtacagcaatgaaaaaaggcttggaaacaccagatgctacactttgcttccttcccccttcacacccccacctctacattcacccaaacacaccagagaatcccacagtgtacgtttgattaagggtactagaagaactgacatttctaatgtgctctataaaatgttaaagtcaaataaggccccaaagagacgcaaagcttcgcaaacatctcggcaagggagaattctcaacgcctcagggagagcggcctgttgaaacttggattttcttcctgatacgacgcgcctaagatagtggacctatcagaagcgggggcgagacgggcaccttgaagggcagagcatgccccgcccgtgacctgggcagcaagagccctttagccctctccgcctcggtttcctcaacaccgaaactgcagtaagaatgctcgagcctccaccaagtccttgacccaggagatccgccgtggagaacggaatacgcccttaggatattgtgcaaaacacccaggcgtggcaagcaggtggcttctgtgcgctcagtaacgggggcgcagacaggtgcccgcgtgctcggggtgccctctctccgcgctgtcccccgcacgcacgcgagcccagcgcctcccgagcgagtgccccggtgcggcctcctcgggcgcacggtgcccagcccagcaacgaggtcgcccaccccgcctccctgcgcgcagtgcccggtgcccacgccgcagcatggggcgcgcagccctcaccgcccgggagaggcgcttcctggaagcggagccccggcctccagcccgccgccgctcaccagttccccgagcccacgatgcacactttcaggggcgccgctgccatggccgggccgaatgtagccgcctggaccgtgcttccctggccggctgcccacctccgcctgttcagccttgcccgcagcggctggcggcggccccgcccctttcgcctctccgccaatggtcgcggccacccccgcccggcgccgggggccgcagctgacagcggggcaggacccgcttcgccactcccaagaaccactgcgcacgcctggccccggccggcctccaggcccggctccggcaccgccccgccctgcccgaggcacgtcgggacatgtagtcctcaccccccgtcgctgcgcggccctaggcagcagctcccgccgcgccacatgcaggcccaggccactgagcagcgactcgcgcccctggttcccggtggaggctgcactccatcctcatgggtggagcagacccaaccagcttgccgtggtgccccctacacgctcctttttccctactcgggaagggctgccacattgccatttggagccgagagaggctcctaggttgactctcaagccgaccagacttggggcagagctcgaaatgcccacccgaccttgtcatcctctgtttcatttgcacaaacaagacacagcctggcacctctgaacttcttagagaacttggatcttcagaggactttggaatttggctgaacagtacctgcatttcaaggatgacaccttttctagttagagtcaagatagaaacttgacctggtgcagtggctcacacctgtaatcccagcacttttggaggccgagtcaggaagatcacttgagcccaggagttcgagaccagcctgagcaacataattaggaccccccacccctctgtacaaaaatttaaaaaattagccaagcatggtggcacgcacctatagtcctagctactcaggaggctgaggcgggagaattgcatgtgcccaggaggtcgaggcttcagtgagccaggatagggccactgcactccagactgaaggacagtgagaccctgtctcaacaaaaaataaatacataaaaataaagggaaaaaggtaacaacagcttgcattcagtgggtgtcaccctcacacgcttacttggcaggaattgctttaccattgtctttgcccagggcctgacttatcccttgcttgtggtttgtttgcatttgtgagtaacacaatgctctcctccttgacaaatagaatcttagtttgttcattctgagcatcagtctctgccaggcactgtgctagacgctgtcagagtaggacaaagtcctttaaaccagtggttctcaaactctgctgcatattagtcactggggcttttaaaaatccccatgcccagacaccattgcaggccagttacatcagaatgtcccatggtgggatccaggcatcaggatatttacttattgacatatattttttgagacagtctccttctgttgcccaggctggagcagaattttttaaagttcaagaggtagttgcaaaagcaagccaagattgagaaccagaagactaaaatatcagtggattctggctaaagaaacaaatactctagtacctacaaaaaactaagcctaggccgggtgccgtggctcacgcctataaccccagcacttcaggaggtcgaggcaggcagttcacctgaggtcaggagatggagactagtctgcccaacttggcaaaaccccgtctctactgaaaatacaaaaaattagccaggcatggtggcagatgcctgtaatcccagctactcaggaggctgagacaggagaatctcttgaacctgggaggcggaggttgcagtgagccgagatcttgcctgggcgacaagagcgacactccgtttcaaaaaaatgatagtaatactaagcctattagtttgatgctcagagaactgttatttttgcttttttctctacattgtatgaaatatttatttgtgttacttatgatatttacttaaggaaatacttaaagggagctggtgagtcagagcagtctttccatcccctcaccaatggtttgttctcaattatttgcactaatgcaaggatacatgcagggataatgggaaagatggactagtaaagctttattaatcctttctgtatttgtgtaacagaacgcatttgtcaaattgaataatgaagtcatgtccttgggtagtacacatacactgcaaatatttatgttatcta

SEQ ID NO: 315723 - DNA, 4001 bp, Homo sapiens
ttattatgcctccttttggatcttagtactcagaaagttcgggaatatattttgtatttattttcagcaactccccccaagccttgaactttcaggttttctgtcccccatcctgcactctttctcatgttgtttttgtactttggtccttgtttttaatggttttgctataactgtgtcctttataagtcatcataaatttccctttaaaaatagatgtcgcttacataaaggaaaaaaggaacggggggaaggaagggaggaaggaaggaaggaaggaaagaagaaaggaaggaaggaaggaaggaaggaaggaaggaaggaaggaaggaaggaaggaaggaaaaacaaacaaacaaaactttgtgaagtatgtcctttaaatgaggtcttataaatttggcagccttaatggggtaaaatccatagttcataattttttaacctgaatgaaactattttacaaccttaaacaaacaaaaacacatttgctccaagtttaaattttactatttttgttctggtaaattttctcattctagttctctaaatactatcgatacagtattctctaaatactggttagggcggtggggtagggggaggacaaatccatccccagctaccactccatcagcagccagtatgtcagatccctctgttggtcttcaacactggatctttgcagccatgctccatgctcctgctagctccccaaccttctgtcctccccagttacctgctcagagggcatactgcctctcctgctgcctttcccgatcggcattatttacccttatttattgtttcattagaagctttctctgattttcacgaaagggagtatgtagcccatccaacattgaattcctttacggagaagctctacagcccaagggatccagcattaggatcattgaaatttcgcgttctgagttccagcgggcttttctttaacatcattgttttactcactacttcccctcccacgtcctccttttccaggccagctctggcacacagcgggggactaacaaatgttcgttgaataatcaggaaagtcatttaaaaatggtttttaaatttttgattagtttcctacatctggaaagtgggaaatttgtatgcaaaccatgagatcatttcacttaaaccttagtgatgagtttctttaacttctctcttaaaatgaaattccattctgtgtatgtttgattgtatgtgtgttatgcatgtgtgtgtatgtgtttgatgcatgtgtgtgtccttgttcataacgatttaccctttcctgaatttagccaaacagacctaaatgtgtgttactaatcgttttaattattactcttctaccaattcagtctggagttaaaagagcataaagaggccaattcaattatgtcactcttccccctgcccactcacacccacacctattcatttctattcaaccatctgctaggcttaactgacttggtcttttatatcccataaatggcaccttggtggaatgcctcagactggacaaggtacctcccagtacttgtgcaccaggtggcagggacagaggtcccataccttctcttactctgagttaaacatagcaggacaacattacctctttggatcctgatcacaatcctccagatgcccagtcccaaaatgatgccagtcagtagtccacacacgacagccaccagcaccctaaggttccaggcacggcaggaagccatggtgaagccaaaccacaaatccactcctgggtgagaaataactagcttcttttcttcttgagctaaaaagtttaatcggaaactattctaaaacagaaaaacaagtcctcccctcagtgatctgtcagatggatgtctttgtattttaggacttttgaggctaatccagtaggatgcagtttgaatctcctaataaaaggtgcatactctgctttcaatttcctcatccttcactcaaggagaacatgaaaaaagtgattagagttatgggaatagggagataactcagggcaataaagaagaaggggagggactagccacaagggtcaaagagtgaatgcccagacaagccacagagtgaaggaagggaacaaaatagaagaaaccaaagaggaaatcacaaaggcagtggttgccagtagtcacctatggctcggcttcctgtatttttgtcttgggagggtacagcagagatagactggcaggtgcttcagaccacacaaaacactctctcggggaaatgaactaggttgtcaataagaggataaatggcaatcaccacacatggtttttagcgcttgcatttctttaaggagcctacattttgacagatgcagttggtgagtgtgcatactggcacaggctgggtcttgacaagcactaaagcccagcatgataacccacctgctatgggctgaattgtgtcccctccaacattcatatgttggagtcctaaccttcggtacctcagaatgaggcctcacatggagatgtggttactgcagaggtgatcgagttaaaacgagtttgttagggtggtcactaatcaatatggctggtgtcctcataagaagaagaaatctgaacacagacatgaatacagaaagatgatctgaagagacagagagagaagacggccatctacaagagagagtcctcagaaggaactggctctgctgacaccttgacttgacttctagccacccaaactgtaagacaacaaatttatgttgtttaagccacccagtttgtggtactttattagagcagccctgggaaactaatacatcatcagagtaactacaaactggtgtctctctatagatgcagctctgaccctctcctgcccaggctcccatgttctccttccctaccctctacccttacagggaagaacagatacatgaacattcacctcctcaatcacagttttgttttggtagagagaacagatgctctggtcttctctggacactcccttgcttcatcaaatccatattaaatgcctttaatgtgtttgaattggtacaagacatgaacagggtcctcaaagaactcataatttctcaggggtgagatacctagatatagccacctataaggcaagtcataactgctaaaataaaagatcatcatatttaattattatggagtgcaggtgctccttgacttacaataagattacatcccaataaatccaccttaagttaaaaaatatcttaagtcaaaacgcattaaatatacacctaacctgctgaacatccttgcttaggctagcctaccttaaatgtgcccaaaacacatacaatagcataaaattgggcaaaatcatctatcacaaagcctattttataataaagtggcgaatatcccatgtgatatattgaatactgtagtgaaagtgaaaaacagaatggttgtatgggtaccccaaacatggtttctactgaatgcatattgcttttgcaccatggtgaagttgaaaaatcagaagtgaaaaaaaccatcataaattggaaacctatgtactagcccgttactacctacataccagcccattaattccttcaggaagtattcagcaaggctttaccaaaaaaggctttacacttaaactgacctttagttaacccccaaacactatgggggtttccaattctctgtgacattcactttataaatgttttgctataaacataaggccctaactttacccctcccaagaatttcagaaaaacaaattgaggtagcacaaaatggaagaacttagaagtactgctgcagaagtacaacacaaatgaatgcaaacccattacctcatttactgggaatagatctttaaaaatctgtttctgatatgtctgcatacacatgcacagaaaatgtctggaaaggtacatgaaaaagttcctcttgggaatctgaggaatctgaggtaggagagagttttaaaattttatatcccttttatagtttgaagttttagcc

SEQ ID NO: 315724 - DNA, 4001 bp, Homo sapiens
ggcaagagaacttcagacctaacctaaaattatactttgtacttctcaagccttttctccacgcacgctgcctcagttccctttccagttccttctcctgatggacagcggggacctctgctacggagctggctccctgtccttggtgatgggctcctgggaacggcggggcacacccccagggttgggaggggtttcagcttttgagtgccggatctgcgcccgctgcctattcaagactccaccagaaaggcacagtctacaacgtgggggacgctagctaggaaacaggcgtccgtgaaacccgcatctgattctccgaatggcctttgtcgcctccctggaccctcacctccgcccatgcgcgctcgtcacagtggggcgccactctgccacctcttaatcggcttcctcctggaaggaggaacaaaagcctgttttgttccctgtcttctccctccacaactgatctctcctcccctctatcccgccctgctggagatgggcgtcgtcctctctaggcgggaatggaacggcgagaaagggatgacagaaggttgtggggaaaaaaccttttaattccctctttccttttctgaatactctctgattttgctgtgtgagacaatatccttggccaccaccgatatggaaaactaagtcgctcgcgacggaaagcgatccccatgcccctgacttttgaaaggagaagcatttagtagtaaaggtttcgcagccaactagccctgtcccgaactgccttcttctaagtgcatgtctaaaacccagcgagatacacttggaagcggacttcactgtgtgtctcttggtgactccccaaaccggcgacgccggtcccaacactcatttacactgtctggcacacacactcgcgctttgtgagcaactgcacttttaccatcatgggcagccaaaggacgacttttgtaagcgctaggatcaaagcgaagcgcttctgcgctacgctcacggtgaagctcctggtgccatagagagtcccccggttctcacgcctgcaggcttcagccccagcggcagcgggcgcacccggtccgaacacggtgtcggagctcggagagcatcccccagagcgccgcagactcgggcctggagcatcctctggggacagggaaaccactctccccgcagtaggaggggtcccaggaattgaagctccacgggaaatttcctggtagttggagtggagtctcggcggctcctccgaacacagcaatcggtgagtgagtgggactgagaggcccacgaggagtccgaaggccaaagcgtacacgatagagaggaatagtacgtaggagctggagcagtccaccaggcagccccagggcgtgcgcacgaaggcgccccagccgcacagcgggagcgccgagagcagcagactggctgcccacacggtcagcaccacgccgagcacctggcccgatcttctggaggctgtctggctccccacacctctgtgcatcgtataaaagttgtaagagactaggagagtcgccttcaagttgctagagaggccctggcataaatacattaaggcagaggtggtgcacagaaattggaagtaaccggggacctcgtttggccactgcaaaaacatgaagatggtcaccgacaggacgctcatgagatcatccacagaccaggaagccacaagcatggacacaacagttctgttctgcattttcagcagggaaattagtgaataaatgctgcccaccaaggctgcaaaagtcatgagacatgtcaagcaaaaaagatagatattcagggttcctggcggatttaaaaggtccgtagaattatgattctctttccacaggctagagtcatttgttgataagttactgagaaataaagacattgtccttggtcaatatttaatttcccttatcaatgagtctgataattttctcaaaagaaagaccggctgctgcaaatcagatttcattcctcctaccaagttcccctctagatgttctccttgtcagtcctgcagaaaatggtcagccatgtctcctttagatctgactcaagctatatttaaaaattaggttccatttcaagcataaaaaaaaaaaaacccgaacagataacttttcaacattccaattaaaaacaaagcaaaaactccttcccaccatcaagtttcagggaagaaagccaaaaaaataaacaaaacaaaactcttcaggtacattaaaaaccaatgatgtctggatcctttggggtccttcttatggagcaaagcagcttgtagcttgagataatcaaactctgttcacttttaagagcagtaaaatgatgcatttggttccagagctggattcaaaggcaggagattgtcaggtaggtttcagctttgaaggtggagagagagagagagacagagagagagagagagagggcgagcgcgagccagtcagagggagcttgtgcacagaatcccatctgaaccgctgtgttcttcaatcagcctgtgatcctcggagctgcaggaaggaggagtcagctccaagcaggagagaagcaggaaaaaaagggaggggagttcagtgtgtgaacaaaatgatatacgtatatcttagactgactctttcaaagcaagaaacggtgtacttgctaagcttcccctttggtttcaacatgtaaaattagtccaaatacttgctcaggcttgatgtgaactacaaatataacctgtgagaggtctaagctactccagtaactaagggactgcttttattcttacctagactttctgcttcataatccattggaggaagaatatcatcaatcccatgcataagagtcagatgtatcagatttcttttaaaaaaatagtgtacttaagattgtcgttatagtcctcattactctaaacgggattatacagaatctttggatagagtcacactagctttagacatttatttataactattttctgtcaatggtatcaagtaagcaggctgtcattcgaataaattatatgtctaagtatccataaagtcggaagatattacatagggcctaaaaggaagatcaccctacatttttaaccagagtatttgggacatacaatagttgtatctcttaatggtcaattttgcaagatgcgtgatttagcaaagaagtatctaacagaagtacttctggtccagcatttcccaggatgctttagggcagcattcttctcagcttagcctcatgaccagatggctgcattctcccacatagtgctggaggtttaaatggaaacaggggaagggaaaggaaatagttgatattgataatgatttaataactggaagtagtaatagaactgcgatcattcttttcattttagaaataactgaagtatcattttgaacccgaatctgttcaagtagaaaatggttgcattagtcattaccagccacacccttcaataaacacagcaggtatttcacttatcttgatatgttgattgtttgattttcccccttactcagcaaatggaaacaaaaaacacatgtaacagctagctcagcactctagctctccctactgatagtatagactgtgtagggctgtgtgagtaggaaaggttgagggtatattcattttaaaataatgttgattcagaaagtatgatgaaaaacaaatcttatttttgaagacttcaaagttccatgacatgccattctgtctcttctcacaaaccttattcttccttgccatagcaaaaatattattcttcaatatcgtattgaatcctgcattttcagttaggttggacaataagtctcagattgttaatatacaatgaatagaaattaataatagctactgtagtaccatttcaggtctgagaacatttcccctattattatcatcatttctgggttttccattaaatataaatttggaaaagggatacttaatcaccatgttgtactgttctttgggctattacagaagaa

SEQ ID NO: 315725 - DNA, 4001 bp, Homo sapiens
aaaccccattaaaaagtagttgctacaccattatgaatgagatacatttttatcaatatcttataaagcaaatagatgttgaatcctgccatatgcttatgtattaaaatactagaagaccatatgataaagtaagtcccaaatcataaacacaatacaaaatccccatgagtttttttttgccagtccaaagccattgtgaataggcataggatgaagcacaatgttggaagatgatgaagaatcacgatacaaagctttaaagattgaggtcagaatctagcttagtaactcagaaacaattaattgcacagtgcaggtatattatatttttgttacctgcattgttactgcatttctcatcagatgaaagtaggcagaatcatttaaatgtagtccaatttagagcccagtatgaagggtggtggggatgaaggtaccatggtttttgagagaggaaaggcccaaatgtgcattaacaatcatgaagaaagggactggttcaagcaggagcctttatccaggagttcaaggacagatgggaattggattttgtctggtggacttgattggcaagggtcgaagaaggctgcttagctgagaaaacagcacatggcctaattatatccacaacacagggatttttcagtcctctctttaaaaatgaactcttccttgcatctatgaagcaatgtgaatcctatcattaacacttccttctttgttgctgacaaaaattaactcctaaacccaccaacagagcttgaaatgtcacagttccctttagagtgacacagacctcttcctcctcctggcaaaatcttctgcatgaatgaaggtggagagagccttagtgaggtgactatctgatgtctcagtgctactcccaaagtcatagtttttcaggcaagggcacaagcagtggacaatggcccggcggatgtagctgtcgaagatatagtaaatgaaagggttgacacagctgttggcaaatgccaagggtccactcacctccataccaagctgaagaatagctgagggtaaatagtgttcttgccgcaacccagagacaatggccaggaacttgaaagtattgaagggcagccaggagacaagaaaggctgccacgacaataaagatgatctttatagatttcttcagctttttgttgtgctttcctgattgctggtaatgggcacacagcttccttgcaatgcaacagtagcaggtcacaatgctcaacaaagggacaaaaaaggtgaaaattaaggccaccagggaccatatgagtttaattggagttgcctttttctctgcacagtatggcttatcatcaatcagcgtgagctccctggacagaagagtaggcaaccccagcaggcaggagataaaccagatgctggcacagactacatatgcacagtctgtccttctgaatttcctggatacgactggccacacaatggccaggtagcggtcaacactcatgcaagtgagcaggaggacactgcagtgcatattgacggagatcatgtaggagctccctttgcacaggaaggagcccgtcctccacagtcctagagatgcttctttatccacccagagaggcaatgtgacaagaaaaatgaagtcagaggcagccagattgatgataaagatgtcgatcagtcttcggctgccgggtttgaaatgcaacgctcccatgagaacaaggttccccagcactccagtcaggaacacagctgtgtaaaagactggaaggaagacagaggtgtaaggaacatgggagtgggtctccctgatgtcagagtttgggctcgtagcatagtaataatccaaataaactgaagtttcttctgggtccatcaccaaagagcagatgccaaatctggtgagtttacttacatatgatgtttttgtataaattttagaaacctcaaggaagcttcttttatacagtgcctgcctctctctctcttttttcccctccctttaaagatcttggacaaacatgaaagccgagattaaaaaatgcagtttctaccaatcctcagaaagggcacacaaggagcaccactctgattggtgttggttggttgtggttgtggtttttttaatttgcatttgctcgtgaaactgaggtgctttttgagttattttttcaagatattcaatttatttctttaaggccagtaattaagaagtgaattaacttgattttttcacttcctttaaagacctcctttgcttttgacactgaaatttattttgatctagccttctgtttcacatagaagatattgttctgcttttagaattgtaaggcaatgataatgtattctttttatttactttgttggcgaactaggaagaaaactagtctttcattgtgtaaagagtgaatgaaaagtttcccaaatcataccagtatacaactaggtcaaacaacatgattccatttagggcatgagagtctccccatctatgtggctctttcatttgacatgtagtcaatcctgtttcataagtttttaaaaatccccccccaaagactgggaccacgttttctgctcttattattttaagttttccactacaacttgcatagcatcttgcatatagttggtgctttggaaattgtagtttattaggtttgattcagaaaattctttttgttatccagcatatctagtagaaatgaattcattggggtctaacttcaggtattgttgttatttatgtaacttacaaacacaggtttaacaatctcaagttgctatttttaccctcctatctgctattgtaattcaaccagtgaagttctcttttgttaagagttaacatcattgattaggagattttctccctattaaccctcaaatacgcttcatcagactctggatcccctctgatcttctcttcattataccacacctgtgtagcactgatttttttagcttctgagccatggccttctggtacctccacacatgggtgaacatcacttttggaattgctgattgctgatctggcaacagatatacctataagtgacatcatgatggaggtgccagcatggacactataaaagggaagattttttagtacatttaaaacacttggggaacaggctaaaacagaaagaattctatcacatttttctctcatatgtttccttttatattatgatgaccatagtaaaatataacacattttgaaacggactccatttatttcagctctttactggtcaaagtgactcaaggctctcttgcactattcttctctcctatctgatttaatcttcagaattctagtttcaggttgatattgctattcatagaaaaatgtatgtttgtagatgaaaatatagtcattaaacatttgaagtcctttcttaagttgttttttcatttgtttgtttgtttaatttttgagacagggtctcactagggtctcactttgtcacccaggctggagtgcagtgtcttgaacacagctcactgccaggcccatgcaatcctcccaccccagcctcctgactagctaagactacaggcatgcaccaccatgcccgactaatttttgtattctttgtagagacgggttttcgccatgttgcccaggctggtcaggaacccctgagctcgagcaatctatccgccttggcttcccagaatgctgggattacaggcatgggccaccaagcctggccctactgaattgttatttcttcagtaattagtatattaaaaagaatcatcctgccggttgtacttcctccttccctcttcctcctgatatggtctagtgtcacctgagtcttaggcaagtaagctgaggtcagggaaggataaaggctcctctgacctgggacagtcccagaagtcactctggagttgatttgtgggcctgagcctgccttctcctgtgtccctggctgctgtgcgcaattcatttaatttcatggagggcatattctttactaaatatagactaca

SEQ ID NO: 315726 - DNA, 4001 bp, Homo sapiens
tcccagagtctgttctaaatgctggagacacagtggtgggcacaagaggacaggcaaagtccctgtgttcacagaattccattctggtaggggatacagacaatcaacaggtaaatcaacaaatatggtaatagcagactatgcttgctataaggaacataaaacaggctgataggatatggaatgagatgagggggtgatcatgggtagggatactactttagataggatgatcagggaaggtgtctctgaagaggtgacactggagccaagacctataagatgagaaggaactagtcatgggaatatctgaggaggacttccaggcagagggaacagtacaggaacagtaagtacaaaagccttgagatgggagtcagcgtagtgtgcttgaggaacagaatgaaaagtggctgaggcagtctctggggtatactctagttggagtgccacgtatcaccaccatgctgaggctgacccaacaaccaatcactgctgcttaacaattccacgtcctccatgcctaacatggcaaaacagcatcccaaaatgcaactgaccaattctcatctgagtgtcaaatccacaggcaatggagcacgacatgcttggtcaccacacagggtaaggctggagtggggctggacgagtttggctggtttgaggaagttgttaatttctgattgtgggctccatctagaagtcagctgtgggctaaggagagggctggagcagggcttctcatgaggcaccctgggacggctgtggtaggatgagggtacagtgtgggggtgggagagatgggatgggccctgaggaaggatgaaattgcatccaaggcaaggtgctataagtcccttcagaaaaaagtcaccattttgcttcttttgcgaatcctgggagccatacttaccctgataagctgatgactttctagtcagccagaattatctagcaaatagccaggtagcagtgcttcactgcttttgcagaaaccctaactcacccagactggttctgctgtgctgtcctcaagtttttgtgttgttttggaatcctctacatggtcttcattttaaatacagatacctcatcttctcagaaggattgtacctccattatagagagagactcttcattctcttctttggatacccttgcagtagttagcacaataccgacctagatctttccccttctcaacaggtagactatttcagagggaatgtctcatgtggtttaatcctgtagtgggagaccagatagtggcttgtgctgccaaaagatactaacatttgggatttcatgattgagctatgtgtgatgagaaactgggctgcttacctgttcttcctgcagtgaattgtaaaggcaagaaagaaaagtatcagcagaagtccacagctgagaaaagtccaaacaatacccaagaggacaggagataatgaagagatggtcttactgctgtggtgggaagatgtctgaggacagaataaggaggagctgttaggaatgaaggatcttctataggtcaaaaacaaactgccccatcgtcaccaagtgctgggaaatatgtatcctgcatgagcagtttctcctcccactcctccccttcctcatccccctttccctccacctcctcctccccaacaccaccaccaccacatacatctgagcagccctggcatcctgtggctgctcacttacaattgttgtcttgcagagatcatgaaggggtctccgatccagctcctggccaggaaaactgtcacacaattcagagcagtttatttcaggctccatgtcaccacatgcccctgttggtgtgtgcttattcacagtcttggttacccactggtagggatgtagatctttgactaagacacaagagcaactcaaatcttttcttcagaggccccattttggagctggctgcaggctcagaatccagagtgaacaacccattcaggtagaagcaaagggttatttcgctaggctccttcatcagacatccttcaactggtgaccctccaaagtcagacatccttcaactggtcccctgctgcgagtgcatgccatgtgagtcaagagtggacatcttagtaaccatcaggctacacaaggtgatgattctggttaaccaccagatggcagtcactgttcgagtaccctcactctggttcctgaagaaaggaaagcaattaaacctgttaaacaaaggcatgtatacacacacacacacacacacacacacacacacacacacacacacacgtaaatggtttattagagaggttttaaaatatcatctattttaattatatagttatattttattatacactttattatatatattacaaaggtatcaaatatcatatatttaaatcaacatattttaagccattatagtaaataatatttttaaaacaaagataaagcatatctaacattttctgcagtttcttttcagatcctgtttatggcccagtactgtaaagaccttagcttagacttgtgagccacatttttcttttttccatactgggaaacccagtgccctcccaagatctttctaggcagctcatggcttaagttctgtctgatcctggatggtgctgggctcaggtgccccatgctgtctccacacatgatctgtcggtcactctagctcttgttctctctagctcttgttctctatgtccagtcggctggggtcaaagaaaggtacccaagctgcctgcaagagtctttgtgtgtttgtatttaaactgtgagactaacaggcgtgagatagactactcaggcaatagggaaagaaactggggagctctaggaactcctgcagagtgagtggctggccagaggatggtgttatttctctcagaagatccttgcaatatgaataatgtgatctaaagagaagctcagccttgtggaacaaagacagaaaggcaaaaaggctcaaattagcaccagtagaaaagatagccatatccctaattctttaaaacaatcaatcccttaatagagaaaatagatttgaaattttaccagtggtaatctaaaagaggctgccacttctgctttgtattttttaaacagcttagcacagttttctttgattgtggaggaaaattggacaaggcaaaaatatccattactattatctcaatagccactgaacacagggcccatgtttaagccagaacaacagtgacaggtggagagtgccatctttggagtctgtgtgcttaggcacaaataatatagcaccaggtgctgaccattcattggcctctcatatgttcctgaattatttaccaggtttattacaatgaaatcccaagagaactaaaagccactatctcccatcaaggcatttaaattattgcatattctagtcagattattgaatgcaaaattaagaagcaaatataaaaacctatttgcattctaatttagttgagattttaattgctagaaagatattttttcttttctttttttttaaagttagagatttcctattgtgccttctagcacagaaccatactgcaaccacagggaggattattacaacatgatggattagaagaaaatgtatttttcctatattgcccttttaatcatagtggcaaataagtacacttatatttgaaccattattcattcaatgtttatatattattatatcatttggaagaagtgtatatgtatatgtatgggtgtatatatacataaaacctcattttgtcctcactacagtgttttgtgatgtaaacaccattcctcattttcaaataagtaaactgaaaagcagagaagaagaaaaccctgctccaaatctgcagaggcaagaatcccaggagtttacattccaaggtcaatgtcatcccagtatacactccacatggtgcagacactctggactaacttcttccaagaagataccaaggggcctcttgggtttcttcagctttagttcccagaggtgcact

SEQ ID NO: 315727 - DNA, 4001 bp, Homo sapiens
aacaatctcctctcatcttgttcccctcccttctctgctagcatctaaaactgaataattctgaagcaaatcccaaagctgtatttcaacttcagtctgtgtctctacagggattttaaaaaccttaatcaggataccgttaccaaaagtaactaaacagaactattataatttccttgataccatcaaataatcagtagaaatgtccttcatcgtctccttatttatttatttattttgagacggagtctcgctctgcctcccaggctggagtgcagtggcgccatctcggcttactgcaacctccgcctcccgggttcaagcgattctcctacctcagccttcccgagtagccgggattacaggcgcgtgtcaccacacccagctaatttttgtatttttagtagagaagggtttcaccatgttggccaggctggtctcgaacccctgacctcaggtgatccacccacctcggcctcccaaagtgctgggattacaggtgtgagccaccgcactcgggcatcatctccattttaaaaaacattcatcaaatcaggatccaaccaacgtccacaccttgtattgccaccgaatttctcttaaatcgttttgaaactgcacacaggtcctcctccctgcaattcgcatagcaaccaagctgatcctcactgacaatttccaaataactataataactctattctggagatatcacaagtgccggtcttagagcttgtcaaatgtatacatatatgtttatatttatatataaatgcacaaaagcacacaagaaaccatttcactcgaagcaataacaatcctgagagctaaacactcgttcatgtcttttgtgatgcttctcggtgggggttatctctgggatttaagcgacacttccccttaccggagacatttgcgcaagtgtaggacgaagcgagagcggttccttccagccgaacctgcctccggaggcccggtccgtgcgttcgtctccggactgcagggggcggccctgccaccacctcgaggccacctgcgcaggtgagaaaaggagtttcagtctccgggttcctgggggtggtcgcaggtaatctagagggaattttgagccagccaggatggtcatccaggaacctacccggacgcaacggcctcggaaaacaaatagccgggcaaggccctggggcttaatcccagtggcgggcgcgggcgggggcgccgtccccaacgctcgaggccaggggaggggaggcaaagtcggccccaatgaatgcacgcacgcgcgcgcgcgcgcgtgtgtgtgagactattcacctctgggcgccaggaaagagcgaagagttgcatacacccatttctataaccttgctgggtttgtcatgtttaaaaagcatctcccctggagagagggtggcgagtctctgggtgcgggacacgcccattccccagaccccctgccctcaaacccacgacagaccccagttgctaaggctccgcggtaatccccatcccgaagcaggaaggctcgggcgtccgggctccactcctggatctcttaagtagcagagaacccccagcccctgagttcctgcaaaggaaattccttcccctcccaggcgcgctgaacgcccggccagggaggctgggagcggcgcggggaccgttcgccgccccgaggctgggacgccggtggcgagagcgccgggcgccctccacctgcgcccgcactcacccgaggatcgatggctgtcggctccgcaaggttgaggccccgacacctgcagcgcccgtgcccaggtgaccgcccgagggaggggcgagggcccagctcgcccgcctggtcccgccccgccccgccccgccccgcgcgctcccgggaggggcaggggagcacggccccgggaccccgcggcgaccctgctgtggctcagccggctccagaccaggaaatgcgggcgtcagagacgggcaacctttgagcgcgcacgtcccgtccgggcccaacgaaacaagggccggagggcgccgcctgccggcgggacggaaagatatcacagagactgtcaccccccgccggctaggagagggctgagttgaggctggcagagggacgcagccaggggtgcgcagtgcgggagccgcttgggggctcagtgagacccccttcctcatgccacatcttgaggacccggcccctgtcctaggagctccccatctccccagcaggcgggcgagcgggggccactgggtcagggcctctccttcccttacctctgcaaatgtaaacttggcagttgtctccagataagagtttacacagggtggccaggcggtggctcatgcctgtaatcctagcactttgggaggtcaaggtgggcggatcacttgaggtcaggagtttgagaccagcctggccaacatggtccacgttggtccccatgtctactaaaaatacaaaaattagccgggcttggtggcacgcacctgtaatcccagctatttgggaagctgaggcacgagaatcgcttgaacccaggaggcggaggttgcagtgagctaagaccgcaccactgcactccagcctgggcagcaacagcaagactccgtatcaaaaaaaaaaaaaaaaaaaaaaaaaaaaaaaaaaaagagtatacacagggtgacagaacttcttgaaacttgtatgcttctaagcaaccgcctgcagtgtactgtgaattcagatttttaaataaaaatctgcaaatattaaatagcccatatattgcattgccttttttgtgtcaacagtgctaatttgttgtcattcaacaaatatttgttgagcacctacgacttgccggtcatttaaacatttaaaatatcgaacaattaggccagcgcagtggctcaagcctgtaatcccagcactttgggaggccgaggcgggtggatcacttgaggtcacgagttcaagaccagcctggccaacatggtgaaaccctgcctctactaaaaatacaaaaattagttgggcgtaatggcacatgcctgtagtcccagctacttgggaggctgaggcaggagaatgacttgaacccaggaggcagaggttgcagtgaaccaagatcacgccattacactccagcctgggcaacagagacagacttcatctgaaacaaataaaataaaataaaatattgcacaatttcttccttctcctcttcacgcagagccttgaacaaggggagtgtcctgagcctctcaacctctctgagtgtcatagcagttagagattaaagatgaccatgtccatacacgtttgtatctctccacaatgtcagtctttttttttttttaaatgctatttcaatcacaaaatccaggagctacatggagttcccaaggaggcaattctccttagtccttcccattcactctgtagtcagagcacataggttcaagccactccataagtcagtaaatattgcaaaccatacatactagtatacttaatcactatacgaatgttgtagattaaacattccacaacaaagtaatatttaacatcaagacgaagaagaggagaaagggttaatgaaccagtccaaagggagggaagaagacaaagggagtcctggtctgggcctggtggtcttgcaaggaagagtctttgatgtggcagagctttcggtggcaaattctgagttcttatcatgagtgactgcaagacggtgttagtgaagacagccaagctgaaggcttcgctcttttacagtcagagggtcctctggtgagaacttatagtggatgagtgtgcttgtttgtgttcttttttaaaatttgttcgtcaagcaaaacatcttatccttgttagcaaagtgcccatgaaatataaaatggagggtttttctaagatggaattagttacctcaagggtggtttatacactgagagtctggactagccttgcaaggaactcagtaattgcccaagggtgcaagaagaaccctgatagaatt

SEQ ID NO: 315728 - DNA, 4001 bp, Homo sapiens
tgcatacaaccacgtgcacacactctctctctctctctctctctcacacgcacatttaaaaacaaaacctaggcccatccaataagtttaaaccaactttgctctcaaagcttccataacctagtttctctctaccatctctacttacatcccagattaagattgggattggtggggtctctattattctgtgtacagttccttcctgcctttatacttttgcatgtgatagaaattttggagtcataggattttaaggatggatggaaactttatcgatagcctgtagtctaatccccaagtcagttgaggagattgagggctggcactggtgtgttcctcaagctttcacagcatgttcaggcaggactaagatctgttcttattggtcatcttctaagcgctctgcatttatccttactattcctgaatcctgcttattccagagctttaaggaagctcctcacatctgaaagctactccaggctttaccgatgtccttggcgaccatgaatttggatagttaccatttgtaccttggaattttgaacatacttttcttctttatgtgaaaaactagtattcgtgtgcattgatatagtgtcacatctttgcttattgttactttctaaggccctaggattttggcttacgcacttctatttcaaatattacataataatggtaacataatgtgtttctttaagtgctccattgcttgcacaactataaaataagtctgttgtatcaatgagacgtatatggtaaagagaagaattagagtaatttattttgattaattttctctgtagctagaactgacgatatataccgtacatgaataatttatctgaaatgaataatcattcagtaattctcaagaatcatggagcatctcacatttctcacatttgtgtttgtgaacttttgtctaaattgcagtgagaaacaaatctgtttatttaaaatttttgcttatgtaaattagaggttaaaatattgtataataacatcctgtgttctgtgtcacaagtttgagaactaagtgcttaataaatattttaccagacagttacttaccagtgaaaatgtgagatactcagaagtagtgcagcaacaacaatacaagattttaactgtctctgtagtttggatagagtgcccattgcttagaaaataaataaactggctgggcacagtggctcacgcctgtaatcccagcactttgggaggctgaggcgggtggatcacttgaggtcaagagttcgagaccagcctggccaacatggtgaaatcctgtctctactaaaaatacaaaaattagccaacgcggtggcgggcacctgtaatcccagctactcgggaggctgaggcaggagaattgtttgaacccgggatgtggaggttgaagtgagctgagatcgcaccactgcactccagcctgggtgaaaaagcgagactcctcaaaaacaaaacaaaacaaaaacaaaataaaagcttattagattttctatgggaatcacagtggaatcttcttgaaatcacctattgtaatgtttgtagaggaaagtcatcttaaggcctgttgttccctgttgtgaagatctacaacatggcctctatccacccagttataagattgagttactgaatagttatgctcgctcaggtattcagtctggtgtcaattatcctgtcttttggagacagatgaatgggttcatcagatataagaaaattatagtgtcattcacagctaggacctatttagagtttaaaaattgatgctttttttttatacagcttggctttttctacttataagccttaaatactgaaaaatcacaattttgttttccacggaaaagcatttgaatatattaagtgtttaaaaagacatacctggggctatcttctgtgagcctcagcaagccttgctgcaagtcttcagagaagcatgagctgtttggttagccgcagcagtagcaaccccattgcaggctgctggctttactaaaaatttcctttcctttttgtgtggttttaaaatgttgcatattgacgtagatgaaactgtggtttgcaagtagtttaactttatgaaagtctcctaaagaagtttttttaatgtatacaatttcatgtatgctttcttaagcaatttatttgtcatattttttagagaaaagatcttcatttagtacctagcctttttttttttttaaagtatccaaggtatgttttgtgtcataatgatttcaaagaatatcactcttcatgccttgatggggattaataattaaagatataaggtgtttaagcaaatattttttcagtatatatagtaacacagcatttcaaagttaaaatttaaaaaatagttgcagtttttattcctgctgagacacctattattaaaaaaagaagtaaacaaaaagatgtgttttacagagtcagctaatgtatacattttatttatcttattttatgttcattatagaaaaatctggaaatagaaataaaaaaggaacatcattatgcagagagataattactgttaatatttttggtacataagttttaaattttttctatgcttatgtatttccacttagatgttattcatactattttatagtttataatttttcattgaagaatatattatatattcaatttatgagattagacttgtaataagtatttgtctgtttgactcaaacagcctgatgaattggaatagtatttagtaattaatagattgtgtgtaaaggaaccctacagtgtgtatttaagttgtttggttaaatgttcattgtgtctgtggcagaactaactgaatgtttgaaagaagcctagcatgctgggggacctaacaaacatattttcaagagttctgaattttctggttcaaagttgatgtgttaatgcaaagccattgcctggttatttagggtctggtttcttctaatgcttcattggcttggtaggtgctttggtttcttttaataatacttggtcagttttctggataagaaaaaagaagatacctttccaggatctaaaattaatctcttggtattagtttttaaaaagaaaaatgtctcaaaagatgaaatgagaagtatctagctagggagaatttagggaaagtctaaggagacttttgaaaaaaatgtaaagatgcttatgatgatattggtcacgtctcaggtattctgacattctcccaaattcatataattattatttttgccagtgaagaccataaattataaactaggagggaaaaagcaaatgtttctcaaacattttatgttaagaaccactgtgaacttcatcatcatagtgctaggaaaggatctttcttttaagatatgtatgcttcaacattgtacaggactcactgaagaacatacttgtagaaaagatatatttgcagacaagtaagtgagaagtgatcagggtttacatccactggagggtagaggagatgaaagggagagaatttagagatgagtggagttgactgcaaacagtggtgaatgattttaccatggcatggagaaaaactgggatgaaagatttttgacagtttctgttttgctttttttagttaggtctctttatatgtttacttcctcggttcactttaaggttgtagacacaattgaaaagtacaaacaattgtacttaaaaatctacccagaccacagtttctgtgtctggattgccaaatgtgaaagcactgaagtgcccttgttctcagagttctatttaatttttagaatagtgagaattaatcttttaatagatgaatcatattcctccttctgagaatgagcttaggcaacctggctttgtgtggaagtttattcacagtggaaatacatgtagttttcattttttaatactagtttcatttgattttctataagccacttttttctatctgtttcactgaggacaagtgtttgtgactgtacttagtgttccgggaa

SEQ ID NO: 315729 - DNA, 4001 bp, Homo sapiens
ctctgcttctcagagccctcccaatcctcgaaccacaatctatacacacgaacacatgcaatactgtatttttctccacatcattactaaccaaaacactttactcttttaaaacttacaacttgacagaaatgtttccattcaagattgctataatacagagagcagttgtcactgacgtggtttttagcagcagaaagtaaaccgggaaccaaatcttacttgttacttactgctttaaaaaaatgactgccttgctactgatctccatctctgctctttaagttcaatatcaacactgagactttcaaagaaccagcgcagcacaaggaccctgcagccggcaattcagagggcatttcggacaacttccccccaccccccactttctcctgcttccaacagaagatcctcaagaaatctaacttgtgaagaagtccccctaggttcctctacttcactgcaaaatgtaatgccacttgaggttgtcaaaaatagcttctgtagaaaactggccatggtctttaggaaacgttgcatgaagaaaattagtacagcctttatagaaaaagaaaaaaaggaaccacacatggaataaaagacgtcagtaccgctacaaaaagactgcagggcctattgtcaggaagaaagtcgagttaggaggacgaatgtgcggagctggagtgggctgagcatcctactcctcacccaccccacccccaaaggagtcagtacaatccaagtgtctgtccacttcgagtcattttgaaggcagcttagaaaattaaacaggggccagaaggaaaagatacaacgtcaccgtccgagccaaagggaaaggctgggttgggggtctatgtggcggggcctccctcataaaccaatgcctttcaggtcgcagggatgggtcgcctgggtggtccgggggctctggcagcaggggaactgggccctgaagcagtccctcagctccctgttgaagaggaagcacacgacggggttgatgccggcctgcgcgaaggtcagccacacggaggccgtcaggtaggcctgggggacggcgccgggccgcaccaggacccgcaggtagctggccacgacgtagggcccccagaggagcaggaagagcagcgtgacggcgtagaacatcttgcacagcctcttctccgtcttgaattcttccagcacgaggaggcggcgcgcgccgcggcccggccctgcgggccggatgcccacaagcgcgggcggcgtgggcccgcggccgaagcccgccgtccagttggcggccgcctggccggtggcgcccgggccgtggaaggtccagtcgtggctgacggcgggcaccaggcgcgcgggccgcatcttgcggcggtcgtggatgaagaagagcaggcggaggtagacgaggtgcgtggcgcccaccaccacggccagcagcagcaggaagcccagcgcgccgggggcgccgtcgggccgctgctccagggcgcacggcgcgtcctcgtcgtcgccaccgccgtccagcactggcgggaaggccgcggccagcgccagcgcccaggcggcgcacaccagcatggcggcgcacggccagccggccaggcgctctgcatagaagcggtggtgcgcgatggccaggtagcgggtgacgcccacgcccagcagcaggaaggcggcgtggaagcagaagagcgcggccaggaaggcgagcagcttgcagcccagcgcgcccggcggcgcccccgccgcggccgccgcacgccgcgccgccagcatgacggccgggaggcaggcgagcgcgcgcagcccgtcggccaggcacaggtcgagcagcaggtagtacggggcgcggtgcaggctgcgctcccgcacgatcagcagcgcgaacagcacgttgcccgctaggctcacgcacagcagcaggctgagcgtggccagcttgaggcccagggcggccgcctcgccgccgccgctgccacccggctcgctcgcgttcgccatcgcggcctcaccaggccgtgcgctccgccccggggccgtcccctgcctcgccgctcccgcaggccgcccggcccgagctccgccgctccgccggccctgggcgagctccccgtcctgcggggctcagcccgctcccggccggcccctcctgggctccccgagccgccgctgtgccgccgccgccatctcaggaatggtgcgcgcaggaggaggcggccactccctgcgccctaggcgccgcgggcttcactgcggacagggcctcgccaccgtccgcagccccccgcatcctcctccgtctcctcctactcctccgctgctgccgccgcgcctcttggctctgccccccgccgggcccgccgccgccgctgccgccgctgccgccgccgccgccgccgccgcggagccccctcccctccgccggagcgcgcagcgcggccgccgccgccagccccgccgaggcatcccgcaccgcctgggcccggctgggctgggggcgcctccgcagcagccgcggggtcgggaggcggccgggagggaggcagggcccaggacgcaaggtggcgacaagtcgcgtttggccccaggtaacgggggtccggcggcggcgcccgcgctggggtcacggtggccgtgcgcgggggaggttgcctgggctggcagggtcgggaggcctcagaggggacaggaatatctggaatgagccttctgcccgaaagctgggagtaatttacgatagtaatagtcatcgtaatcctaaaaccgctgatactcaggtgcgcactgatgtgggtggcagtgtgctggggagcttggcaagcattatctccctcaacagtaatcacgaagttgttgccatccttaatcccactttatacctcaggaagcagaggcttggaggtcaagggagttgagagccgggaagtagcggagctgggattcaaatttcgcttggtctgatttccagtgctggactcacagcgactccgcagcatcccctgctcgctaactcatccgtgatcccggtgaaggacctatatcagggaaaagaaatgcagcatttcatctttaagtgacttggaaggtgaaccctatgccaccttcctcccaggatatctattttctgggtaagcctgaaagggcagcccctgttatgattctcagacacaccgcatttgtctcgcaggaccttgcatgtgctggtacctctgcctggaccagccccacaacaggctccctctccgtagggcctccttctaacccgtctgttttactctgtatccctgccctctagtcatttccttcttagcacttataatttgtcattatatactttcatttctttttaaaaatcatgctcttctaactaggctctaagctctttgaaggcaagggatcatgcctggtttttggtaccactgcatccccagtgcttagcatggtaaagccagaattaagcaacgcattgtttctcacccacactcatttgttttttcttctgtgcagaaaattatttgttgcctactgattacatgcaaggcaggcaccttgatgggcattttcaggatagtgcaagatcatagagggccttaatgatcaggctaagaagtcgaaactttagtctgcaggcagtcaggagcccttgaaatcttttgagaaggggagcgacatgactaggtgtgctccaggaacattattctggcagcagtgttgaggagggatgacagagcagagccggtaaacctagtccagagcctcaaacttcactatgtgcagaaatcactggggaccctgttaaaatgaagattctgatttagtagttctggaatggggccggaggttctgcatttctaacaagctccggggtgagactaatgctgttggtctgctgaccttactttgaatagtaaggcccttggggacagtttggatatttttttaaaaatctaagtgatttttcaagaaaatcaactattgagcacctgacttgggactcctaa

SEQ ID NO: 315730 - DNA, 4001 bp, Homo sapiens
accctttgggggtgaagtcgtccagcctcctacttctaataccaaactggtccagttgtcttctgggcattttagaagcaggtggaggagtttcagtagctttgtccagactctccttggtgcagatgtcagggaagtccttctgagtgtctctccagtggttcttcctgctgtggctgtaacccagatactgccctgcttggcggatcactttggttgtgagcccttagggccctcttctttgtgacacctgcccatcttggcctggggaccacctgtgagtttcacaaaccacctatgctggaggggcccttagagatgctgcagggtgcagatgggaaagctgaggcctaaggaagggtcggcctatgcacagtgctatgcagtgttgggcccagaccgcaggattcctggctctcagaagtccgtgggcctcaccaggcagcagacaccctttctcctcctgttccagacccagatatccagcagggcacctgctgtgacctgtgcaggggttggatgagcccccacggaaaccaccctcctttctcctgctcaggagagagaactctcaggtggcccctggtatgcggggctccgccctcctgccaactcgggggtctgttctggagcctcagaagggcctacggcagggccctctgggggtctctggaggcattgcaagagtgcccgcgggtgccaggcttgcggagtgcaggcccgcacaggtccaggcagtgcacggcgagagaggcggcccagtgccaagcgcacggggcgctgcagcagcccgtacaggaaggggtgagccgcgaaggccgagtaggcgacccaggtgacagccgcttcggcttccgcggcccgcgctgcgggcgccaggcacgcgcagccataaggcagccagcaggctgcaaattggcccacggccagcgctggggccagggccgccttgcccccgggcaggcgaggccggagcggcggcaagatggaaaggcggctatccagagagtccgagtggagtcgggacccgcgcgccggccgtgggggcctcagggcagcgcgacgcgccaccacgaagatgccgccgtaggcgccgagcagcaggagggcgggcagcgcgaaggccagcagggcccagagcggccggaagggcccgaggcccccagccaggaccgagcagcgagcaggagcagggggcggtgcgggcggcgtgccgagcagggagagcgcgcccagcagtcccgccgcggcccacacggcggtgagcacgagcacaggcggcggccgcgagcctggccgcagcgggtgcacgatgaggcggtagcgtgccaggccaagtgcggccaccccgagcgtgcaggccggcagcagagcggcggagaggaagcgagcggcgcggcatggcgcggggcccaggcgcacgcggcccagcccgggcggcggtgcggccagcaggcccagcggcatgatggaggcggccgccagcaggtccacgacgcacaggtgcgccaggtagagcgcgtcgcgcagtcccggcgtgcgcagcaccacgaccagcagcgcgccgttgcccagcagtgcccccacctccacgacagctgccaggatcaaccccaacgagcctgcgacttctgaggcgttcagccctgtggagttggccatttgggctctcaggcttcaccctgcgctgggatgtagatggcagaatggagcctaaagctgcaggatttccatcacctgtcctctgctcctcttgtcccttgctcctccggcccctcacctcattggctgcccaggaggtggctccgacgcccaggctgccatcctcttgggggcttggccaggcccatggaggggtgcaaggatgagtctgctgtctttctcccctgccccagcccagctccagcaactcagcccctgtcggagatggtactggctgtcactctgatgttgccacacacggctggcaagggaggggcagggcctggcgccagccccctgggtcctagcagctgccagctgaaggctggaggctctgctgtggaagtgcttgggggtgcctctagggtggaggggtggaggacagagcaggcacagacttggagcctagacttgagagggttagagtgtgggctttggagtcagccagagcctgctctacctttctcagtggtgagaagtgccccccccatctcctgtcctgccccatcctcatcaatgggatgagcatttagctctcatattaaagggaaactgaggtaccagtgagacaaaagctgaagcaggaggacccttaggcatgccctggccccccaagagggctagttctctcagaaagaaaggaggctggaaaagtgagagaaaagcatagaacgtggcacatagtaggtgctcagctaatattaacttcatagagaataggtgctccatgatagtgtgtgagatgagtgagaggaggccttagcaggcagatgctgtttggttttttgttgctgttgtttgcttttgtttttgctgctagcaaacaggtccccttttggtaacagcaccctgaattttctttcctttttttttttttttgagacagggtctctgttgcccaggctggaatgcagtggcacaatcttggctcactgtaatctctgcctcccaggctcaaacgatcctcccacctcagcctcctgagtagctggaactacaggcacgagccaccacacctggctaaacaccctgaattttctttaggaaaccacccctccccaattctcaggacaggaaatttgggtgaacaagatccccacactctattttcctgattaggcacaaaacccagtcttgactaatcagtgaatgtcagggttccccaccccaatgtcgttggctcatggaaagccatgtaactcccgtggggcatatgcccccaggcaaagtcacccagtttcatggcaaaaccctatctatagtctgatagcttgcatttgtatctgaagcctcttcctcttttcacgggtatccagctgccttttcaacatttccccaccaggactttcactaatgggtatctcaaacttcctatgtccaaaacagaaccatgactcttgatccctccccgacaacctgctcctcccagaatcttctccatcttagtgtccatctcaggatgattccctctcccccacgccctatatccagtccgctgaggtctctggaatcctgccatttctcaccatcaccatcaagctggtcccagctaccaccacctctcacctggaccatttcagcatccttctaactggtctcccggcctcagctcctgcaccttgtgctggccatctgcctgtttgccctcagattcattcccttcttccccagtgctatactgccttcctgggaactgtatttcccaggctcctttgtcaactgactttgggtatgttcagccaatgaaagttaccagcagaagactggcagatgggaggagggaagaagccaggatttatttccctctgaagctcagccaggggctcccttcaggtggccccctctgtggttctggctcctgcagggtgatcctagcctcttggcatcagagcaccattcacttcctttatctctccagtcttaagagtagtagtgacttccggctgttgctcatctttggattgcctcatcatcccccatttggtcattcaattctttccctgtatcaaatttcccttgtctgaaatacctagggtaatttctgttttgctgactggttgttaactgacgtatactctatagtccactctctacacaggggctgaagtggatcccgctaaaaacaaagcagatgggggcatgacccagctctcatccctccaagagcttcccatcatcagaatagatgagaatagaatctcagctcctctggaactaaaaaaaaaaaaggcagataaaagggagctaggcccttttatctaccttttccatccctttctgagctcaccctcctccttgcc

SEQ ID NO: 315731 - DNA, 4001 bp, Homo sapiens
gggaagtgagctcctggggaattcagagacttgcctaagtcacactgataatatttggtacaatcagcccttaaacccaggtcattttgctgtgagtcctgggctttctactttaaacccaaactactgcctcttgcctgcatagagaacatctaccctggagactgggggatgcttctagggaggtgactttacgtagatttcacctcacttctgtcctgtcttcacaaccttaccctttattgggctttgagggattttcatggattttccaggcttttcttatttcaggagcatacaaggaactaatggccattgtggtctcctctatcttaactttccttggtattttctcagagtaaagagctaagcgtgaaatattttgttgttgtggttcttaaagagagttaaatgccaagatattaaggaagaaaagcaggcagactctgaagagcacaaacagcacaactctaaataagaacattccttttaacttagtcttccttttcccacccacatctctgaatgcagtaaatcctcttagcatgttatctctggttagggcattttctcagtgtcttcatgaaataaagattttctggcgggatactttctttttataggctgtatccttaaatatgaaattcagccatccatctgctcttctaggcccttgtccttaacccatgtatacctgcaacacatttcaagtagaggtcagaaacaagagtctgaggatgagatgttgctgaaggattaagagaatatgcctctttgatccctaacttcatggagacagttaatctcaattggcagaaataataaatatcaacagggtgtctggcttttttccccccagtataaagtaatatagaaccagatttgttgctgttcatattgctagtaaattggagaacaattatgaaagaaatctcttgttaaaaatgttaatatacctaaaataaaagcagattcaacttgagaatgtgatgtaaaattccatagcagataaatcttaaaataagaaatcaaaaagtcactctactttaggctcatctatcttttaaaagtccttattaaaatttaaaagaactgagatctccatgcttgcttcttgttttcctcattgcagtgaaaacttcccaaacagtttgaatgtggaacaacagtaagctgttcctaacctgtttgtcagtcactgggcagttttctcagtgcctttcctgacatgttttaacatgacttctccagggatcagaatgaggattgccctgttctttgtggtacaatgaaaagactgagattattttatcaaaatgagacagttgggaaagagaaaaatctttgtctctctctttaaaaaaaaacaatacggataaacgattatgaaacaaattttaagttttgggtcctgggaaacaattataagagactttgacttttactcatctaataaagtaaatgtggtttaaaaaaaaatgtactaaataggagtgattgccaaaacattgtttctacttttgaaggcacaatatgtagtttatatttctgcctgcctgagctggaaacagttgaagcttcatggctcacagtggtgcctcatatcttactgtcagcattctaatttctagtttttcttcaaacctcagagttaagcagaagtataattacagtttttaatcattgctgtgtcttatcaaccacggcttttaagaaaatgaaaaatttttcgtttacctttcattgtggtggctggctgtccattcacctcatacggtgtcttcaagttgaaacaggtttcttgtctctaattaagaataagctttgaaactaaggtcggcagggaagtggattttctggtaaagcatgaaaacgaaacatctcccctaccagacaaggtaggtatctcccttacccctttagagattgtcctttggggcaccctttcaaattctcctgccaggcgactactggaacaacttgctctcttgctaatgtaaatgactcataactaagagtaggtgagatttgtcgactggggaagagtatttcctgaacctgcaggaatcagatggtgattcacctgaaggaaacacagagggctggagcttagactgccagaagtctgcttaaggagtgggggatgaagtctcgggttggggcctactaactcatcagatccaatttttaggtcattttttttttccagcctcctattgctatctagaaaacatgtatttgcagccttcctgccaattaaattttggattaaaagaaataagaatatgctttatgacagatgaattctttgaaaatattattctacatattatttaaagagtattgttgtaattgataactttggaaacttgtagtcttatgaaactaatgaaatctgtagacatatttttacacatacacaatagacatatttttacacatacacaatgataagtattcaaaatatgttaaattattcaggggctgggttcactgactcctttgaatgctgacctttaacataaaacaatttattttattgctttaaaaaagcatccaacaatgacaaatttatataatcatatcacttttttttttttttttttttttttttttttgtgagacggagtctcacactgttgcccgggctggtatgcagtggcatgatctcagcttgctgcaacctccacctcccggattcaagtgattctcctgcctcagcctcctgagtaggtaggattacaggtgcccacgactacacccggctaattttttgtatttttagtagagacggggtttctctatgttggccaggctggtcctgaactcctgacctcatgatccgcccgcctcagcctcccaaagtgctgggattacatgtgtgagccactgcgcccggccactttttctgatttgtaaataattttcttgctttcagatgagaatctcaaagattctgatattttcttgaatgcaacatttaaatacatttaaaaaaataaaatttcatcaaatggaatcaaaacctgttattgtggatgaagataaatgaaaataatcaaaggtgaaaacttttttggagtgaataaatctataataggtattacttagtgtttacttgtgtcttaaggaaataatgtgtacgtactagttgattttccttatgtttttacagaaaaacaaatgggtgtttaacttaaaaatcaagagttgggtatcaaaattatattttttgtattttcctatctgcttcctaaccatacaaaaacagacacctacaattttaattttttttttttttacattctgctttgggtggattaagtatgttacggaaaagtagctagtcctggggaaggtgtttgaataacaattagccaacttaataatggcctaatcttttaagaatttgcagatttacaaacaatccttcatttagttttgactctctctgtgctattttatacttccccattgatttagcatttgaagccagtttcttttcttttcttctttttttttttttgaaaccagtttgttgtattttgagcagaagggttatgctatgcagactttagtttgggagatttgtccttgtgttgacctttttgccattttttcatgatgattcataaataataaatgaggtactgctcataatttgacattttactgccagaacaactaactgttaagtactaaaggcatcagtcaaagggagaagcatctcttatggcccccataaaagtatgttgtgcaaagaactttgctgcaagtactgaggattatcaccccaaatttccagtgatgtgtataaaatcttagtagggagcttattctgacagatatttgacaggcttctgttataagaataaagaccttttaaaaaaaagagagggccctactgtgaaagggttatcataggcccttctaagtgcgaagaagggcttgtgaggggcctatgaaattttcctgtataatgaagcatctttaactttatg

SEQ ID NO: 315732 - DNA, 4001 bp, Homo sapiens
taagatcatcgtcacagcagatacaggcacttggtagcaacatggaaagatctagccagataacagaatttataacattgcatgagcttccgtgtaaaatgggattgtgtggacctaacaattggagaggccatgactccaaatgtgagtgggggctcatgttattttgtgacagtcatttcagcgtgcagcaagtagtcagaagtctatcatttgagttaggcagtcaaccattgccttgtgtcttttttgaagtaaggactttgttgtaactgggtcttgagatggccctttgcatgttctggtgaaggcagaaatgcaggccaggagccagacttcccacaaaggaaagagtggatcctacacgctgcagacaaaaggacagaaagttcagacttggctaggataagggaaggaggattaagttcccaccactatgacaatgaggttagaaaaagtatcgccaggccgggtgcggtggctcatacctgtaatcccagcactttgggaggccgaggcgggtggatcacgaggtcaggagatcgataccatcctggctaacacggtgaaaccctgtctctactaaaaatacaaaaaattagccgggcgtggtggcaggcacctgtagtcccagctactcaggaggttgaggcaggagaatggcgtgaacccgggaggcggagcttgcagtgagcctagattgcgccactgcactccagcctgggcaatagagcaaaaaactccgtctcaaaaaaaaaaaaaaaaaaagaaaagaaaaagaattcccaaatgacaatgacacaggacatacacacagttctgctgacacccggcactttattagtggggaaactcgccttggtctggcagagactgggatcaacaggaccagcacccatctcgaggtggtattttctgtaagatcaggtgttcctccctcgtaggtttagaggaaacaccctcatagatgaaaacccccccgagacagcagcactgcaactgccaagcagccggggtaggaggggcgccctaggcacagctgggcccttgagacagcagggcttcgatgtcaggctcgatgtcaatggtctggaagcggcggctgtacctgcgtaggggcacaccgtcagggcccaccaggaacttctcaaagttccaggcaacatcgttgcgacacaccggagaccaggtgatgagcttggggtcggtcataagcgcggtggcgtcgtcgctgggagctggcagggcctcccgcaggaaggcgaagagagggtgcgcccccgcaccgttcacctcgcacttctcgaagagcatgaagttgggctcgaacccaccaccaggccggacgtacttgagggaattcagaatctcttcgttcttggcgttctcctacaggagagaagggcagctagaacccggggtcaagaggaggagagaaacgttctaaccacaaacaagggagattttctatgagtcaccgggattttgccctccatgcgcaatcccaagggcggagaggaatttcagcagctacgagcaacagaaaggaaacgagagagtagccagactctccgcgcatggagccgacggcacccaccagcacaccgccggcgcccccagccactactgcacgtccgcccccgccccgccccgctccgcccggcgcacctgatgcccaaactggttgcacgggaagccgagcaccaccaggccccggggtccgaggcgccgctgcagctcgttcatctgggtgtagtcccggaccgtggtgcctcagagggacgccacattctcgataagtagtaccttgccccgcagggagcccaggctcacaggctccccgccggccagcgggcgcgccgagaaggcatacaccgactgggccgccgccgccgccgccgctagccgagcagcacacatggcgcaattgtccaagaagccagcggagcgccccgaacaagcactgtaaggggaggccagcaggcgcctccttttaactggccggcggcgggtcacgtggcacaggcagttttccgggcctgagggtcccgcctcatccggcccccgccctacccggagggctcggcccctcctcagccaggaaaaggctggagagtgcgcccgagcgggacgcgtgctcctcctaagccggaaggagcagcaggcatgtctggtctggcccaggcaaccaggcggcagcggtccaggttacccttccaagggctggggccctcgagggctccgttttttctcagaggttcctgagttaggatgtggggtttggcataggaggctggtgggcgacggcagcagctgcaggagctgcccgtgcacaaacagccctcctctcctgtgccatgttaccggcagtgcaggggacagccagagggatctaggcttccggtctccctcctccctgtctccaaagcggcaccgccctcgtgcgggttttctaaccgggcagagtcctggaagctctgccccagcctccttaagtggagcccagtagctcgccgaggccaaggaaacgctgccggagtcctccctccctggcctcctcaggctgcattcaccctacccccaaatctgaaccagaatgcggtacagggtaatcatttccatgttgttgggagggaccagattagctgctgggtgggtgggaggtggggcacaagctagtcctttgcactcaacaaacctctccagggtgagctaggccaggaagtccttgcatcctcctacccccagccctggagagagcaacacaaacaacaggatacaggaagtttagaaaactgcctttattctattagtagttggaaaaattaactggtacagaaaaaaagtttagtcagctggagagaagagagactgagtgccacccatgagaactggtggctcctctgggagggaacctggatacagtgaggagaaaagagcactgtgaattagagccagatgcttaagtccaggtgagacaggttatgccatcttccaaagtgtctaattgcctcaggcgtgaaaccaattcctatttacttagcccagctccatggggtactgagatacatggggccgaaaaggggtaatatggccatcttttatcagaaaaagtgacaaaacgggaatttaaaaaatgaattttccatctgactttatttccaaatacactttcttttttaaaaaaccaatacactttctttgaggatgacagtattaggaaatccaattatacaaaaaatactacatctagtctggggtagatatatttatttttggtaacatacattaagtggcactaattacacagtaactataaggtaactaacatgaaaccacagaactgtaactctgccacagctgcatgaacttgggcttttctggttgagcccattttcaaaaaactgcccaccccagagctatgccaacaaaatctgttacggagtaaagccctgaagtggtgactcaccagagtaccttgcagctgacagataataggcaggacatgttagttataaagtagttacagcctaattcacaaaagttaccaactgtttctctttctagaaagaagcaagaagttaagaaattccttgaattagcgcctggtgtgtcaggtgggagtgcagaggagggctgttagagcagtgtcaaaaggaccctggtgggccagacgggttggacatcgttaataatcatagttggcttctaaatactggtagcaagatgacttctgatttgtaatcttaggtaaattatagataaatgaaaaaggccagtaatcatacactaagattaataaacagcacttcaaaattaaccgcataagggctgtgcttgcagcaaggtttcacaagacaaggcacccagattttttcttcccacgtctagcttgcagagcagctctcgtagccatttcaaaaacctctctcactccatctttggtctttgctgaacactccatgtacccaaaagcgccaatcctgtttgccatatctctg

SEQ ID NO: 315733 - DNA, 4001 bp, Homo sapiens
acaacttttaatatagttgaagagacatgggatgttcttaagttatatgacaagatataatatgatcatgcactaaagtactggtacagtcaacatgatatgaaagtctaaaggaaggaaataggactgtggattagtgtgatcagataaagcttcacattggagaagtgttttcagctgagataaaggaagaatatggggaaatggagaaatgggaaaagttgaagagacggaaaccaactaaaaatacagaataaatacatgaacataagtaacatttgttttgaagtcagtagtctatcagcctaactgaaataaaaattttaagttgcgaaatagtagagataaatatagacttgatggggccacaacacagatgccttgaattcctccccagggttccctacaataaataccacttcctttttcttcctccttttttcttctctgtctagtaactatggcatctttgtttgttatgttatactagatgaccttcattacatttcatggaccttcaaagatattaagaacaaaatgtctgcactttagaccactagttcccaatctactgtgcccagattaccaggattccacaagagcagatgatgaaaattcagatattatcatcagatattatcagataatatttcaaaaagtcaaaaatatccaattatctaaaataaagctattcaagttaagtgaaatggcaagcctctgtttcgagctgaactatattaacctacaatggataacacaggctaataaattctcactggaaataatatatatctaacaagtagtgatgttttaatatttattatttaatgtataccccttatttggtagacaaagtctttggaagcacagtgtccatagaaaaaaacataaaaaggaccattagtggtagagaaaattaagaaaccactgtccttgatattaaaggaacatacacgtttattttctgacttccactccaaatgagtcatttgttgtgaactttttttcacaataataactcacactactaattaactcattcttccaaagaaattatctttgaaatattttagtgtcttactaggatggttaactttataatgagaagcaagcaatatttcaatatacttgtgtaagactaatcttttataaaaacttttcttaaataatagatatcaaacgattacaaaggcagactaaagcaaaaagataaaccaatgatgaatactcaggcagcttcctaacagcaaaagaaatgaaacttattagtaaaatactaacaacaaaaatgtaattttatttgactacataaatgttttgaatattgtattaaatactagcaggaagttaatagcagggtaatcacaatatacttttcaagctagtaatttaatatatataacaggttaatggaaaataaaatataactcatgtaattcaccatcttgtagatttgccaatttgttaaaaatgacgttttctataaagttgtccagttttcataaaaatgtggttatttacagccatgttgaacattcaaacattcaaacatatgcccagcctgatattcataattctttcaataatcagcagcaaaaataatctaccttagtagtcttcaaaacaacctaaattttaaacacaagctgaccacccacctgcaaaccaaggagagtctctccctttcagcctacagagtagtttaacaaaataaagatgaaccaagcagtaatcagataaggctcaaaagtcagaagatcaatttctggcccagaaagctgtgtattctaagtatgttgccatctctatgcacagcagagctccaaatatttaatgacaactatgtaaaaataatcactgcttcaatctctcagttttgctatgagaagcttttctaatgtagtttaaagcacattatctgtcacttcctggttgtagtaccagcactctttccaaggttgcaggtcagaatgcagaattggaagttatacctcactctacaggttcctaagccactcctacaagaagaagataggtaaacaggttttattaaagggacagttcctaattttctctgttctacgcacagattagaaaaaacaaaatgaaagtaaaaacatcttgcttatgctaaattgatataaaacagctactgcaatattattttaatctcatctttaaaattaactatattacaggttaatttttcttctccatgctagtaatttctatgcaattctgggaatgtcatgattacctcttcatatactacttctctagtactgacgtagtattcctatcagactcttgcattaatcctttacaacaaccaaagattctatctctgagtgctgtaaatgtaacgtaaggaaatagcaggaagagccagctgttcaggtggaataattctactaagcacccggcacatctctcatcactgaaaggtttaaggcaacattttgattactcaataattcttttctttgaaaatatttctgactttggtgtatttagaataattccctggcagtgatctggactataatagacagtacagtttcatctactaattcctatttatttctcagaagaaaatttttcttctaaataaagaagcaaaatttgccctaatttctacctagtcattccatttaatttagtgatgtgtgtaaacaaatcaaaggctacttgatgaactccacggatcaaccttttgagggatgctaaaatctcatcattttatacaatggcagaatgagatagagtagagtgatgctgaaaatactactcattcaaatgaagaaagcccactgtgggggcagcttccgctgtctaaaaggcagtgcttttagcatattatggtagttctcattgactgaaattgtaactaaatatatttacgatggtgaacaaatagctatgagaaaatatacattaactgtaccacaactgatatttatacacatttttgctaaatataaaaatccttataccaaaccactgctatgtagggcagagctaaatttagtaggcttcagagggaaaaacagaacctaaaactgaaccccaagaaagcccaacacacaaagagaaaatagaggagtggccagcaaaaaaagattcagggaaataccagaaaggtaagagaagattccagaaagaatgtcatgaaaggcaagggaagaaagtatttcaaaatagagggagtatacagtggtatctaacgctgccgaaaggtcaagtaagatgagcacaggatgagcacatgtatgtcaaatgcaagcatccagaggaatgatgcagcttgccaaaccagttccccatcacttgagcatgtgtgtgtcatgagagtgaggcagggagaggagatacagtggggaaggaggaagcagccaggtcatgaagagccttgtatgccatgccaaagaatatggactttacattgtcgaaatatcaaaagccacccagtggtttcatatagaaaagtaacaagttcagaattatgattttaaaagacatgattttaaaacactactatttgacatcaacctcaaagacagatcaggtgttaaaaagagataagaagacattggtaatggttcaagctagaaatgatgatgaccttggtgaccaactagacacggctggctggcaaagaggcaagaaaaaggatacatctaggtttctggcttgggtgactgggtagaaggcggtgtagctcactgaccaagggaaaatagatagaggagttctgacaatcaagaaggtaaaaaagagggaattatataatacaaacacttctatactgccatgctattacatagcaaacgtgacaaatagttaccaatttcatattcattttttttccaggtaggtctgaatgttgcatttattagattgatagcactactggaaaacttttggaattccagtaactccaaaataaaagaacaaggggatttgataatgttgcgcaggctaaaggagaaagctggatgaca

SEQ ID NO: 315734 - DNA, 4001 bp, Homo sapiens
ctcacaaaggagctcacaaaaggaggatgggctattgtgccacacatagtgtaaggcctaccaccttggttaaatttctgaaaataatttggtctctgtcacccaggctggagtgcaatggcacaaacaggggtcactgcagtctcaacctcctgtgctcaagtgatcttcctatctcagcctcccaaatagctaggaccacaggcgccacacaaccatgcccagttaatttttctttcttttttttttttattttggtagatacagggtcttgctttgttgcccaggctggtctcaaattcctgtcctcaagcgatacttctttctgccttggcctcccaaagtgctagaattacaggcatgagccactgcactgggccacaatggctgacttaaattcaaattcaaattcaaatggtgcaggtcagtcatcaaacatcaagggtgaaaaaaagacctggagccagttttttcctgaggctctcttaagccattttagtgctgcttgagaggcctgccttgctctccctggagaccttaattatgtaagtaaaagactttttcagggccgggcgcggtggtggctcaagcctgttatcccagtactttgggaggccgaggcgggcggatcatgaggtcaggagttcaagaccatcctggctaacacggtgaaaccccgtctctactaaaaacacaaaaaattagccgggcgtggtggcgggcgcctgtagttccagctactggggagtctgaggcagaagaatggcgtgaacccgggaggcagagcttgcagtgagccgagattgcgccactgcactccaacctcagggtgtgtgtgtggcatcatcagtttctactccaacctcatggtgtgtgtgtggcatcatcagtttctacacctgaatcaaatttgggatgggggtccattctggctttctggggtggctacagtagattcctgtctctctgacttattagctgtgtggtccttagcaaagtcaatctctgtacatctgttccttaactctacaatagaggaaataattttatctctagtctagacaataagcttattgagagcagggatcatgtctgtgttaatcaccatctaatcccgaacacccagtgccagggacataactgaatcagtgactgattgggttcatgaatatccagcttgactatttcatagtaatgtttttcaaatcaagtgaaataacactcattcatctgttcattcaacaattatttgtgtacctccactaatctgtaaactataacgctcttcagaagatatagcactgaccgcagttctctaaaagtaaaatacatacacacaaaccaatgtagaaggaggatggtgttcagaaacgcaggcgcccgtccaacaaaagcggggtttcatcctgaatattaataagcacgctttccgttttgtcaaataaggtagtaaacaaataaaactagactagttgaaatcaaaaacttggctgacagcacagtgatttaaactatccggacctttacaacagggctgagaatgaaaggaagggggcaaggctggaaaaaacgttgacagtgggtcagaatcacgaccatggggcctgacccaagggggcctggggctgagacatccgcaccaggacatttcgggaccaaattcaagccctcaacgcccacagggaagcaaatgtccccaccaccgcccgtagggaaagggctcgcagaggcacaggaaaccgtttcctcggtaacaactttccgtattactccaaagagcacgaagaaaagggaagggagggattaactgtaatctgagaaggttcaagcaatcaccgtgagaaaaagtaggctaaagccacagatgggaacctgccccagcgaggcccgcggcttacctgacggacagtcggagcgccctccatcgcggctccctccgccgccgcggcaccgccccgcgcgcaccgcaccgcaccgccccgcgcccacctccagcgcgcgctgcgagttacaggctccgcgcgcctcctccgccggccctccgagtacttccagccgcagctccttgcgccctctggcggccgtgaaggattcctgacgatgggtgttaccgggttagcctgaaggcttgtctttctaggggtcacaatgagacttccctattcccaacctcaaactactgtgcctcccaggaaatggcataccctgccccaatgtgcgaaaaggtgaattgctcggaaactttttttttttttttttgagacggagtttcgctctcattcctcaggctggatggagtgccaaggccccgtctcggctaactgcaacctccgcctcccagttcaagcgattctcctgcctcagcctcccgagtagctgtggttacaggcgcctgccaccacgcccggataatttttgtatttttagtagagacaaggtttcaccatgtgggtcaggctggtctcgaactccccacctcaggcaatccgctggccttggcctcccaaagtgctgggattacaggcgtcagccaccgcccccggccaggaaactcttgttccttccaataaaggattgaagttactgattaactgctgtacgtattgcagattcttggttctgtaaaccaaaaataaaatgccgaggcccacccccagccatctaaatggacccctcctcttggccaagagcgttccaaatttaacctgaaaatctagttcaggccatgatgaaagaggggattggacatgcctcattaacatcaacacagaccttaagtctgagaagaaatatttatcatctattgcctcggacacctgctacttggaggctgcatctgcatgataaaaccttggtatccacaaccccttatcctaacccagacattcctttctactgataataactcttttttctctttttcttttgagacaggttctggctctattagaccagctggagtgcggtggcgcaatctctgctcactgcaacctccacctcccggactcaaccaatcctcccacctcagcctctcgagtagctgggactactggcgtgtgccaccatgcttaactactttgtttgtttgtttgtttgtttgtttgtttgttttttgagacagggtttcgccatgttgcccagactggtctcgaactcctggactcaagcagtctgcccccttcggcctcccaaagtgctgggattacacgtgcaagccacagctcccagtcaataataacgctttcaaccaattgcaaatcagaaaatttttttatgtaccaatgacctgaaagttcctccttctcgccttggagctgtctccccttccagattgaaacaatgtaaatcttacatgtattgattgatgtattaggtctgcccaaaatatataaaagcaagctgtaccccaaccaccttggacacatgtcattgggacttcctgagactgtgtcacaggtgtgtccttaaccttcacaaaataaattttctaaattaactgaggcctgtctcagatatttggggttcagagttcccaaccaaacagctataaaaaagacattctaagccaggcacagtggctaactcatgtaattccagcactttgggagactaaggtgggagggttgcttgtgtccaggagttcaagaccagcctgggcaaaacaggggggccccatctccagaaaagagagacagagagagagaaagaaagagagagagagggaaggaaggaaggaaggaaagaaggaaggaagggagggagggaagacattctagaacaattgaggaatagtgaatatgaaatggctattagagttgatgttacaggataattaatgatttatgtatacatttatggatattcatttatggataattaataatttttggcagctgggcgtggtggctcaagcctgtaatcccagcactttgggaggctgaggtgggaggatcacctgaggtcaggagtttgagaccaacctggccaacatggtgaaaccc

SEQ ID NO: 315735 - DNA, 4001 bp, Homo sapiens
agagccgtttctggggcatttgctggaactactggaaataggctctctttccttagggatgactgagctggttgaccttaagtttgaaggtgccaggaactctcaaggagaggagagagtctgcctggaaatgaagctcactaaagtgaagcagagcaagctacgaagagacccagagtcctaatgatgttaattgagcatctggatcccactgtgcctgaagctccatctttacactttttggaagaagagccttggtgctgatgcaaactgaagcaagtgtgatcatgaggttctgtgacctggggaggagacctagggtggaggctacagtggtgagggtagaggtcaagtaagtcatcagagagagaaaatgtcagagaggtcaggaagggccttgaatgcaaggcttaggagctgagcagatttgtgttttggcaagcttcctcccatggcagcaaaggggtggaggccaggccagggaggagactgggcaaaggcccaggcagttgatgctgaccctgggccgaggtggaggtcacaggcccatgaggagggggagacacctccctggcagtgccccaggtaaggtctccagggcactgctgcctttgtggccctgaccacagcagaccaaggtgaccccactcacctgggccttgggttgaaagaacagatgtgtccaggccaagaaggcagagcctccatttacagtgcagttgccaaggatgggtgggcccatcgggtcaaatcccagctttgtcacttctggctatataaccctgaacaagtcacttagcagctctctgcctcagtttccccaactgcaaaatggagagaataacagtacccaagtggcagtgtagttatgaggattaaatgagaaaatgcacagaaagcttagaaaagagcctggcccagaggaagctctcgacaacagccagctattatgattatgagtgttatttttcctgggtcgctaaggctgggtccagaggtgacctggctctgctccttgccatgggaagggaggtgggaatcaaagtccactgggccctcagaagcagggctgggggctctgcagtaaaagtcatcggggtgtcaatcccagctcggccactgccctccctgagccttggtttcctcctctgtccactgggaccacagtccttgcccttggagctgtggtgcaaagatatgtcaagagcgtgggaagaaaccagtgaggcaaccccagggcagtgaatgcagtatgttctggtccaggccccaagctccctctttggaggaatagggtgagcccaggctgaggctggagagacagatggaacaatcgtgtctgcccctcccctgggtcccagcctcagcacacccaggaatgtggcagctgtgatcccccatcccacacattcccagagccccaggggctcaccagtcagacccccaaaccagagtttctcctcctgccgagaaccagtctcctgcccagctgtgccagcacaggaactcctcaccaccaccttgcccatgggccttgggctctcacccctctgggtcggacactcactcccaccaggcagctgtgcagatcctgagattgggcaaaaggcttcgctcacacccagataggaccagccttccccctacaaggctgagcactgccctcggaacctccagacccgcctgttctgcctgcctgtgctggacagccctgggggaggctcagccatcctgctacaggacagtggccagggtcagacagacagccccagcaagtgtcctgccccaccctccccaagccctgggtctccagggagtggcagtcccaggtctcagccatccagtcccctctctctgggcagcagctccagagggatctatgtgttcagccccatcactctgcccacagaccccccattacgtacccgcctctccaggggtctcccggctgagcccacacagcatgttcgctattgtctcccctgctgcccaccaactccctcgggagccacgctgcttggccctccctcccctccccagggaggggctgtgggagggaagctcacagctcccactggctgggcaccgagtccacccactgcagcgggcggctctctgcttaaaggggacatggctattgtcaaggctggctccaggacagggtccaacatgccccacccctgcagcctgggtctggacagggggtctttgaaggtggcatgcctggggcttcccccagggctctcaggcagagagagagcctgcttctaacttgccctgggactttggcaaacgactcttccctcactaggcatcagttttttcatctggagacagggaacagtgctttccaaactttttttttttctaaacggcagattccaagagaatttgcacagaaccccaggacataagctagatgaagcacagactctttgactgcatgaacaatgccagggcgtctctgtaggtctcagcttagaaacccttgagcttggagaccctccagggccctcccaccaatgttccaactacctctcctaggtatcagttttccctcggtaaaatgggacttaggaaagatgaacccggcagcctgccacgtggagtggccacccagctttttgtgaagaccaagtgagctgggtggaggatctgcccgcctctgggcttgataggcagggccagttggtcacaggctccagccacacctggcaggctctgccccgtcccagacccagctgggccttagccttgcacactcctgggattcctccacattggctcaggactgaccaggctgatcttaatggacacctgaggctcctcctctacctgtctgtgagaaggggtggcaggctgcacccaatttcccctgccctccatcccaccagtgtgtgctggcaccaactgagggtcagacaccaagaagggtggggtgatggtgacagggcactgaatggtggatgtcaacaacctgtacaactgcacagtgcgtctggcaacagagaaccagacagacaaggcctggctcccatggagttcctgaccgcgtgggaacacacgagcctcatatttcttccatgtgccctgcagctagtgggagagggctgcccggtagttagggacccgaggtttcttgtgggttccctccagaacagtgaccccagcatggaatttagccacaattcctgggccgccccacactggctcctgccagcccaacgctagtggcacctttagaataatccaggttctaaatctggggcagggctacttgtgcttttgtatctgcaaactcaagaccctgccctgccgcccacttcctatggtgccttcctctttgggcaacttgagatctgtttctgggggaagggtccaggtgccaggcaagtttcccttgaccagcagtgatgccaaggtctcagccacagggtgggtggtgagggtcagattgcagagggaagacctgaatttagtggacatttcctggacgactcaaatcatgcagggacgggggtacacgcactcaatttggccaccggtaccctggcagtggtcagggagaggctcgccatgaagaccctggccttcaccagggcacagaggccactctggagcagtcttagcttcaaccacgcgggaaggaatgcatgtgaactgctctaacagatcctcaccccactcgcctccattccctccatctacagcctcttcagtcagggaggacaggcgcatggcacccaggcagttggagttagatctgccccttctttctccctctttctctttctctctttttattttttattttttttatttttttttgtgacacagcgtctcactctgtcacctgggctggagtgcagtggcgcagtctccactcactgcaacacactggctgggctcagatgatcctcccacctcagcctccctggtatctgggactacaggcaggtgccaccatgcctggctaagttttacattttttgtagtgatga

SEQ ID NO: 315736 - DNA, 4001 bp, Homo sapiens
cctcactaggcaggccttcataaaaaaatacaggaaaatatcaagtgttggcaaggatgtggagaaatcgaaacctttaagcattgctggtgggaataaaaaatgtggaaagtttggtggctccttgaaaagttaaacatagtatcaccatatgccctagcaattccactcctgggcataaatccaagagaaatgaaaacaaggattcaaacaaatacttgtgcatgaatagcagcaccatacacaatagccaaaaggtgaaaacagcccaagtgtccatcaacagatgaatggctacatgaaatgtagtacatccatacaatggaatattatacagccataaaaaggaatggagtattgacacatgctacagtgtgaatgaaccccaaaaacattctaatgagtgaaagaagccagacacaaaaggtcacatattgtgtgaaacacccagaataggcaaatccctagagacagaaagcggactagtggttgtcagggctggaggaggagagggatggggaggcactattaatgggcacaggggtgatgagagtgtcttggatccagattgaggtgttgcttacccaacattgcatttgtgcgaagtgccactgcattgtacattttaaaacagttaatggttagttttatatcaagcaaattttacctgaaatattttttattacttaaaaacagaaagctgggcacaacagtggtacaaaacaggttctcaaccttacttcaagataagtgttttctttcttttctttctttctttttttttttttttttgagtcttgctctgtcacccaggctggagtgcagtggcacgatcttggctcactgcaacctccacctcccaggctcaagtgattctcctgcttcagcctcccaagtagctgggattacaggcatgtcaccacacccagctagttagagtattttcttaaatatccatttttcttgaagtgccttcattatcacaatttaggggaaacggagatcttctgtcacacattgctatcattctctgaagtgtccaggcatctcagcacgttcctaatggagacccatgacagagtcttggccaagtataaattttgcttgtctctctcatgccatttgtgttttatttcacaccatggcacacacaaagaagggggctggggagacggggctagaaatcctccacatatggtgctgaaattagttctaagtaactgagatttaaaaaaagaaaggcaacattaccccctttcatgctctatgcttcaccttctagcctggctactgggagacacttacctccccaaaaccacctttccccagcactctgaactcagtgaagtacttgtctgacactggttgcatctcgaagagtttccactgcagaaacttgtcgtagaaggcgctggtcacgaaatccttaaagggctgctcttgcaagaaagccatggcctcagccttggccagcgtcactgcagccactcgctcttcctcagtggtggctgcttggcacttggtggccacggcctggctgaggaagggttgcgggttccccggggcaggggcactcgcacaagtggccaccagcccctgcagcgcgctgtctttggtgggtccctcctcggccagctcccagttctgcacgtcctctaggaaggttgccgccttgcggaacgtgggcactgtggctaggaagtcacggaagaggcggcgaccgatgggctgctgctcacacaggctgtggaagttcagggacagcttctggcggagctccgcgcagccctgcagcccgggcagggccaggctacgccgccgccgctgcagctctttgctgtcgcagtccgagggcttccgggcctgcaggtaggcggtgttggcgatcaggttgtccagggcccccatgtccaccatggctgagcacggggcgcactcccagggaaagcacaagagggctggagggctgctggctgctttcccttcccgggtgagacaacgtccaagggatttacagtgagtcctgtggcctgtgggtgggacccgtggagggtgtgaaagaggtttctcttgtaagaagctttgactggctatgtatagcccgccaggaactgcacacgataggtcatgctcccacctgccaaggcgaaagctgctgggacacctgccggggccacctcccccactggtcccttcatcttagggtctttctccacatagccctgtaccctgaatatctagctagaactgtgttccaaggaagtgatcataccgttgtcatctaatttgttgctgatgcagtagtttaatctgtttctaattttacttgtttcctatcagcctcaagctatgtaaactcctaggaatagcaggtcaggcagaggaactgtgagaagtcagagcagtttcctcccaggttctagcagcctgacacgaagagcaggttacagaggggatgttgtgagctttgagtcccgagatgtgttcccagaggccctaaggactccagtgttggccagggcagatgcaccctgaatagcttgcagaaatcctgcagctgtcttagctctgaggagtctgtgacctggagtaccttgggttaaaagaggggccatctccgggcggatcacgaggtcaggagatcgagaccatcctggctaacacggtgaaaccccgtctctactaaaaaaaatacaaaaaaaaaaaaaaattagccgggcttgatggcgggcgcctgtagtcccagctactcgggaggctgaggcaggagaatggcgtgaacccgggaggcggagcttgcagtgagccgagattgcgccactgcactcccgtctgggccacagagcgagactccgtctcaaaaaaaaaaaaaaaaaaaagaggggccatctccacccaaaacataccatgaagcagtataagcagaaaaagccatattcctgaaatgaagggacttggcctggagtgtctgggctctgaatgagacaagaattttccatgatcccaaagacagaaagcacgccactcacggcatgcggtcgcgactgttccaagggcacaatctaacgagcagactctgaatgccaaggagccttcgcgtggagccaagagcagtgaagtttcagacgtggcccctcaacatctttgcccatgcgccccaccaagcgaggaagcttccttccacggaggacgctcggagctgtcacagacctcggcctcatcaagacagaaattgatctagacagagatcaggctaagaacttctgctccaaaaataacaacctgtgccccacagggaaaggatactcaggctttttcttcacaaagcaaggctaaggcagcttaaaaacaagtcattcagtattatgccaaagtgtttacaagcaaaaaaaagagagagggagaaggagggggaaaaaagctggtcagtctttttccaaacaactgctagcatacactttgtgaaaacatagtcatgatcgccttgctctgcctgtcagagcctccgactgttcccctagagcacatacacacttggcctcatgctaccaggaattatgtaatgaactcgtgggtgccctttggctttgcaccgctgcgctggaaacgatcacctctgccgtggagatgggcgatctgcaccggtgcccgctgctctgaaccatgctgtctgctttgaaaccaacacgggaaatgttggatacttttctgttctttatatgttaccccggtccacattgttcagtagtgagaaattggtctgataatttcttcggaggagcaaatgccttttcccgtggttcttaggaatgtagtggcagcctagcaaggtagaaccttgagaaaacggtagcattgatatcacagatatatacatatttatatatattttttattttttttaatttttattttgagacggagtctcgctctatcacccaggctggagtgcagtggcgtgatctcggctcactgcaaactccgcctcctgggttcacgcc

SEQ ID NO: 315737 - DNA, 4001 bp, Homo sapiens
gggtcagcaccttcttggctgggccctcagccacagcaccccacagcagcagcagtgccaggagcgcaagcagcgatcccatggccccaaaggggatggatgggtcccgcagacctgggtctccaggggatgagattagaagcagcgaaggcaaagagaggaggaaacagggaccaggaaaggacagacaagaagagagatgcgaagggacccagctcctgcagagagatagaaagacagaaaaacagaccaggaaaagtggaacctgagagcagctgccccttctgactctgcctccccacgagcccctttcctaggtactcaaaagccagggagggacaggatggtgtcattaagtaggttgagaagctcctgggactcccctggacctgtctctcagccctggcctcagcttggtgagagatgggccatattcccctaccaaactcagcagtggggagagatgcaagcagtgaagtcccaggcagaggacaggagaccccagccaatgctgacccctctgtaattcaaagggtgtccaagaacagcacaaacctcccaggaccccgaggtcaatacctttggaacagactatgtcacagtcacaaactcagaggtccccatcctgagccttggatttccagagagaaggaactgctgtctcaggacccaccagggaagaggaagggaagcatctctaagggacagtctccaacccgtggggagactggagcccatgtgaacacccaagggttctaacctttggttcttaaaaagccatccccacagtttgctgactgaggaaggaatagagacactaagccctgggaatgagacagcaaggtggaatggctggcctcagggagggtacccaagtggctcaaggtcctaagtcaacagggcaagcagatgttcacgtatgtgtgtgtcagggttgggggctagagtctccaaacagtgctgagggtgagagtgcgggactctctagctctgtgtagaacactgcttgagattttgtgcctctgttttctcttcactcccgacccagcagagaaagtcaccatttccaatctccccatcctcagcttcagggccctgcccaccctagccatggccctcagagaccccctccctgtctcttccccactgcgtccaatcatttgtaccccagttgccttcccaaacacacaccccacaaaggctctcacaatcacacaggcttggaaaggctgggagagggacatacctctttcctcagaacaggaaaggaaactgagtttgaagaagggcagcaactaactcaaggaccccatgtgctggccacggaggctgagcctcttcattttgccccctcagctccccagggcaggggcactgggctcctctggggatcaggaaagcagcagcttacccaggcaagcgagggagaagcagggaggaagaccagcacagatggagacagggacccagatgggggctgaagccaaaactggtcaagtcgcaagtctcccagaggggaggcccagacggaagctcagaggcaggaaggggacagaaacccggagtcagacagccaggagcctgggccacaaaatctgggcagggagcgagcaagcctgagaggttgagacaaagacggaggcacagacagaaagaaggaccagaggacgctggagcaggaggaacgggggagtgcgatgtggggcgtgcgttttctggagaagaaaggcgggacgcccggggctgtcttcccgcttcccggagctctcagggaacgctgtctggacacagcagcgcgggcgccccacaacttgagggcccgcaggaccctgggacgtgaggtaagggccaaaaaggtcggcagcggcagcggcaccaccaccaccggctcaccctacctggcgcgctggctctggcgcggagagaatcggagtggagcggggggcgcgaggctccggctcccgctcgctcgctcgctggctcgctggctctgcgctctccgcccgcccgctcgccccgccgctttcaatcgcggcccgccccgccccgcccccggccccggcccgcccccagcccctcctccgttcctccagacgccaggtctcctgctcccaacccagcctccgcctcctctggacactccgcgctccagcttttctggggacctcagggcctggagctgtccgcctcgtggtgctgaatccccgagcgctctcgctctgcgctggagcgggtgcttcgtggcccactccgccccatagtcagactaccacctagagagcataggtggggggcggggggatgccacggggcacggggtggggaaggtcactgcgccccgacaggtgcccatagtgctactgcagagtggaggagctggccttagtgcaaggggtgcctctgggggataggtaaaggggcgcgtgggagacgggtggagtctattctccccactcagcgatttcagctgggtccacatcccaggcctgagttggaggcatgtgtcctctgccacttttgagacctggagccagagtcactatgaggaaaagattgggggaagggagaggtcagaggagaatggggcctccccttccttcctgcagatgccctttaaacctgccacccactcccatgtaaaaagggtatttaagcaaggagagagcaacctgcaggaagggctgcagaaccaagtactagggtcaaccctgagggagtgttagggatggcaggggcatctgggaggggaggggcctagggaaaggcttctggaactggctgctgcgtaggagggagtgagagctggagcccaagcagagggaggacagctctgagaagattctcttgactcttccctcccacagcaggatggggaaggacgcccctgggtagagggtagtggataagctgtagtgccagactgtgctgaaggaatggggattagagagcctgtgctatctgcccctaacatgtgcacacactaacaagtgccaaggggcatggcatccctacacacattcccgacactgccctttcttccacaggtgtcagtggaagcaaggccagctcagatacatgctaatgaacatgccaagcccagacccctcaggcacacacacccacatgtgcgtgtggcagtccgtaggggtgcgggggtgatcaccaaggacgagctttttccctggacacagaaacctgatgtcctgctgctgtggaaagaatacagctttgaaacgaaacagacacataaaacccaaacaaacacaagccccatcactaacaggagacaaggtggcagtgggagacagacatgctgtcttccacctccaactctgccaccggctgctctcaccctctctggctgcctcagagcaacagctccctggggtaggtgagcaatgggccaggcctctggagcagaggggttgacagcaggagggtgctgaggtgaggagtcacacactccttctagccacactcccaacctgctcaacaagtcagcctcacaaaaggcacagggctgtaaacacagatatggctgtgtacagcatcagccagaaaagcccatgatgtggcctgcagcaaacaagctgcacagtcgcagcacatggacacacagttacacacagctaggcagccaccactcccagctgtgtgcacacggatgaggacatacacttagccttacacagttgtaaatgtggacatggccacatgcatagtacacataaacatgcaaccacacacagctatacttgtagacagccataatacacatgggcacacccctgcccctaagaacatgtgaccatgtctacacacggctgcacatgtggacacagccacatatatacagctgctcacacaaggacatgccacaaatagctgtccaccaagacatgtccacacatacatggccataattatggatatacggctgcaggacacatagcaaatgtgtgtttttatatgtggacacatagcaaaacacatagctttat

SEQ ID NO: 315738 - DNA, 4001 bp, Homo sapiens
acagagacagaaagagagagtgatgcacatatagggaaagacacagaggagggaacctacaatcacagagaccctgaaactcaatttccaaaccccaaagccactcattcctacccagtgcagctcaggagccatggggcagaggctgctggagcaggaggcgagagaacactgcggcagaacccaccgctcagcggccccggatccgccttcctcccattttttctccgtctccctccggcaccggagcaggaggaccacggggccccgcttcacgcacccctctgcctcccaacgggcgccttcatgcctcgctccgggaatcgtcctccaagccgaggatttggcttggggtctgcgtcagggagatagtgggtgaggggggcgggggggaggagggaggaggcagggagagcgatttcgtttcgcgtgagctcatccctgggctgaggtctgaagtggcaggagtggaaagctgatcgcccagctccggccagtggccggatcgcacatgtaatttagacggtgcaaaatattgcccggagcaaaccaaccgggggtcacgtctgcgggcagcatctctccacctgaggaaggtcccagcacctcgcgccctgggctctcgcggaggctggctacaggtcgggaaatcagcccgagggagatgcggacttaacatccacatctaggttaagacggagccctcgatttaagaagtgcctccttaaggctgtctccaaatttttcaagggagtgcaggttggcaggctggcttgggggtgggaagctggggagttgggaaatgcccggtttccaggcatcgtctcatctttcctattccattctcctaaccagctctcctaggagcctggcacttttacgagcctgttttcggaccatatttcaccctaatgcaaacccatttaaatcatcgccttgtttttcgcagattgcttcttgtaaatggggccataaatccagatgtcaagccggatggagtggagcgtggacaggggagagatggaagggaaataaaccaagcagggaaggtatctcctcgagcggggtgggagggattcggcaggatctccagggaggaaatgagcgaaggctgacctgacccgcaccaccggagtccaagccagcttttagggttaagggcgcaggtagccactgtgtgctccgccccggagggagcgcatccctacctggaagagcctcaggatgttggctaccatgatggagaccgaactccccgaagccccaatcactccaactactttctccggcttgacgaaaaccggcggttcgccgttggtgcagcgcacgtcggaggtgtccttctggatgagcgcctggacgaaagtaagcgactgttcgagcgcgtaagtgtccctggaacaagtgtccaggatccgcgcgcccagcgtcacgttgggcagtaggttgggatcactgttgatctggtccagggcgtagagcatcgcttccagcctgtggatcccgttttccctcttgatgtcgccgcagggcactccgctgggacccttggcgtgcacggggaacagccccccgagggtgacgtccccctcgatccggattgagtgcggggcgtacatctcctggccgcgcgccgccgccgccagcgcgcacaggagcacctccagcacgcagcaggggaacttcatcaaagtcaggacgcggagcagcttcctcagctggaccatgctgctccggctgctgcggtggcggcggcggcgctggagggaacggtggtgggctcgccgaggtccgggcccttcagggcgagctcctccgggaaagcccaggggctcctgcaggcacggagggtgggggaatccggggaggggcgaccagagagggtgaggggtcccgcggcgcctgccagcctggggcgcctcgcgctctcgggttagccggccggcgcgccgcgctcgcgctcaccggcttgctgctcgctctctccaacagcccagcactggggagagggcagggactgctatcgctttaaatggtcgttcggctccctctcctcctcctcccactccctccctccctcgctggctctccttctctccccacccttcccagcgccagccctccccactggtttgcatcatcacgcagggaggggctgcgtgctgaggtaagggggggaaacgggtgggcggctggggaatggggggaggtttcctcggaatgggagtttcgtggtccccagggaatctagggattgcggggagcaagcgagagcctagctctcgaccctaactcactgtggaagcctccctacccacacccacgttctgggcacgggtgtcatcagccgcgggatggggcgaggacgtcgtgctgactgctcccaaaccctaggtccggagcctaggctcttagctctgggagaaagcgaggcaggggcagagaaaccagtgagggaggggcgcgggaagaccctagctagactctactcctgagccgcctgtgctagttttttgctaagaaagccacacgtgcacacaggagcctgattcttgacttaaagacgctttacccaaaggggtttccagggccaggagctgagcttggctgcagggaaacagaagtcaagaggagatgctaggcatgggagtgcatcactggtcttcagtagtcactagagtcagagctccttgaactgacgcgtttccccagcatgtctgtgtcaaaaacctcggacgcatcccttctttttacttcgttgcagagagggaacaactgagaactccgcagagcgcactttctagcactgacaggtgtaagactccctcctacctatttccagagatgcatctggtgcacctggtggcagtttttgccagtaagaaagagcaggaaagaggtgatggcaggaagaagaaagagggggcaggcacaagtgtccccattgattgggaatgcctttctttgtctttctctggctggggtttgggggcaaagtcaggatgccagtacaggttgcagtgcaattgagaagctctttatgagcggcgtctcctcctgcaggtccagaccgcatttggcccattaaagcaacaagtggctctacttccaattcaaggaaagtgaatgtctgtccttggggatgggagcggacttaaggaggttaaaccatctcttcctgaggctttctgttggagggcagcaaaatcatattatacagattttagggcggagagaaaaccagaaacaagactatactttttgtttttgttggcaatgtaacgaagaaacctatcatcatcgtaggggggaaaacgtcaaaaggcacgtagttggttgtctccgccaccgaatacttgtgtgctctcagcacttctgttcctctgtctgggttttagtttccccatctggaaaatgatgagattgaattggatgccctccaagttatcttttaactctcaaatcatctgttaaaataggtcatgtcccttcggccatggtgctctttttaggccaatattttctattgtattatgtgtagaccagtttttgtatattcaaagaacactatgatggtttcctggtatagaaggtttttggtttttgttgtcgatgttgttgttgttgtttttcctgtcagggacatcccatcaattttttttttttttttttttttttttttggatatgcccctcttacttgtttcaatgttcatggtttcaggagaactgatcccactgcctgtgatcaagtcttggctaatcagaacatcagatccttctggctgtagtgctattccaggttgggcagaaagtccaaccagagccattcagggataatccctggactttcgctggggcagccaggatggagacatagggttatcactaccacataggccatctctgtataagtcagatacaaaggggccccttccacaaaatactttgtttcttttttggaaaattgttgtgctattctgattttgtcaaaacaagata

SEQ ID NO: 315739 - DNA, 4001 bp, Homo sapiens
tgttttaaatcgtcctttttaaggaacccgccagaacatttaacaggtaatgaatgcagtagcactccaaaattgaacttaaatgtaatgagccagtgacaacatttaacttagtatttggcactatgacaaaacaaatctcaatcaaaacttggacctattaatacttccaagttaacttttgattaaacataaattatacggtggcaggttggtaatgtcaaaacaggaaggttaagagataacacatcaaaccacttatccaattgaacacaaatgcatacagagatgttactgctgctaggtatttattggctcccactagtcccttctaaagagagaaatcaatggcagcctccaaatgtgaatggttactgaggaagttcatccacagattaagaacaaatattatgtgtagtcatacaaacaagaaaaaaatgttgggagggtgggacatttaacgtctctattaagtatatcaaactatgataacccctgagacctaaaatattctctcattccaaattccaaaaattctgcaaatgtgcataatggtttagtaatcaaatcttgtccttctctttattctaaaggatgggcaagtaaacactgtcatcactactttaacgtggaaacactcgagcacttgatgaaactgactaccaacagcaagaaaagtacaagaaagcagtttgaaatcgaatcatccaaataaatatcatattatctcaattcaaggttaatgagaccgggggagggggtatgggaggagtaaaaagggagctgcttcatccttgactgaagataggttttgcccttttccattgcctgtttatcaggaggtctaataatttcagatcctggtatttcgaggtttcttattttaagggcgaggtggaaaaggggtgtaaaataaaaccaatactcactgctaactttcatgctgccaaaagctgaaggctgctgcaccggcttgcagctctccgcaaaggaggtggttctgggccgccctgacatgatcactctcttcgcgaatcaccttttccttccttcctccttttcttccttttgtctttatgttggggtgttaggttaacgataaatgcagcattaagttctcccacagaagaaaaagaaaaagacttcgtcctcttggcttttcactccttttgtatactataaaaaacaaaacaagcgatatatttctccttcaagacagatcggcacggatatttaacatatagatgatttaggacttgggaaaaaatacaattctttcccctccctttcctgggaggagagaaaagagagggcaaatcctaaaaaaatatgtatcacgtgaaacgggggcaaatacttgattgaaaatgagtacttcgaatattatattttcctcggggattttttttccgagtcaatgaagaagggaagcggcggaaggatcacgagtctcacgcttgaagagaaagggggatgggtaggagggagggagagggagggagggggtggctcggagatgcgacgggaaacgctgcagctccggcaagccgcgggatccggcgggctgacggcaggggcccggcgaactagagggcggcggagtcgcgagtcagtcagaggcgggcggtggcggtggcggcggctcctctcctcattgcgccaggagcagctgcaggcggcggctggatccagcggccatggcggtggcggaggcagctcccttcagaccccaggcagcggctcctcgactgttccccattcgccggggacatgggaacccggcaaccgcttccgtccctcggggccccctcccccgtccgcggcaacagctcggccgccctcccgcccctcggctctgctcggtgcccgctcaggaagtgtccgcgctttgccccagcccagagccctgtcagcggctgcggggccggctcctcctcgcttccttccttcctttgtcacttggcccgggcggcggcggcggcggcggcggcacaagcccgcattcgcccgggtcaggagctgctctgtgtgaggagcgctgtctgcgcagccgccttgcacttccccactcctcctcccccctcctactcgtcctccacctccttcctcccccacccagccttacaccgcccagcgccccgccgcccgcgtaacaggcgtctgggaatcgccggccgagccccacgctcgcccgcttcggctgggagccgaagcccgaacggagccaatcacggacgtcgtttgtttgcggctcctcccggaaaaagccgatcagcctgagaaaccaattagaaagtgacgctgggaagccacgcccaaagagcggaaaatgccgaaggtagccgaacggaaagggtgaattcgccttgttcggtggctggctggaggagacattcgacaatggcaacagtggccaatcagagtcgccggcccttacgaagaggcttgaagagttgaggacggtgaaacccagagacgctggtgaaactgcacggctgggcgccgccgccgctttgtgattggctggaaaactccgctgggagcgtacctccttcggtgattggtgaagagaagggggcttccgaggacagtctggccagtcaggacttcccctccctctccaaggtggggagaagaaagcgaagggagggcgtctataaagcgctgtctcattggcctgaagcttaggcgctggagttggggcaaaagggagagggagggagcccgaaactcgcggcggcggccaatcggctctcactgccgtccaatcgcaagacctagctgcagtgtgattggccttcggccccggtcccaggagcggggagatgcctgactcgggtcgtggctgacgacccgacggttcgcctgcggccgcctccaacaacggtggaaaccgcacacagggaccgcgggccctcggtgcagcaaatcggaaagtgctgcggtcggcggccctgggctctgagcgctcaagcgagcagaggggtggaggggctctccccacccacaggaggctctcggcggggcgcagccaattctgcgcgcccaaggctcccctctgccgtggatcgcgtgtgccgagtgttggcctcttccccgaaagggccagacggaccaagggggccttcccagccggctgcaagctctcagacgctaaaatgggaacaaagcttccagaaaggcagcgcctttgggcggccgcgccccgcccagccgcgggggccattgatacagaggcttgctgcgcttggtgtgcgcggcccggccgggcctctggaaacgcccatgagaaatgagctcatgctggatgcgcgcgctccttgggcgcaactgcccagcgcaaaacgggccccgaaagcaggtgaggggaaatgccgtcaggccggatatcctgaagcctccgaggaaatgggggggtcagaggagcccgtggtagctttggatcttttggaactagggtgatctataaaagtgcagcttgagaagatttcatacataagaccagcgtccattgttctaccatagaaccagttcctttggtctgctttagaacagtgaggtatggctacgtcaagataacagagaaagtagaacagacagttgccatcctgattgtaatccagtggtgcctgtaatttctacctgcagagtcatctctttctgttaagatgctgtctccagaaagcacatgttaaaggacctatatttgatcagattacctggctcttgctttgaaacactgatgaaggacttgggacagaacaaagtaagctttgatggaagacaggaaaggtctagatagtgtttgcagattcaaatggctacagaggccagacaagtaaagcaaatgagtgagactggccttgtgtaagacaatggggaatgatagggaaaatggcaaattggaatatccatgccataactaaaaggaacagctgctcaactctagcagattgttgccctcaggaatgtgggtccagtgttctcagatgttcaatttt

SEQ ID NO: 315740 - DNA, 4001 bp, Homo sapiens
aaactaagaaggcaaaaaaattgcaagaagagaacagaatgaatgaaagttattacagaaaaaaaaatcaaaaggacccaacaaaatatattggatacagaatatgagagtaggaaaaatcttaaatagctctctgttttgagccagcgtagctaggaaaagtactgccatgagaaataggtgacccctgacgaggagcaggaagaaatgaggaaatcacttttagaagtgtctttgaggaaataccataggatattcctctgaatatgcccagcaggtagctgaacaaatgaaactagagctcaggaatgaaatcaagctgtgccactttgttcaaaatctctgcattctaaaatcctccttcctgaccactaccttctctcctccatcacttcccactcacgctgaatctccttactcaatctctagaggtcttaggtaagagttctcaaactggcagccccccacgcattgtatcacccaaagaatgtttcaaaaattttctgaattagttgtcaacatttaaaaattgtaagagttcacataaatttcaacttccagctcctcttgcaaaattggaaatatctgaggaaaaagtgagcccatgttcccacatggaaacaataagctgaagccgaatagcagctggcgttattagggaaggagtatggctggtctctggagacttctgagcgtgggacctcctaggacctttgtttcttcctttgatctccatagtccatgagtcagatcccagcctcacctccctaccccagcccagacccacgtgtattttaatcatatcaacatttaaggactactgtgcaccaggcacggagccagagaaacaaagttgaaaagaaggcaccctctgccctctgtctaccctgtcagcctcataaccagccacaccagcatattctcaattccatgagccacatgtgctttccctgcatcccaaggctttgcacatgctgttccttctgcccctacagctaagcccaaacccccttctcctaatcatccttcaagtctcaaatgatatttcctcatggaggccttcccagactccccattaagtagcatacaatcatcccctttcacgtgttccatggctctttcccccttcttgtactttctccatgtctatctctaagaccagacttcatcttgttcaccaattaatttccagcatctagcatagccagacaagtacttccataaaactttccatatgtctcctaggcacgttttgttccaacatggctcatcttgccagcttccccctgcttcacttcctccactcttgtttccaaggtagaatcggacaggctactgggcactctcttcttaaatttaaaacagttttaagcgggaggtgcgtggatcaaattcaggatgttaaaagattgtactgactgcagagtggagaaaaaaacaagaaaagtggatgcgaagagaccagttagattacttcagtaaatcgccactccagttctagaacaacttgggattctacacatctaactgcggtgttgtgttaccacatttcatggcactttccacgccttcacacacacagcggcaaactaccgcgaaacctccggacccagctgccctccacgagacgcgttcggtgatatgcactcctccccaatgcgagactccgagaccccaaactccctcggactctcccagttgggtccagggccacactcggcgcagccaagcccgccctacccgaggtcgcacacgggccgctccggggtcaatggttctttggaggaccaagaggaccaaggcaacagggtaattcattaggggaggatagttaagagggagcgaaaggaagaagaaatcatgaaatgcaatgcccggccagggaactccgaacaaggaacagggaacaaggtttaccaaggcgaatcctggaacactcccactacagctgcccccagcgcttcaactaccggcttaaatgaaccacgccccttgcgcgacaaagaaaacgcactattcctgcgaccagctggggaagcaccccgctaccttttaccagaccagccaatgagttcagtgaaaccttcgatcaagacagtcacgctccgagtggccaatgaaattgaaggctctgccctccatgcccaactctgattggcttacaatccaggaacaggcgttaacccagggaaggcagtggcaagatggcgtccctggatcgggtgaaggtactggtgttgggagactcaggtgagcggcttaccctacctctggggctccagacacttttgagttacccagtaaccctccccttagcttccttccctcaacttcctggctcctcggcccgtggctgaagtccctcccagggcctgaagactacacttcccaggggactttgctccgtgtgacgacgcggtggcggcggcgtcgtcgcgcgggtgggggtcgcggagcccgggtcttttgccttcgcggctttccgcatcggtctcccaggcgaccccagcctagagtgtattgtcaattcttttattaaaaaaaaaaaaaaaaaaagcaggcattgagtattgtatggggttctatgttaagggtacagaagttagtaggaccgtgccttcaagagattttgttcattaaggaagtcaaacgtgcactgagaaacgtgcactgagaaacgtgcactggcaagcgcttcgcatgtattaactcatttaattctgagacagtcctgttatcccattttacagatgagagtagtgaggcagagagatgtaaatgacagaatccttttgaacgcggagtccacgaacttaaacgctaagttataattatgcagtgacatattgggtagtggtcctgttttattcttaactgagcttaatttcctggttctcgtttgatcttcattgaaaacctattatgtcctagactgtacaatagagaaattaaagtaagagttttattctgaagcagctaggatttaacgctgagcccaatttaatcctagtgttaaatatatatatatttttttaatctcagtggatgcaaaaagaattcttttgacacctgggacatttgagaactacagctggcgtctggatttccagctcccacctcactgcccttatcttttcttccataatccccaattcagctctccttagtaacttcaataaatgctgaccttgcattttatagaagcgctcctctggagttggcctaagagcatgtgttgtgagcaaagacgttgtgctagatgcttggaggtggagaggcttgaaaacttaatagaaactaaataaaattgtgggcagcaaatataggttaagaatgttttcacattgccctgaggattatttgcattatgaaatattttacagagagcattatttaatattcccctaagaaagttgccttttgaaacttaatgaacataatcacaatttatgtcgacttcatttctatcaggtagcttgaagtggtgccgaagttaatttaataaaatcactcagttttacagataaagtaattgtggcctaaagggacttggcaagagtatcactgagtagaatttacaatccagaactaacagacttcttcatgatacgttaagtgggtgttttgtgtcctttataattccattttctattgtatctaacaatcccttcatattacaaactgttgcaactagtcaatttattttctttccaacaggcactgtattaggttctggggttataactgtggaattaatgcgtcatataacagggatagaattagcagctacattaaatgtggaaaagtaatcaggcaattgataagcttccctactgcccgcctcccctgttatggtttagttgtaaagcagaagacacagctgtgatggccaggaaagtgattgatgttgtcacacattcactaatgttaacctttatgtgcaaagttagttattgtctttttatctttttaaaaggtaattttgtcagtctccttttaac

SEQ ID NO: 315741 - DNA, 4001 bp, Homo sapiens
aaattctaacacagctaatatttattgaatgaattaaatgtgccaggtactattttaagcattcagcatatattttcttattcattttttacagcatctaggaggtaggtgatattatccccattttacggatgagagaacacaactaacccaaaattatacagctagaaagtgaaggagttgggatttgaactcaggacatgtatatctagaatctgtgcttttagtttcactacgctactcaagaatatatgcaacttttattaagcatttcatatttacaaagctttttagagtaaaaactagatgtagttcaacagaactagatgaaaagtacaactacatgtttggaagcacattttctcaagcactcccatggtatactgtaacaccactgcaatttaaaaacttactcttttcccttgacctctcttgttccaattaagcttgtctcctctgtagtgtggaaaacaacagaatattctcgataataaccattaatacacatggctctgcttttgaacatggtattgggggagggggtacaatgccaatcagttgttctaaatgacggccgtactgccccttgagggacattttggagattttaagggcatttttggttatcaagacaattgggggacatttagtgggcaggggccagggatcctatcctggaaaattctggtcagttcttcaaaattaattgatctgagtcctgcaaaaattttaaatgctctgccagagcaaatctaatgctaatatgtagataaaactgaattttaaaaacgaattacaaaaaagtccagtaatttagaagcttaaataaaaaagcaatggctgtctcaaaatcattaaataattgaggtactctttgaatcctgactatagttccacatatatttagacgaaatatctctgggcaatggtgcacttagtgtaaatacatatggagagttgagatgccttttagcagacttagaacagaatatcaataaattgtaggacatgcaagaatgctcactcatgaaatttcactaataaacgttgttataaaaatttttccacattattgccatctagagattattatttttgcacgataggaaatttagattaggcgaaagttacttattgataaggaccatctcatttgtgaaactattattcgtttcctattcttcactgtctaaattctgtctaatttgtctggcatgttttccctacttaagttaaatagaagaaaaaaggagagttaattttttgaatgcttaatttgggtttgaaaagcttttaaagcattttgaagtcttctatattcattccaaaataatttaagctgtatacaggcagtctctgcttacagtgggtcgacttaacgatttttgactttaccatgggtttatgggtattgactgcattttgtacttaacaatgggtttctcgggtatccccacgtacagggagcatcgacatatgcctattgagttaaaataatatatgcgccaacataaagctagaaaatacaaccgcaaaatcacccgcgagccggacggccagggaagcggttagcgctgtgacgccggcgcgcaggtgaaccgtgagaatcgcctctcacctctggccgcggaaggtccggggcgtggtcgatacggacggcggagctgacgtagtcgatgcggttccgttcagtggccgtgaagatgttgtccgccctggctatgtcctccgggcttgggtcaaagatacgcaggtgaaggtcttgcctcccgtagggggcgaggaaccgctctacttcctgcagcgggtacagcagcttcctcagctgctgcttcggcagccgcagcacctcagcaaaagcttgggacgtgctattatagcggctcagtcgctctagcaccgcaggcatttcaaagagtcttcccgctcccagccgcagcccgggcgccgccattctcccttcccagaagacgggcagagagattttactcctgtggcctgggttgcgcgtgcgtgacttcccgctgccgcgacgcctgctgggagttgttgtctcctctggcctcgctcgttccggtctaagtgttttgccttcagtgcgcgggaggagggtggaggcaggcggtgacctgcggggaacagctcactgggtttctttaacaccgtgggcttaacgattatgtcttactggaaggatgtttaacggtttgcagaggtgaaagacctatctggccatgtggcctttgagtctcaagcgaaggactaaagtgtgaagctccgatgcattccaggaacgtttgattttcacagtttttggttatcttattaactgttgacgtttgtcgtaagtccgcagcactaggataaacacttttgcaaaaaagaaaagggctgatgagaaatgtgattgtaatagcacctcgttttcgtggaagggactgtttgtatttccgccttcactataggtgcaggaaatgtcattaaattttagagatttcttataaaaacagttttgcacagatgttacagaattgtttcgtggacgtttcgtaatatcatcttatttcaaaagtttctccctaaagtcgatcagtactgaaatgggagatacaggtatcataatgatgaaatgaataactgaaaaatattcatatgttaaaaaaactaggttttctaaaacatcagcagcccagaaagggtaactcatggtttcttgagctattccccaggttgttcagtaattaaacagtacaattcttgaataaatatgatacaaaaattaatgaacagaacctgcgactttgagggcagccaatacggcagcctgatgtgctgctggctggctaattttttattgctctttgcattagggtttggggtgcctttctgttcgctattctctctcctccatgtataaaagtgtgtataatactctgttgtatacatcagaaatttgggattctcattagtgtgtgtttcactcatccatgtgaagagatcaccaaacagtctttgtgtgagcaacaaggctgtttatttcacctgggtgcaggtgggctgagtcccaaaagagagtcagcaaaggtggtgggattatcattagttcttataggttttgggacaggcggtggagttaagagcaatgttttaggggcagagggtagatctcacaaagtacattctcaagggtggggagaattacaaagaaacttcttaagggtgggggagattataaagaacattgatcagttaggatagggcagaaacaaatcacaatggtggaatgtcatcagttaagctgttttcccttctgtggatcttcaggccttctggatgtatacgtgcaggtcactggggatatgatggcttagcttgggctcagaggcctgacgctgtgtatgtaatatactttgaaagtgcttttatacatgccattttgttttcaaaccttggaaccccaggtttggaaataagagcataaaagagttttggcgattcttagaaaggttttagaggtgttccgggattaatagacattatagtattcatttaataatcattcatgtttctgaattctaaatcattttggatttcacctgataggacaaatcattttagaattatttgacaggacagtttttgcaacaaattgtcttgtcatgcaaagcttgaaggatcaaacggtctactggaaagaagtatgactagtaaaaccacttgacaatttatatatttttttctctttcacttcatcttttaaaagcatctgtgtaaacaaagcatataaaacttcaggatgatttagagttaataatacactatgttttccctcaacatgattaaactcataatttgcagaagttcaaatatgaaacatacatagcagtgagacctactagtgagacaggtgagggctagaattgggaggaattagtttataataaccccattgtagggctgcagtggaaatcatctggtctacagggaattatcaaagccca

SEQ ID NO: 315742 - DNA, 4001 bp, Homo sapiens
acaccaaggacacacacacacctgtttggacattgtccctgcttccttgacagtgggcttcatctgacagcagatccttgcttccacccaggactcctttccacatgttcccactcttgcatgtgaaccactgacatgtacaatgcgttcacaaatactgggctagcaacctaacggctggcatgggatatgacatcaacgcctttggataataactgtaaaactcgatagctcattttctaacctctcaggagtacttagagcctaagaagctgctgtctagagcaacagactttcatcctgatattgggctgcttatagcagccatacaaagagtgaagcacagagaatgacagagagaaagaaagagaaaactgagattgagagctgagagagacatacacagggagaggcaaataaagacaacgtggcatcatgcttatagtatctggaacacacttccaggattaataacaaaagcggaatctgtcacattttcccactgatttgtcagctccttgaagatcgccttttgcttgcattgacactaagtaaaattgatgaggaggaaagcactgtcatgctgaacaggcagtgcttaactcatatttggtaacaaagcacaaaagaccataccataatgtcctaaagaaatctgttcctgacattgctacaaggattaaaacagctgttaattttgcacaggtttaatcttcccaagttcctgcctgttacctccttttaagtcacctgcttcttggtttaaagtattttgctaaattctacacatcctatcaaacaaccagttttttttttaattttactcaatttacctccccttctttctcttctattatcagttggatggccttctaaagtcattattttctattagcattttctctgttcctttttattctagtcaatatctacacattttgaaatatacaaatctacagtaaaataaccaaaataaacaagtaaaagcaggcagaacctgagcctgatatttcaggttgttgcttttttgtctctcttttttttttcaattccatatattcttttctcttctttgtattttttcaagaaatgaaattaaatgcactacagctcctcaggaatgagtaaattcaagataaaagttgagtaacaatctttagaaacaaaaatttgtctgaatttaaaactgttaagcttccatttttcccaaactaaattggtaaactatggggaaaaaagtaatatgaagcagtttaacttttgatttgagtacagacaacatgttggctaatttgtattgattatatctgccaatctagatgcaatcacacttttaaaagcagagtcctgtaatttgcttttctataaaatgtcaccaatgcattaaatacttcgaaaacagtctttgtaaatcaatctgtacttattagatttatttaaatgatagcattagaattccatgccgagatttaatctggttttaaaataactccctacatgcagaacacttcctagggtgggagaggctagttcccaattattttcatgccgtcagtactaaaagtatttaatgactcacttacctacaagctgtgagttgcctgaagacctctccattcagtgggatgtacacattttacttaaggctattttacaggaaaaaaaaaaaaaagggaagagtgcagaaccacagcattttcaaatgaaatgaaaaatgaaagatcttaccttgttcgtgtcaaaggtattataaacttgatcaatatgtttattggccttctgattcagaccttgcagacccaaaagtgtcttaaattcatgtagtgtttgcaggccggatggatattccatcataaatgttctgtaccacacatgggtctcttgtgtaggaactgctttctgatcaccagctatagatttgccattccccatcttgactcacagtctacagcttttcctcaggttgttttcacttaagtttttgctggatttagtcccttactcctcactaaaactgaaggctaacatatgccctcagaaagctactctaaacctcttacagcaacaagctaaataagaatagaaagccagtgagattaacttatctgcccagttttaaaaccaaggtcacttggcacttggtaactaacatgcttacagtcatgcagagacatagttttttgtgaagggaacacgcaatattttagagagggtgatccttgttatattgttagccataaattttgcctacattattgagtggtacagtgggtctaatggcaggaactttgagttgcaatcaggaagcctagattctatgctttgttctaccacttattaactatattgaaacattacttacattctcgtgtttcctcatctgtaaaacagtaataaaagtttctgccttttcatacctgagtattgtgaagatatatttagataacattttacatgaaaaaatcatacattgagtattattaaaaagaagtctatgtataagagagaaaaataggtaaagagaattaaatagtagtaagaagaacttcagatgtagtagtcagataaaggaacatattgggctgtgtcttctggcagtgttcttcctttctctcccccaccctctgttcttacctttttctggtctctcaagtatctacacatgccactggcctgccagctttatctcactccagttttctaatctggctaatcttgtcctaaccaagccccatttgccaatgaacttaagaacagggtcaatggacctaagaactgtatccaaggtccagtagtggaaatgaatgctttgtgtggtcctcaacccattttggtaccaaccatacttagaaccagaaaaccccaggtagaatataattctgttacccctaaattatagttctcctttttttttttttttttttgagatggagtctcgctctgtccctcaggctggagtgcagtggcatgatctcagctcactgcaagctccacctcctgggttcacgccattctcctgcctcagcctccagagtagctgggactacaggcgcccgccaccacgcccagctaattttttgtatttttagtagacatggggtttcaccgtgttagccaggatggtctcgatctcctgacctcatgatccgcctcagcctcccaaagtgctgggattacaggcacaagtcaccacacctggcctacagttctcttttctaacctcactcaattctttcttttattttcattttggcccagctcatatatctggtctctgtctttgtccctattccttagtcctgactgattacctgtttattatgaaacccttgattcctaagaagtagccatcatggcctaaatgaactgccttgaccagaagtggtggtggttacagtgaatatggttaattttgtttcaaacatatcaatgtagactctcaatgggacatttcgatgtcataattagagttaaataaaagggctgggcacagtggctcatgcctgaaatctcagcactttgggaggccaaggtgggtggatcccttgaggtcaggagttcgagaccagcttgggcaactggtgaaatcccatttctactaaaaatacaaaaattagccgggcatagtggtgcacgcctgtaatcccagctactcgggaggctgaggcaagagaatcagttgaatcctggaggcagaggttgcaagtgaactgagattgtgccactgcactccagcctgggcgacagtgagactctgtctaaaaaaaaaaaaaaaaaaaaaaaaaaaaaaaaaaaaaaaaaggtgaaaataaggtcatagaatgtaaaactcacccatttgaacccatttgaaagaattacttgaaaccattaaagtgaatgatactcttttttggacagtaaaaaggacaaaggggagacagtgaggactcagcctcgggattattcagctaggaattagagaaatatcctgctagaattttcaaaaagcattctttggg

SEQ ID NO: 315743 - DNA, 4001 bp, Homo sapiens
actgtcaaagggttatggttgggcccggcgcggtggctcacgcctgtaatcctagcactttgggaaaggctgaggcagatggatcactgggctcaggagttcctggccaatatggtgaaaccccgtctctctactaaaaatacaaaaatcagctgggcatggtggcacacgcctgtttgccagctacctggcaggctgaggcacaagaatcacttgaatctgggaggcctgaacccgggaggcagcggttgcagtgagcagagatcgcagcacggcactccagcctgggcgacagaggaagactttgtcacaaaaaaaaaaaaaaaacaaaaaaaaaaccaaaagaaaaacagcggtgggggggaaggttatggtgtggattatgtagttgtatatgttaagtgttaactgtgactatttgtatgtactgcggttagcactgtccctggcaataggttagcgatgttaaggatgacagttattattatcttaccagttgtcccatcaaacttagcaatcatattaaacttgcagttaaaccctaattaatctcttacaagaaactccagtatagaagaggggaaatcctattaatttcctaacaaagatatccttaaagactgtatacatccagaaagggctgtaaagtgttataagtactttaaagcgacagattgttggggttttttccccctaaaacttgtcagtacccatttgtactgagacagaagggaaacaaaggctgacacagctacttcttgaggtttcgtgtcttttagttacagtaaaggcaccaaagagatttagtcattatggtcaaaaataatttttcaactcctttcaggttgaaattaaggagcccagcaaacaaggacgttgcaatggcagttagaaacaacagttttgaaagggcagatgaaacagactcgctacaagacaaggggattgttgaaaagccctccacaacaaaggaaatgaactcaaatccctaacctgcggggcgttccagcaaccctgaggccaaaaataaagctctctgatgaaaagcctccgcgtgttaggctttgtgtagggaaagagagtatcaaacagaaggtcgaaggttaagttgtttttcttgtaggaggaccctttgaccacactcgagcctgaaacagaatgaggatctggaaacccccactctgtcttttctgtgccacgcatcagtcctttcaaggagaaaacttctttttaataaacttaggtcaagtgtcccttctgttctaagcatgggggtactcgaggttaaatgagaggctgccagtccttggtaaacatctaacttttccaactcaaccatatctaaggtttcggtaaaattctccagtgaaacatgagaattagataaaacattcttgcaccgtgatggcttttgacaaattaaacaaagggtgcatgtttgcaagagtgcaaaaatacgccttgccttgacagttaaaaaatgtaatgtacgaaaccactttccttgacacttcaaaaaatgtacgtgattatcaacaccgagctgttagggggactccaccaaggtgggtcttcttttctatcgggttaagaaacagaagtgggcagcccgtgggtgaaacttggaaatctgtctctccagcgcaaagcctcccttggacttggcacgggtgtagggagcgagacacgggtccgcagatgggattctggggttgccacgactcacctcgccaacttctccagtctcgcagcgccccggcggcccgctcgggggcgcggacgcgggggccggcgcctccgaactcccgggctggccccggggagggcgcccggccccggccagcgcgcggggacaggcgcggggtggcgctgcggggcggacgcggggcgcgcgggcagcgctgggggctcagcgcggccagcgcgcagggacagcagcgccagcagcagcgcggccagcgcgagcaagagcagcgccgccgccttgctgcggagcttcatggtgcggcgcggcggcggcggcggcccccaggcggctcggcccctctgcgcatcgcggcggcggcaggatgagtgcagcagcgcgcggcggtcgcctcctccgcccgcccgccggggactggggtcgtggcggccggcgggcggccggcggcggcggcgacggcgaaggaggaggagagagaggagaggagggggaggcggtgagagctgggttacaggaggagcagcctgcgcctaccgtactgtgtggagtagccgcccctccgcccgcccgcagccaggctctcgggcttctggtagctcagactcaaaaccacttcattcattcattcgttcgttcgttcgtttacttccccattcactcacacacccatgccatccactgttcccgctgattctctcataccatgattcacttatttgttgatgtattccatgtgcttcctccttatttattttatccatctatccacacatttgtgcacttatccacacatcctttcaggcaggaacatctctgtcctgtttgcccagtgcagggatctgcgggtggtggtgcccaataaatatctgttgaataaacccctattgccgcctctgtcttgccacctccctttttcctggaggaggacatattcaacaaggacacatgcaaaataaggcaaagcgagtaaaagtaacacgtgattagtagttggggtttcagactcaaaacaccaaagtagaacttgggacagctagactggaccgaaccgatccatgtagtctgaagaaattagagaatgaatttcaaagtttggatttgaaatctgacactgtgcttaactggcttggtgatcctgaggaagctgcacaactttcttaagccttaacttccttacgtgcaaaatgggaatgacaatactgctcactacagaggcgttttgtgagcattaaattaaataatgccttcaaagaaactagcacagtgcctggctcacagtcggtgcccaataaaagttctgtaatgattagttcaataaaacatagcttataatatacacataaacacacattttattttctttctggcacagatttgagatagagtaataatttcacaacacaatgtaagaatggcttctttggagactttaacagctgcaatcgccagatgaaggtcgtaatttccagacgattcttccaggggatccccagttacaaatctgaaacattaggacacatcctcttatgactcacggtgaactgacagccaggactccattaactctcttttcagcacaccacagaacaaagaacactagttaagttataacaacgtccctgagtttttcagttttttttttttttttttttttggatcactctgtagcccaggcaggagtgcaatggtgcaatcttaactcaccgcagcctccgcctcccgggttcaagccattctcctgcctcagcctcccaagtagctgggattacaggctgcgccaccacacccggctgatttttgtatatttagtagagacggggtttcaccacgttggccaggctggtcttgaacacctgacctcaagtgatccgcccgtctcgttcttccaaagtgctgggattacaggcatgagccaccgcgcccagcccgtccctgagtttctacaagattccatgttgctttataaataatctaaaatttagttatattctgaattattctcatattagcattttattttaattccttgagaacccattgtattaaaagttctagagatgagaatatttagtaatttggaagctcttgccaagcagacatctaggaaatggcagggtgcaagttcagtgtgggggacatgttgtaggtgagtaagcgcaaagaatccattagttctcaaagatgagggagaaggttccatcctaccaggaagcatctggaattgtgggaaggctgacaggttctactagcatatgcaaaacctcctgcaatgctcaggacataccaacaacgaaaa

SEQ ID NO: 315744 - DNA, 4001 bp, Homo sapiens
agatttggagatcacccaagaagccctaaacaactgcctgcttttctttggagaagaaggtgcaggtccatcctgcaccctccccctccccccgcccaaaccaacagacacgcaccccaatctccaataatcacttagttgccagaagagaaggtaaatacatggatttttcctcctgctgaacagtccccaccctcccaagacccctagcacaggcttcaagatttctccagtcattccctgggacaattctgggccatgttccatctccaagaaacattagcaagttggtgggcatccaaatgcataggacacttcggatcaagttctggtaggagtcagttgcttaaccagcgagttgggacattttgtcatgaagtccttctctttctgacctggctttccctcattctcccttgcccgttttccaaggtggaggctggaagcagtagaaattccaccgagacatgagaggaagttgtgggttgcctagtgggccagcgcatccctcggctgctgacctgagagccatcttcacacattttattaggccctctcccacggcaggccaactactaagttgtaggaagaccagttccccacccccgaagggccaccagcttcccagtcactcacactctaggaaagctctgaacagtggcacctgtcccttgacaggcccatcaacatccgcctgtacttgcttctattatcttcagcccattataacatgggtaacatcgctgtcaatctgtaccaaaaatacttaagctaggcaaaatgaatgatcatctaactcaaatgaagtccaggttccaggcgatcatggagaaaaatgtaataaggtgagcaggattcaaggatttctggaagcaaggatatggatgatttccaagattaaataagggatagaacacaggttagaacaccagactagccaacattacaaatgaccaagaaagaccaatgacagctgggtaggagtttaatcttcctaaagacggctgaactctgggttacacctgcaatctttgtggcagttcaactgctgtaataaccctggctattagcctcaatgacacggaaggaccagctaactcggagcttcccagtgctggggctaactcgtggagtggcccggacgcctcgcaacaagtgaagccaaagccggcgccctcccaccagacggggctcgcgcccggggacgctagtccgactcccggcttcccgcaacccggccccaaaggcctaaaaataggctcagcgtggcggccggggccggggcgggcggcggaggagccgggcggaggccgcagtatccccgcctcggagcccctgcttcctggggttccgggccgccagaggccggggcagctccccacgatgccgctgcgccccggactcccgcctggaacccccaggggaaccggctccccacccccacacggccccgccgcagctgctccgcccgccggcccttcgccgtgagagcaagaggaaggacgaggagacggaagcaggaacgagagctccggccgagggcccgggctctgcccggctgccccatccctgcactctggggggcggcggggcggcagctgacgcaggcagaaacacgcccggctgcggccagccagcaactttgcggcggtttcgtcctgccgggaacactccggggctgagggcggaggagaagggaggcggcggctgggcaggaagccggggtcccggggctggcggcggcgggctgcgcggcggtacctgtcatggtgctgccgggtgcgcaggcggccggggcagcctcaggttggtgactcagagaagccggcaccgggagggagcgcggccagcgaggaggcacggcggggaaccgagcgtctgccccgtgcgctcttatagcggccgtcacgtggccgcgcacgctctcgctgccgtccgcatcctcccagctgcgcggccggcaggggcggtggcccgcggggctccgggtcccgcgtctccctcggctcctcctccctccctcggggctaggctgccgctgcggctgcggctcaccggcgcccctgctcctacttccccggggcgcctgcccttgtcaaccgcgcgccccctgtcgccgctaaacctgggagttaagggggactttggggctgagtgcggcatcaaactccccaagaagccaagggttagggaaccttaaaaaacaagcaaacaaaccccagattactctagttaaaatcgtgagtctgaactgcttgaatgaaacgtaaaatttacgctttttttgcagaatttcgatcagcctctataatcattccttagtgtactcacaatggttttgtacccttaacctaaaaaatatagtgaatatttcgtaaatgttaaattcttggagccatctgcatcaattaggcatttaagtgcttcatttaatccttgtacgaactcagtgaggtgttacatattcattttacagacgaggaggaaactgagctcagaaaagttaaattaacttttcttttcttttttttcttgtatttttagtagagacagagtttcaccatgttggccagcctggtctggaactcctggcctcaagtgatctgccagccttagcctcccaaagtgctaacttttctatagtcatataatataaatggagaaagtaggatttaaaccctggcagtttggttacagaatcaaccttcccacccagaaagtcttggtgcctcttgtacacaggggctccaaaaaggttagtaaattattgtaactgtggttagccaatgctaacctgtttcacaaatcttgaaatggtcaatttgtcatttttctaggaagttgagaaatagctttaatgtgatcacatccttctctgctccccatccccagtccaaacacagaacaagcctcgggtagttcagttctctgcaaactgaaaactgaaattgctcggtaaatgttgaatgagtactgcaaagccatttggaaaccaatcaggaagttgacatcagttcaaaaagcaaaacagatgcttaagaataagtgatttatttgcaaaggtggtactgctgtcctcaaaccagttatatcactgtttcctcgtgtgtgggtgtggatctcctacatcagaatcacttgggggcactggttaaagcgtagatttttgggcctaagcccagacctcctgaatcagaatcttaagggtaggtttattttggtgcaaaataattttgaaatccatgcattttttttttataatatgtatattctatggactttttgaagtcgcgtcatatactcttgaggtaatgaaatactctgtaggcataatcattatatatttttaatataaaaagctgttcaaaatatattatttgaagaaaaacaggttacaaaacaaaaagaatcttaagggtagaaccttaaaatcagtattttaaatatcaccttccaggagcctctcttgagtccttcctagtcttgaccatggcctagagaccgctgatcacatgggaggccctcccagttacttggcattatgtgcttccgttgtaggaaacagaaaagtggaaagggcaatagatgggtttccacttattcaaaagatatagacatagaagagttggagctctttaaggaacacaaaggctacacttttgtatcttaagtggggagagggaaaacaaagagaggtacttctcagtctgattgctcttttgcagactgagaggtgaacttggaagagtgagatttccatctttcacccagaaccctcctgccatcagctgacccttaaccatctacttcttgcagcctactatctcaggctggacttagccagggatgtggtgatggggctgaaagggcaaagccaggaggtagaactggggacaactgggaaaaacagaaaagcttcccttagaacaagctcctctctgctgcaactcccaggacgtttaagtaaaaggaacggttaccacagcttcccttcctgagct

SEQ ID NO: 315745 - DNA, 4001 bp, Homo sapiens
gtggtgtgtgcctataggcctagctacttgggaggctgaggtgggaagattgcttgagcctgggaagtggagactgcagtgagctgagatcacaccactgcactccagcctgggtgacaaagcaagaccctgtctcaaaaaaaaaaaaaaaattggctatattaaaattttttttcaatagaaaaaaaaaaccatgaaactctagatctagagcaaaattataaagagacctaatcacttcgacccctgttgggtcctggccatgacgagcccagtgtgggaatattcatttgggggccaaaggcgttgagctggtgtagtcctgggtcactcccgggttctcgggagtttcattcttccctctaggcctcagtcttcccatccgtacagtggggacgggggcctctaaggaggtctgagccctcccagctgcagtgctacagggcttcccaagggtcttcgcttggcctgacttcacgagcagctccaacccctcctctgcttcccccagaccatgtctgtcccagagagccacccccaggagtcctccctcaggtctgttccctctcatcccagcccctcattcggcagctattccatgcctgctgtataccaggatgtccagaacagagctcagccccccaaatctgcccctcctctctcttccaggaatgccccatgcccccactgcccatacctacccaacatccaagcaagaactgggggcattctgggccctttcctcctcaccacacccactcgaggcctccccataggcttttctctccatattctggcctctcctctccaactccccagccccagcctcctccccactgcctcttccccaccgcatgcattctcctcgctgtatctcacacccctcacctccctgcttgaaaccgtccatggctccctgttcaagataaaagttgacctaactgaagaccgccttggaggccctcccactgctcccctagcactgccccagcacttccctccttcccagaaggaagatgcagcttccgagacaagctgctggtgcgctggcctctgggccttagcccatgccgtttcctctgcctgggctgcctctctcctcccggtcatgcaggctgctctcactcatccttcaaggctcaaaatgcaccttggtttggacacctctgacttcccagttaactctgcccttttacttctcggcacctggaccccctccctatctccctaggtgtcttggcaaatagaacacttcccccggctgaggcacacccatccttcagggtcacctcttctaggaagctttccctgacctcccagagtgggttagaggactcctctgggctcctccagctctggattaccgccactgaagcacacatcacattagcaaacagcaacaagccatgggccaggcttccccatcagaccgggaggtcctcgagggagtgaactgggcctggtttgcctcggtgcaccctcatgtccagataaaccctgaggtgttttttggttgaaaatcggaatgcctagccctgcataaaatgctcctgccccagtccctccaactagctgcccacagctgcagcctggctacgggctacggtcccagcaggaaacgggctccagctggaaggccctgtggctcttccctgagcgaggccggccccagcccccaggccctacctggccttgctacctgtagatcagctcttcagccaaaaggcagttgagctcagcagcttggtgctgggtgggtgctgggtgagtgctgggtgagtgctgggtgggtgctgggtaggtgctggggccaggctgggaaagaacgagaagcaggggtggagcatcaaaggcaacccagggagtgggctcgcagggatgagggaggagctgcctcctcttgctcacctggcttttcagattcaggagacctggatgatcctgctgtggaagtcgaggagggtgagatgtcgctggtgacgctcccaggagccatgagaccgacaggtgcagccagcagacccctcacccgggtgtgaggctgctgggcctgcccactaggcttatataccagcagcccacccccaccactccaatcagccctgattgggctgggagtgctccaagctgctgactggggctggaggtgtggaatggggcacagcatcctgccttctgtagggagccccagctggactacccactcctgtgtaagcttgggggtgtcgcttgacttctctgggtctcagtccccatggtgcaatgttgggagctgagatgcttgatctcgcctgtgccctctgcccaccaggggctggagatgctgatgaggaattggggtcacctgtgttgtcagggaggccgctgaggcggccctctaatcctaccaggtgggcaatgggctgccccacgccactgctggcctcaatttctcaaaaagtagcagttggaggcagcccaactgctacttttgcccagagcacatgcccctcaatcagagtagccccttctgaggccagccaggctctctgggcctatgccctcctttggttttgtttttaaagaaataaatcaataacggaggatgcttcacaaaagtcttcatagataaggacaacatccactgggacaatggacaaagaatataaacaggcaattcaccagcctaaagggtgaggaacagaaacaggaaaatggacactcaacttccttggcatttgagaaaattcaaattgaaacaatggtgaaatactactttttcccatcaaattgacagacaaaaaaaaaaaactttccaagcaaacacccaaggcctggctaaatcacaccctttctgcagaatattctgcagccatctaaaatgacaaggtgggctggtgcggtggctcaggcctgtaatcctagcactttgggaggctgaggtgggcggatcacctgaggtcaggagtttgagaccagcctggccaacatggtaaaacttcatctctactaaaaatacaaaattagctgggcgtggtggtgtgcacctgtagtcccagctacttgggaggctgaggcaggagaatcacttgaacctgggagctggagactgcagtgaaccaggatcgagccattgcactccagcctgggcaacaagagcgaaactgtgtctcaaaaataagtaaataaaaataaaataaaataatataatataatataaaatgacaagatggattaaaacaaggatgagaggccaggcatggtggctcatacctgtaatcccagaacttcgggaggctgaggcaggaggatcgcttgagcccaggagttcaagaccagcctaggcaaaaaagtgaaatcctgtctctaccaaaaaatacaaaaattagctgggcatggtggtgtgcacctgtagtcccagctacctgggaggccgaggcaggaggattgcttgagcctgggaggtcaaggctgcagggagctgtgatcacacccctgcactccagcctgggctacagagtaagaccctgccccccccaaaaaaaagggggagggaaagaaaagaaaacaaacaagaatgaggctgtatttcacactcagcaaaatgacaaagatgtaagtgtctatcaatagtgagtgactaggattcaaggaaagtatagctgctggggggtggggagtgagctggtagccgccttagaaagcaattcagcgatgtttcatacaactaaggagggactcactccacaacccacctattccactctaggcgtagatctgagacaaacatatacacttacgtgcaaagatgtttatttcaatcttagcagaaattcaaaacaacataaatgcccatcaggtggagagtgaacaagtaaactgtggcctattcgcacagtggagtagtatgcagtagtgaaaaggagtgaaccagaatgtatcggagagtacaccccaactactgagaagacaaaacttgcgtgtgtgtgtgtgtgtgtgtgtgtgtgtgtgaaggcacaata

SEQ ID NO: 315746 - DNA, 4001 bp, Homo sapiens
gcaaatacccttctgagaccacacgttggattgtggtcaggaactccactctctggccaccacacttcgtcctggtcacatctcactctaaccctcgctggagtcagaatgactaagtttacaggccagtctggtgtgactttgtaagaactacctctctggaggccaagtttaggtccctgaccattaactctgaaaacccattaatcccccctcctctcccctcccccatcccgctccccgcaatggccgatggaccccctgtgggggcagatagatccatccctcctaagggaccgatcctgtctatctccctgtcccaggtactttaagttcgtcccaagccagcaattcccaccccttgctgaaggcccctggctccaggcctaccctggccaacagatctggggtataaggacccgaggggcccgccatccaaccccgcgtgccgaaggcgcccatccctattccactcagattaaacgagagaggctgaaaggtttaaacgctttattgtgcccaaaaaaaggcccatggaatgaagggaagagccgcgcagccctgagcccggagcgattgtttgtcgcgcacccaaaggcaaggagggtggggagctgggaaaggatgcgcggcctccgcgtccccgcgcgcctgggcccggccaaccagcgaccccgcccggtgggcaggcgcggcctcggccatcggcgcctaggggccagtaaccatgacgacggccgttgccaaggccgagagccaatagaggcgtcgccggggctgtttcaaaaacctaaagcaaacaacgaaaaacgctacatcgttgggggaggggaaagactgagaggacccggggcccctccctgaggctcagaccaggcctcgcggccccggccggcgtgagccgtacaaaatctacgtcacttggggtagaaaaacaaaaacaccgaaaagcccacgccggccgctctgaccggccgacacgctcacttgcggcccttgggcactttggggacgctgggcttggccgccttcttcaccttcttgcccccggcggccgccgtcttcttggccttgccgcctttgtccttcttggcgccagcgcccttcttgtgcgagcgctgctccggcttctggcccctggcgggcttcttgtccgcgcgccgggagccggccgcgcccggggctgccttcttcgctttgtgcgcggtgggggccggggcggtggcggccgccggggctccgcgccgctccccgccgccctccagcttcttgcggttgagcttgaaggaaccgttggcgccggtgcccttcacctgcagaagcgtgtcgttctgcaccagcgccttgatcgagtacttgaggtaggtgcgcccattctgctggtcgaaccacggaaccttcttggcctcggtgtagatcttggccagcgacgagccgttgcgctcgcccagcctacggatggtctccaccaccagctggctgtacttgcccggctggttcttcttcttgctattcttcctcttcttagatggggacaacgccgccgagccgccagccttggtcaccttcttggccattccctcggcggtcgtcactggcagggcctcctcgagctccacggacatggtagcaagaggattggtggcgggcggcgcgcggaagccggggggccgcgccgggaagaggaaggcgaggggccgagggggtgcaggggggctgggggcgcgcggcggctccaggcgggagcggccgcggccgggcctggggccgggcggcagggctggggtgggggccgggccgggccggagcgagggttggggggcccggagccggggccggactaggggaccgagttgggggtcagagaccgagtccgagccggcggctggagctggggacgtagacctaggccgagccggagcgaagagaaatcccgccgaacgcgagacaccgccgccgcagcttccactggcgcctctggaactcgctgggcgtgcgcgctgcgctctggcgggagggcgcttctctcggctttttatagcttcatggcggaccacgttgagaacaacaacagcctggtccggggccagcgccaacttgtgcttcttggagccccttctccggccgctggcttctcggaccgcgcctctccagcgccgccgcgcccgcagcggggcgccccggacagggcctgagctcccggcgcagtggagaggcgacttgcgtcctggaagggctcagcaaaggcgaacggagaggtgcaccctaggctgcgggagcgcgagaggaggggggcacctcgtttggaggccaatagcgcgggccccagaggaggccccacggccgggagcttggcggccggcaacccagagaacgccacgggcacccgagccttgtcccggcccggggggctccaggcctgcccgcaagaggagctttaatttgtccaaactaacacagggcgcgccctcacgtggtcggctggggcaacgtgaactgcgctaggacatcctcgggggttttccgccccatccaaaggggatggcggatgggaggcactctccagctgcaccccgggttctggttgtgcctctgggagcctaggcacaacccggggaatggaggactacggcaggacctctctagggacactgcctcgccgctccccccaccctgttgccgctgatgttcccagggcctcattttgtaatccacaagtagctgccgccggtccccccaaagccaaatgggggctccagggtgggacagggtgggcgggggtgaggctgtgacacccagaggaattcctgtgagaggatggggaagggattcgctcttagttcctgggtgcacccctccccctctcccgtgcacagggaaatgatggcgggaacacagcaaaggagaccatgtcctggagagggtcccgggccccaccctccccgggggggcttgtgcaaggctggcggcccgatctctgctgattccagtattgggggtgcagagaaggcacaggacagtttttgttgaagccgttgcagcctccacttggggaagctgaggccagggtaagatgctcgggtaggagaggggatccctttgggggtaggtgatgtagggcacaggagtggggctggggctggggggtggcagggttgcaggcaggagacagtctccagaggcccagcatagaaaagcgatggaggggtgaggggggacaggacgctggcgaattggggttcccagagtgagagacaggaacatttacaggtggacagagtaaaaggccctgaaaagggggtgggttggtgcatttgtggccttgggcccaagcaggcttctctgggtgagggctagcagcacctcccctcttctccagctcacccctttcacacacacacacgccccccattttgtcaccctgtcaagggaataaaccccagagaggaagaaattatgtctaggaggaaacggtgagcctggatgggttttttaggggggaggctggcaggggcatggagccaggaaacagccttcgccccccagagcaccaggtaccctgagaaaagtgagaagagagattgcagcccaggtccctgcagaggaggatgggctcctttcccaggaaggactggctgagtggactgtctccagggcacaggacaacgttgagggcctgaggcctccaccttcttgaagaaggaccatgtgaatttcctgacagagaacggggatgggtttctgaaagcaccacccagctgagcctgccgaaactgcacagctgtttccaggccaggctggctgcatggaggacgtgagaggaacagccagctgtgtgtgctgggcccactgatcagggtgctcaggaccaggagccttctgaggatgtgcagaggggactctggggagaggaacatggtggccacagctggagtgaccgcagtgtacagagatgggatgggagcaggaaacccaaaagagccggccctggaaccaggtgg

SEQ ID NO: 315747 - DNA, 4001 bp, Homo sapiens
aataaatgtttgctgtatgaagaaatcagtggcagatatgtcatctctacaaaaacagttaagtataggttccattcataggtcaatagcttcattttttcacacagatgaaagaacagaatgttgttctaacaaagacaagtaaaatgtagaagcaacagaaactcaaaacctcctagttttaagattaaaaaatacaaatctcaaaccttgtagataaagaatgtcattcaataaagaatgtcattcaataaagaatgtcattcaattaataaataatgtataatattaagcatctacaccacgtgaaagcacaaaccaagccaggcactgtggtgatataacaaatgaatcacaacttctgccctccaggcactcatgtatgatggcaaaaggcaccacttagggtggccaggcagttgtttgggcaagaggaggcaagaatttaaattagaaggcaacggtgggagtgtaaagcaggaatatttagcctcagctggactgagagtatgtgatatcacagaagtggattcttgacctttcaagcccgcactactgagagaagagcaaggtggattggcagaggatgcacttaaagtggattgacaaaacgtcgtatcttccttatcctgcttccaaataagcctctaagaaaggtggcagcatgatgtggtggaaaaagcatcaggctaggatctgagccatctgagtttccatcaaggcactaccatttgtgatatcctccaccctgccccgaaccaatcatacaacaaagccttggccttcactcatttatcccacaggtaatctctgaacacctttcttatgcaggcaccacactaagcactgggggtacagatgtgtcgtgaagaaataatatccctgctctaatggagcttgtagcctaatagggaagtcagactttactcataaactgtccattccaatcatgacatacagtatagtagtaagagaatggactcagacccagaatacgtgggttcaaaccctggctctgctactaccagctgtgtcaccaaaggcaagttttacttaacctgtgtcttttctcatctgtcaacttggtgtaacaacagttaatattcaacagtgattgatatgatatatgtaaagtagcagaagagtggtaagcgctatctgggtgtttgcaatgcatacctaccgctattactgatcattcccagtaacgcattcagccacctgagtccatactcaccgcttgctcattcctcatcccgatgtacttgatgcctagctgctgggcagcaatggcgatttcggtcactgggatgcctacgatgccaaatatgtactccacatcctgaggaacgaagaacaggggagtaaactcccaaggccccaccatatcgccacatccttccctccctcccgggcgctaaaaggaaaaccccccgacccccatcgcccatttctactcgtctccaagacaacatcgcggtccccgccagcttccgtaggagcctttcattccaggaaggtccatcgtacttgcgttttcagggcctgagcgatgactttagcaccagacacctgctcctcgctgcgctctgcgaagttactgtccggcatcttccaccgaaaagctctaagcactcacgcagccggcaaacaagcggaatcatccagcaaggcaaacgcgaaatcggcagcacgccacctctggtactgcacctctgacggacaggagggcaaccaactgccttaaacaacgggaaggaagaggcggtctaaattcgtccacttcccgggagaggtgagaatgtaaacacgcgcgttctccaatcagaactgcgctctcttctcggctcctccattcgcgcgccagaatgccagagggaggcgggactagcaggagattgctgcctatgcaaagcaggtaagaagccgaactctgaggcctctcgccattgtctccgagtcggccagctggagcgttttcggggctgtaaagggagaatggcgcatgcgcatattcagggcggaaggcgcgctaagagcaggtacggagggggcgtggtgcggcgcggagggggtgtggtaagggcgtgcggtccagaccccgccccgggcgcccagttggacttggggagggctgcgcaaaggctgccgggagctgggaagcccggcgcgcgtcgtttgctggggctgtttgtgcgttgctgctgtgctaccgcgttgcgttttctaggcatttacttacacgctttgtggtttacgctctcataaccttgtggttttatagtccttaaattattgtagcgcacgttacttaaatccagaagcagatgtgtaccccagcaagagataaaatgacgctcagagtcagtagatccagaccgtgcctgagatcctgaatcctgtttcctacccactattcagccattgggtcacaagcgatgaaaagagcaccttgaaggtagtatagagcactgttttctccagcccttgctactaatccatattactctccgctaatatctttccaaaattaggaactatggcgtttcataattcttaggttgggtccctacctacaaccagccctgcacccgatagccttttaaaacatttttgtgtgaaaatcgtttgcaatgtgcaatatctgaaactactgccttggagtcattagaccctctgctcagtgacaataaacataaaatttccaattgtaataaacagtggaacttttaattttttgaggatttggagtcattttaagcaaaaagaacagtgataagtggacagtaaagagatgagaggggagtgggtcatgggtagtgaaatgagtgagaagcactggaagtgaaacgatttctaaacccagacattttcaaactgtagtcctgggtcttttcaaaaggtcttcccctctttttctcaacccctcaaccccaccccaagcagaggagagtgaagtggttgcctccctgcatatgtggacggtgttagtccattttcatactgctataaagaaatacccaaaactgggtaatttataaagaaaaagaggtttaatggtctcacagttccaaatggctacggaggcctcacaatcatggcagaaggtgaaggaggagcaaaggcatgtcttacatggtggcaggcaagagagcgtgtgcaggggaactgccctttataaaaccatcagatctcatgagacttactatcattagaacagcatgggaaaaatcccctccccatgattcagttacttcccactgggtccctctcaccacatgtggggattatgggagctataattcaagatgagatttggatgaggacacagccaaactgttctgcccctggcccctcccaaatatcatatcctcacatttcaaaaccaatcatgccttcccaacagtcccccaaagtcttaactcatttcagcattaactcgaaagtccacagtccagagtttcatctgagacaaggcaagtcccttccgcctatgagcctgtaaaatcaaaagcaagctagtggctgggcgcagtggctcacacctgtaatcccagcactttgggaggccgaggcgggcggatcatgaggtcaagagatggagaccatcctggtcaacacggtgaaaccctatctctactaaaaatacaaaaaattaggcgggcatggtggcaggcgcctgtaatcccagctactcaggaggctgaggcaggagaatggtgtgaacccgggaggcagagcttgcagtgagctgagattgggccactgcactccagcctgggggacagatcgagactccgtctcaaaaaaaataataaaattaaatttaaaaataaataaataaaagcaagatagttacttcctagatacaatgggtgcacgggagtgaggtaaatatacccgttccaaatgggagaaattggtcaagacaaaggggctaaagcccccatgcaagttcaaaatctggcagggcagtcaaatattaaagctccaaaatgatc

SEQ ID NO: 315748 - DNA, 4001 bp, Homo sapiens
aatttccacatggaacaatgcattgggagagcattatttgctgggaataagtcagttattactcaattttttaaaaatggttcaattaattgctaaagtcaaaaaatagcatgttttcaagttgacaatttaccgtagaaaagaaaaaagaataatatgtaataaatctgattttgaacattaagaggtactcagtttttatcaactaaataaatgttgcagaaatatttagagaaccctagcttggaagggtgccaaacttattctgctggggcattcccagtgttctagacggccttccggactgtgcagaaggaagagcggcacagttgctctgcatctgtggatttggtgtgaagaagtaacaacagacaatgctcatctgctgtggtcaccactgagacttcttgaccctggcagcacttgctagctggcaatccttccctcctcagacacctcatcccattggagaccttccccatgctctccatcgtctccaaagagtccctttacaaccactcctcgggttctcctgtctccacctaggccttcagattctccagttttctatttccacttgaaagctccatcttctccattgagcaacctcttaaaaaccagcccaggggaagtctgggtaaatcagttaaagagatgctaaggggacaccggagagatattgactgagtcagccgggagtcatggctgaaagcagcttggctttccctgatgcggttggagacagcaaaacatccttactacctgcatccttactacccctctgcttctcatcccctggctcctgggctgctgtgcaacaacaaaaggactgtcacacagaaaactggaatggagaagtttctgaaatagtcatgagcaataaggaagcaatgaggactgatggtcccatcctccttcctgtggctcctctgaggcctcagcctgactctcccattcacccatttttgaaataaagagtttctgaaatagagacaatttatctaatatccttgacctattgaccagaaaccagaaaggtaagaagtgctatctagaggtgagaaccagagagtaatctggtgaggccttgttgcgatgctgacctcctgcatcaaagtacacagactgggagtcagaagccctggctgtcaccccagctctgtgactaagcctctgagggaccatcacaagggcatcaacagagtaggtactcatttgccaggtatcagaccaggcgattaagaaatactaactttaataatttggcaaatcagcaattatctctgattttcccagtggaaaataatgaaggggttaacgtagctcatctgtggtctccttgatttctgacattctgagattctgtgatctacgaacacagaaactagccccagcagaacaatcatgccttctcttgggctccatcagcacttggtactcagtgctagtgtacatcagtgactacttcctgatctgttacatttcctgtgtgggtttgtttccctgagaccatatgctcttcaagggcagacactgttttcgtctcctgtggtcctcctcccagctcagtacctaggggagacaggccttagagtgggttgtagattgtcagcagaaaccaggcaacactttgcttgatgttggtgctagatggctcctgaaacacttgccttgggtttaagcccctcccttttgtttctatctccagatgctgatttgctacaaccactcacaaccaggccttctggccataaaaggataaaagcctactagtggtgaccttgcccatcaccaaggactaagagccaggtaggttcctcctcaactcttactctgtgtttcccaactgtcccatggctcagagtacccacctccacctgtgcaagcctctgttctaagcgcccggctcctcgcgtccacaccgactccctctctggctgctgccacttcggagtgagaaactgagctgctgcttcagttccgtattcaggttttcgtcatttcctgccaccccatcctcacagctacttcctgaaatttgagtcagttccttctgctttagacacttaaattttaaaaggattaaatgtttctgtgcctggtcttttgcaaggttttgacaatgggggtcatagagcagtcatagaaaatgctgctttgactctgagtttgtaatccagtgagagaaacaaacattcaaccagaaaacacattagagaatgctgtagaacagcattgtgtcctaaatagggtggcagttacatttgagacagtaaaggaattcagagcatttggtattgggtgtattcatcaagaaaggctttatgggaaaagtgatttatatgtgggttttgaagcataagacttaaaaagaaactcacccctatattacccacagcacttaaaagtggagttttcatatagatgttcaaataaacgtcgaccaattgaatgccagaagagaataactcatgagggaaaaggcaagacatggaaggagagtttcctagcttgtttggggcactgtggagtctgagctaacaaactaaagatttggctctagagcgtaggaagaattctgaaagaaccaggtgctggtcagctgatggaagaaggtctttgtggtatcctgttttactgcgtgtcaagacttgctgcccctcccttccctcttgaagtcagacttactcaggtgacttgttttggccagtgacagataccactttctggcggaggccgtaagaccactgcaagctttgccatgctttcaccactgcccaaggcaacctgcaattctccatattggctcctccagcagactgggtccctgagtgagaaagaacacaagtggagccccatccaccatgtgggggaattggagtctttcactaaaaaatagtcctttgttttggctactgagaatttgagggtgtctgttattgtatctgacctagcctttcctaatcttgattgtggacttcttgatttgttcacaacggtgcatcctccaaggagtttaagcaggactggatgaaactggcccatgatacaggcacttttctgcattaggaatatgaagcctctgtcacttccaaatctaaggattctatgcctgggggagctttatttattccttctactttattacctatttatcatggtggtaccaaagttatgataaggaagagtacgtttgtacaagagaaaaatcacttggaatcctcatgtagtgtcaaaatacgatttagactagatgatgtgacacaccatccaggtacatagttctctagagaaaatatagaaattaatcagagatgacaccaagaagtcccatctttccttagcaaatgtcacaagttcattactgatgaggtagtgaggtgtatcacacagaaaaagaatgggccttgaagccagacagacttggttcaattaaaccacttattgtactttgagaaagtgagctatcttctctcaagcagcaacttaatataaaaatccataatagctgggcacggtggctcacacctctaatcccagcactttgggaggctgaggcgggtggatcacaaggtcaggagtttgagaccagactggccaacacagtgaaactccatctctactaaaagtgcaaagattagccgggcatggtggcaggtgcctgtaatcccagctatttgggagactgaggcaggagaatcgcttgaaactggaaggcggaaggtgcagtgagttgagattgtgccactgcactccagcctgagcgaaagagtgaaactcggtctcaaaaaaaacccaacaaaacaaaacaaaacataataatgcctatctaacctgctacatgctattaagcttctcttctcccattcccacccagagggatccctaggggcctaatgttttcactatgtgccagacaagagttctcccaggaccatgcatggacctgcatcaatttcatgccctaaggcccagcttatttggttcagtattaggataga

SEQ ID NO: 315749 - DNA, 4001 bp, Homo sapiens
ttgcatttacttttttaccatgacctatttatggcaagtgaaactgccttttcccattttgatgacataatgtttccttttaaaacaagtttaagtgaatttcccacctaaatcaggccccttgattacaaaccacagttaaaacgatatgctcttcgaagcatcattttgctcaaggggatgagccctaaaggtagggcgcctggagctctgagttccaaacccaactccgcctcttgtaactgtgttacttcagccactaatgggagctgtgtccttccctggaaagaggtcacaagcaggcagccagtgtgcccagttcggtctacaggtgggcttttacaatcttataatgagtgccatattaagaaatcagggccgggtgtggtggctcacgcctgtaattccagctacttgggaggctgaggcagaaaaattgtttgaacctgaaaggcggaggttacagtgagctcctgagcctctgctgcgattgtggtgcctaccccgagggctgctgtgaggactggactggaattgggtgcacatgtttcctaatcattctaggacacaatttcccccatctgtaatcaagagaggtgcggtggaggtgctctacctcctgactctctgaaccttaggaaatggactcctccaagcttcaccttccctgtgcccatcagtaatcagctacctttccactaggcctcttgggcagaggcaggacttaggcccacaggatggggagccagggagagtctgagtcagggacatcatatcgtgattaggagtctgtgttggaaaaatcattttgggcggaagcatgggtggaaggccatccgagggctgaaactgaagatgggagagagcctgaggcttatgttggggatgaggacggagaggacaggtgggttggaggaagcagatgagagtccaagggggaccttccataccttttaggaaattgatcactttgccccattttccggcatcaaagggatgcagcttctccaggcccatgaaggtgatgttgtagcgcggcgagtacacgattggccagcgtgtctctggcacatgctggtacagctgggttgtgtgtagcctaccgtgtggaaaaagacagacgcacagctggggcagcctcggcagaaagcagctccctcccgagcccgcctggactgacccaccagccattgcccagcaccactagcccctcagccgcagacaagggcccctcaacaacagctgcttaaactggctgcctttcccggaacccaattccaatccagtcctcacagcagccctgggggtaggcaccacaatcgcaccagaggctcagagagcagaccaggtgtgcccaaggtcacagtgcaggtctgtggagaagcaggcgtgcactcaggtgtgtctggctgcaaggcctccgcgcatcacctctgcaccgtaataaatgcccccacagctgtgtggcacaaggcttcggctgcaaaatgtgtggctgttgtgaggactcagagaatgcaactgaggagctgagcacagtaagcactcagaaacccaagtcgggacccaacctgagccagggcggggggcggggatcccctgaccccgctgcgctgctaacccttcccatcacaccctggcagtcgtcacccagagacagaaatccgccccagtggctgcctccgtgggggcgtccgcgtagccagggggctgggcagcgcagacgtcagacccgcgcacatcgcccgaccgctccgggtccgggcccaggcccgcggccggcgcgcgtccctcgggccaccgagcaggggcgcggggctggcctggcgcgccgggagggcctggaaacacccgtcccgagcgtccctcacccctcaccagcaaatctgggcccttacctggcgcgcccgcccggccgtccccgccctcgccctagcgcgcccgcccaccgggacccctgggagcccacccccgccctcgccccgcggcactcacatcccggggccggccctcccaaagctggccgcagctccgcgaccgggcggggcggggcggggcgcgggtggggccagcccaggacacgcccccgggcttagccgcgtcctctgggggcagagctctggccgatttggcccgccccgccagtgttgcgacacagagagcctgcccgcaggaaggccacccccaacgcccatcaagcccgaagtcccgcctccgcaggcaaatacccggtggaatcccgcctggttcggaagctccgccccctggcgggagggccaagcgggtttcaccccggcctcgcggaaggggcgcgaccaccgtatgtcctgttcctgcgcttcccaagctgggtagaaacggcgagaggctgggggttagaaacgacaggttcccggcgggctgtgccggggcttcgctgtgtgaccttgggctggcgtctgggctctctgggcccttgtttccgcgagttaaacgtaggggcgggggagtttctctggccctgccgcctgtgacctaaggagccccgtgacctctccgacccgagcccacccccggcccagtctgcgagcagctccgggacaagcactcccggcgaagacatgtaggctctcagagcctgcgtttccctctgtagagcaggcctagttactgtcttcagggtgcacgcgtctccgtccccgacccgcaccctcaccgccggggtaagctgagccaggcccaagcgacagctggggttgtccgtggggctgcaacccaggaggaggccccaacaatagagccccagaggacggagacaatgggcctctctgtcggcccagccgtccccgccatccaaacagaagcagctgacggaggactgccgggctgggatccctgggctccgcgggggcggctgtgtgccagggcggggcacaagggaagcgcacagacgtttgaagaggggcccccgtgtgcctgccatgattgcatgatggcatctgagcctcacaacctaatcctgagaaaggtgccataatcaccccaactttatcttgagggaactgaggttcgggcctggattaaacccaaactcggccacccgccagcatagtggctttgggcaggttgcttcagccttctggtccttcatgtctgcatctgaaaatgaagtactgggccgggtgcggtggctcacgcctgtaatcccagcactttgggaggccgaggcgggtgaatcacctgaggtcaggagttcgagaccatcctgaccaacatggtgaaaccccgtctctactaaaaatacaaaaaattagctgggcgtgatgaagggcgcctgtaatcccagctactcgggaggctggggcaggagaatcgcttgaaccggggaggggaggttgcggtgaggccgcgccattgcaatccagcctgggcgacaagagtgagactccatctcaaaaaaaaaaaaaaggaagaaaatgaagttctggttgcacttcattctctggatttcatgggcaagtccagggaatcaagagacaataatgttgattattattcagagaccatctgtcatgtgctaagttgaagtccaaatgctttttgcttgtcgaactcttctgacagtcctaggaggcaaactattgtcatccccattttatagataaagaaattgaggcacagaatggtgaagtaactcactcaaaggtcagggatgtgggcagatgtaaaccacagaaggaataagtactattttataaagtgacagagtgcatgcagtggccctgtggcatttgtgagagaccgacttcccctcagggaacttgctctgtagtttgggaagccacacagatgatcctctggttgggagaatgaggatctgggcagcctggacctgaagctgaggccaaagagagtgggattggtctgaataagtgggtttttaaatttttttaatttttaaattattttttaagagacacagcctcactatattgctaaggctggtgtctaactcctgggct

SEQ ID NO: 315750 - DNA, 4001 bp, Homo sapiens
aaaccacagttaaaacgatatgctcttcgaagcatcattttgctcaaggggatgagccctaaaggtagggcgcctggagctctgagttccaaacccaactccgcctcttgtaactgtgttacttcagccactaatgggagctgtgtccttccctggaaagaggtcacaagcaggcagccagtgtgcccagttcggtctacaggtgggcttttacaatcttataatgagtgccatattaagaaatcagggccgggtgtggtggctcacgcctgtaattccagctacttgggaggctgaggcagaaaaattgtttgaacctgaaaggcggaggttacagtgagctcctgagcctctgctgcgattgtggtgcctaccccgagggctgctgtgaggactggactggaattgggtgcacatgtttcctaatcattctaggacacaatttcccccatctgtaatcaagagaggtgcggtggaggtgctctacctcctgactctctgaaccttaggaaatggactcctccaagcttcaccttccctgtgcccatcagtaatcagctacctttccactaggcctcttgggcagaggcaggacttaggcccacaggatggggagccagggagagtctgagtcagggacatcatatcgtgattaggagtctgtgttggaaaaatcattttgggcggaagcatgggtggaaggccatccgagggctgaaactgaagatgggagagagcctgaggcttatgttggggatgaggacggagaggacaggtgggttggaggaagcagatgagagtccaagggggaccttccataccttttaggaaattgatcactttgccccattttccggcatcaaagggatgcagcttctccaggcccatgaaggtgatgttgtagcgcggcgagtacacgattggccagcgtgtctctggcacatgctggtacagctgggttgtgtgtagcctaccgtgtggaaaaagacagacgcacagctggggcagcctcggcagaaagcagctccctcccgagcccgcctggactgacccaccagccattgcccagcaccactagcccctcagccgcagacaagggcccctcaacaacagctgcttaaactggctgcctttcccggaacccaattccaatccagtcctcacagcagccctgggggtaggcaccacaatcgcaccagaggctcagagagcagaccaggtgtgcccaaggtcacagtgcaggtctgtggagaagcaggcgtgcactcaggtgtgtctggctgcaaggcctccgcgcatcacctctgcaccgtaataaatgcccccacagctgtgtggcacaaggcttcggctgcaaaatgtgtggctgttgtgaggactcagagaatgcaactgaggagctgagcacagtaagcactcagaaacccaagtcgggacccaacctgagccagggcggggggcggggatcccctgaccccgctgcgctgctaacccttcccatcacaccctggcagtcgtcacccagagacagaaatccgccccagtggctgcctccgtgggggcgtccgcgtagccagggggctgggcagcgcagacgtcagacccgcgcacatcgcccgaccgctccgggtccgggcccaggcccgcggccggcgcgcgtccctcgggccaccgagcaggggcgcggggctggcctggcgcgccgggagggcctggaaacacccgtcccgagcgtccctcacccctcaccagcaaatctgggcccttacctggcgcgcccgcccggccgtccccgccctcgccctagcgcgcccgcccaccgggacccctgggagcccacccccgccctcgccccgcggcactcacatcccggggccggccctcccaaagctggccgcagctccgcgaccgggcggggcggggcggggcgcgggtggggccagcccaggacacgcccccgggcttagccgcgtcctctgggggcagagctctggccgatttggcccgccccgccagtgttgcgacacagagagcctgcccgcaggaaggccacccccaacgcccatcaagcccgaagtcccgcctccgcaggcaaatacccggtggaatcccgcctggttcggaagctccgccccctggcgggagggccaagcgggtttcaccccggcctcgcggaaggggcgcgaccaccgtatgtcctgttcctgcgcttcccaagctgggtagaaacggcgagaggctgggggttagaaacgacaggttcccggcgggctgtgccggggcttcgctgtgtgaccttgggctggcgtctgggctctctgggcccttgtttccgcgagttaaacgtaggggcgggggagtttctctggccctgccgcctgtgacctaaggagccccgtgacctctccgacccgagcccacccccggcccagtctgcgagcagctccgggacaagcactcccggcgaagacatgtaggctctcagagcctgcgtttccctctgtagagcaggcctagttactgtcttcagggtgcacgcgtctccgtccccgacccgcaccctcaccgccggggtaagctgagccaggcccaagcgacagctggggttgtccgtggggctgcaacccaggaggaggccccaacaatagagccccagaggacggagacaatgggcctctctgtcggcccagccgtccccgccatccaaacagaagcagctgacggaggactgccgggctgggatccctgggctccgcgggggcggctgtgtgccagggcggggcacaagggaagcgcacagacgtttgaagaggggcccccgtgtgcctgccatgattgcatgatggcatctgagcctcacaacctaatcctgagaaaggtgccataatcaccccaactttatcttgagggaactgaggttcgggcctggattaaacccaaactcggccacccgccagcatagtggctttgggcaggttgcttcagccttctggtccttcatgtctgcatctgaaaatgaagtactgggccgggtgcggtggctcacgcctgtaatcccagcactttgggaggccgaggcgggtgaatcacctgaggtcaggagttcgagaccatcctgaccaacatggtgaaaccccgtctctactaaaaatacaaaaaattagctgggcgtgatgaagggcgcctgtaatcccagctactcgggaggctggggcaggagaatcgcttgaaccggggaggggaggttgcggtgaggccgcgccattgcaatccagcctgggcgacaagagtgagactccatctcaaaaaaaaaaaaaaggaagaaaatgaagttctggttgcacttcattctctggatttcatgggcaagtccagggaatcaagagacaataatgttgattattattcagagaccatctgtcatgtgctaagttgaagtccaaatgctttttgcttgtcgaactcttctgacagtcctaggaggcaaactattgtcatccccattttatagataaagaaattgaggcacagaatggtgaagtaactcactcaaaggtcagggatgtgggcagatgtaaaccacagaaggaataagtactattttataaagtgacagagtgcatgcagtggccctgtggcatttgtgagagaccgacttcccctcagggaacttgctctgtagtttgggaagccacacagatgatcctctggttgggagaatgaggatctgggcagcctggacctgaagctgaggccaaagagagtgggattggtctgaataagtgggtttttaaatttttttaatttttaaattattttttaagagacacagcctcactatattgctaaggctggtgtctaactcctgggctcaagcgatcctcccaccttggccttccaaagtgttgggattacaggcatgagtcacaatgcctggccaagggtttttaaaattgtgtcctggtagctaaagagttaagtggtctgcggaggccctggag

SEQ ID NO: 315751 - DNA, 4001 bp, Homo sapiens
ccctcccacctatcccctaacaagatggaggccattcagctaagacagcctgactactacccagagaaatctgccttcggctcttgggtgtctcctctgaaatgttctcagttctctgcagttcaccttctgtttagaaaaactcacaaaatactacacagtgttcctcagttactttcctagttggagaaagtcgggaaatatgttgttttatgttcttgattccttcccgtggaagttagcaaaacagcgtatgctgtaagtaatctaaagtcacagtcactccgggatgtgtctcctacacgtcttcagaagcttatctctcctctcccttttcttactgttcctcggtttctcaatcttatgccagtgatttaaaaattcacaaaataaggcattttgcgataatgggaatactgttgaatatgaaattgagtttttacaggagaacttgatttttaaaaatccaaactttttcttatttaactctaagaagcacctctaggttggaggaagcaagctaattcacgtgccagaaagtctgcatgagatgagaaacttaaatgaattgtcaattatgcagacaaaaaactcaactttcagggaaactccaaatcaatgtccagtgttgcaagcaacccagcttatttgaatagcccggacagagcatatgccctgtgtcactcacaggaaggcaaaggctaacaccaccacgttgctgactttgttcaaagcactttccatttatttttactttcattttgtcacatcatcactaggaggctagaaggaacagggatcatcactttcatttcacagatggagaaagtgagcgcaaagagacagcagtcccaaggtcataatggtattatggttagaattccactcagtatgtggcatatttttccagatcataagaaagaactggacacaaaggtagcagggagaagaggtcagttccttctctctgcgtgggacaggcggtggctaccacggagcaacagttcattgggaaaggaaaggggagggaggaggctcagggatggtcctgtatcagcctgtgccttgcaggggttcaaccatgcaaccccaaccgcgttcctttgcttttaagtcgaaccagtagagcgttttgtttcaaactacgtacatcctttgtcctttacaatatcccgtcctagaaccccttaaaaatcagttatttagatgagaaagtcgagccctgtacctggagaggccagttctgtatagcggaaaaaatgaaactggggaccggctggccagatatcggaggtgggagagatgctttgcagtctttttccctttcctttccattttttttaaagtggggtggaagagatacagggtaccccataggaaataagttttcttccaaagggttggaggagaacgggatagtcacacccctcagtccagccaactgcgaaagcgtccctccctacccgccgaccctcagggtcccgcacacgccgggcgaggagcccccaccctgggtcgcgccgcgcggaggggcctacggctggggatgcagcccggggcgcgcccacgcccccagcacagactggccaggcgccaggttcccggctctcactcacccgcgctcccgcctctgggggcccggccggagggtccccgctgtgtcgcggcgcctggctcaggggccctgtagctggggccgggggtcgcgggcccgcggcgctcccggggcggcgtgggcggcggctcgcgctccgggcggcgctccagctgcagctccagccccgctcccgcgaggggcgccaggctcagcgcgcggcgagccggggaaggcggcgggtcccgcgtcccgggggccgccggcggcagcagcagcagcggcagcaacagcagcaggagcggcggcggccaccgcgaggcgcgcggcgaggccatggtgacggcgcccgcccgcgctcacatgcccggcgcgcggggcgagggcagcgggcagcgggcagcgggcggcgggggccgcgcggggccggggaagtgagcggagtgaggctgcgagcgcgctccccgcctcaaaagttatcgggagccgcgggagggctgccgggggccgggctggctgggcggaggcggcccgcggcgccgctacatgctaattagcccgggcgggtcgctggctggcgggcggctcctcctcagttgacatcaccggccccgcgcggcgggcccggaggcggggagagggcaggaagggggctggggccgggcgcctggagagcggcccggcccgggacagcgggatgaggtcagcggagccacggtgctgcaacttttgtcacacacatgctccagagtcttctgaatcgggcaccacctacccaactccttaaacgcacaagaagtaggtgaaaagcaggtcctgggtaatgtgattagcaccagactagattatcccaagtgctttgataggagagagaaagggaacggtcccctggtacccagcccgcgctgtcaccgccgttattgatttgaagtgtccccactcccacccccacctccccttcttcaggccccagggctggtgatgagctcgtgtttgccaaacctaacacctcaccctccggccaacgcgagaatccgagtatcccccacgccctctcaagcttggatgccgttcccatccgaccactgcctttggctcacaccagagttctgcagagatgtcaccgcgaggacacccaaacaggctgcagggaaaagaaaactgtgaattcaggcaggctagggcaaactcatcatcaggaaaagaactgcagatcgcaaattaaaccaaatgatgcccagagaacacagaattttaaatggaaacctatggggaaagattcaaagatttcatgtaaacaaattttcttggtcaataaagttccatttgtttccataacctctccctccccagtaaatgaataataaactgtctaaagtttaggactgtaagccacctcattaagtgaagaaagaggggctcaaatgggaaaataacttgctcaagattctgaaggtagacccgaagacgaaatgattgatctgtgaatgaccatgtgatattattaattctggtctcctaattcagagtttgcaataattcgcaaacggaaacaaatagtattgcaacagaaacaaatgttgcagctccttggggttcttgcgagttctgttgggggcccctgtctgacaaccaaatgctcgtgaaaatatgagtatgcacctcactgtcaggcctggctctccatcctatttctctgctcttctctttttctctgtctccagatctccatgacccacctccaggagaatgagatcgtagtgtccagggcagctgcagatgggcctaggcccactttctggtgactcagtacaagtgagtcatttggcagaaaaacataaaggaggctgtgtataaacaaactcaccttaaatgagagaatgaggagtaaagatttggttttattttgttttgtttttaaacaaaccagctttccagggctctaacacagaacttccaggtctctccaagaaagtaccaaacagtaatctccctgaaactgacttggtttgctcccatggcctgagcttaacttctctggatgctgctctcacattaacaggcaggactgcacagctgcccagacccagccagacaagccccaacagactaggactgtgctcagaggttctggtcactgccactccctcccctccaaggagaccatgtcacatagtactggttgcactcccaggcaagtggaaaggtttaagggtagaatggcccttacaggcttctcgtgtggattcagggatcctatgagataatctgccttctctactaagacccaaggagtaaacatgtacctgccacctccccccaatcctcccccaccccccaatcccaccccactttaagtaccacaggtttatctctctctaatcttctctctgccttctaagagaaa

SEQ ID NO: 315752 - DNA, 4001 bp, Homo sapiens
cagtgtgtgccaggcgctaagacgttccttcagaaaaatcccatcagtctcagctaagcactcttagtgaacagaaaacctggatatcccttccccaagtcctccctcctccctcttcctgtcctcttgacaacactaaacttaactgttttggctccaaggacatgagccacgatgtactcactggattcccgggcctcagggatacccctcttctcaaagaccccagtccagtggctgaccagttctatggcactggataacccagccagaggtggttggggttgccatgagctgaaggcccagccccgggtacttcccctcctccctgggccagacaggagggcccacagcattcggccccaaagctccatgtctcagggaaaggttctccagagtgcttccaggttcccaagtctgctttatgatgtcagctgctgaggtgagtgctgagagtggcccctggacccagctgggtggagatggagaggtcacaagctctggtgccccaaaatggctctggtcctcagatatagttggttgccaccctgggagtgagaggaaccaggaaagcaggtgagccttgtatgacacccccccttctaccaatacattgcctgagaatagttgtgctcttgctctgacacccccttgactccatttagagccttacccacctatttgatcattcttgtcttggccacttacgttttcttcacatttttagctggagtgggctgagcccatagctcagtctctgctaataaacgggttggtggtaggttagggcacatatgtggggacaggacagatctgtgtctaacctagcgtgtgtgatcttgagcaagtcattatttctgattttcactttcttaatccataagatgggggaaaatcacaccaaacccatggcaagcaatgcattagtctatgaatatccaaggcctgggaggcagctcaacacacagcagggaccagatgttacatgatcttaactgatgttacaagaggcagatgattgcctttaattgggagctttgaatctgacattgtgtgtgtactgtcatggatgtacatgctgaaaatttcctcctaatttaacctataatccgggacatcagcgtaaaccaccaactaaaaaatttacaattgtatatttaaagaggtcacaagcaagtttaactgaaggtttaaaatcagcggtcccctttgcttccagataaaagtccaaactagcgtttattaagcacctgctaagtgccacatcttcagatacaagtagggtcagagaagggaagcgacttgcccagcgtcactcaggtagaaactgtcccaggcaagctgggcacggtggctcacgcctgtaatcccagcactctgggaggccgaggtgggcggatcacgaggtcaggagttcgagaccagcctggccagcatggtgaaaccctgtctctactaaaaatacaaaaaattggccgggcatactgacgcgcacctgtagtcccagctacttgggaggctgaggcaggagaactgcttgaacccagttcaagcaggcggaagttgcagcgagccgcggtcatgccactgcactccagcctgggtgccagagagagactccgtctcaaaaaaaagaaaaaaaagactgtcccaggcaagacacgaacccgagtccaccagactccagaagcggctcttgcaccagtgcgccgtcccaggagccaaggcccgaagtcagaagtgtaaactccctcacagctacgcaccgcattgttaacgacccagatgaggccccctctctccaaccctgtttccccatctgcactatggagaatggtaccggccaggtctccaggcggttgcagtcgaaacaccccgttccgatccccacctcccatgcatacctgcctgaaaggctgccccacccacccaccagccggagaagctgccccgaactggacgcccggacgtgcgtggcccgtcgcgcgctccctcggacgccccgcttccggggtcggcgcctttaagaaaaggctcgggcggacgccgtagcccagcttcagtgttcctatcgctggtgggttcctcccaggagacccctgcggatgggtggggaggctgtgaattccactccctctacgctcgcaggcctgcatacaggaaagtgcggggatgtgtgtggggttgacccttgggggcccggacctgccggtcttccttaaaatcacagcagggatttggctccagcccaaggggattgctccgagctggcgtttaggaaccaggccgggaggtgtgtgggcggagcccagtagcctgccggaaagggggcgtgtcaccagagggcccgggtgttccggcggggaccagatgtccgggggcgtggtctatcttagcctgggggccgggtggagctgtgcatgggcgggttccagtgttgaaggctggtccaactttggggtccagtcccagtgtcgtgaccctaccgaggtcagtggcccgagcccaccagggggtcggccgactggcggccagaccccaggggccgctcttttaccgattcgaatcttgactctattggcaactcctccaggtgttgggacctctggacctcagttgcgccttctataaaatactcggcagcgtctcgcaaagtgtgtcttgtcaacatctccccaccagaaagtactgttaactagaacactgttaactactttttttttctttttttctttttttttttttttttttttgagacggagttttgctcttgttgcgcaggctgaagtacaatggcgcgatctctgctcactgcaacctcggcctccgggttcaagccattctcctgcctcagcctcccaagtagctgggattacaggcgtgagccaacacgaccggctaattctgtatttttaatagagacagggtttcaccatgttggtcaggctggtctcgaactcctgacttcaggtgatccatcgcctcggcctctcaaagtgctgggattacaggagtgagccaccacgcccggccttaaactgctattaaacatgctgtttccctgcctccttcccagaccgggagacacaggggcgtttgcatttgtaccaggctacccggtgactcccataaactactttgaaaaccggcggatcaggagtatctgagggctccttccctgagctgatcatgccgtggatggaagctattgtgagggtatatgtagacttgcctgggtcggggtgcccaataataaatccaccccactctcaacttctgtagacgaagattccccatcttcgtctagaaccctcacaccagaggacccgtctgagtagaaagccaaggttcaggaagggaaaagcagtttcttcaaggtcacaaagtcagccagagttcagtgcaggcccaaggactcccagtccagtgctctccccaagtctcctctgtacatccatccgcgttttgggggcttgagtctgtcctggcacgggtagctggcaggggtcccgagttctggcccggaagggcctggccacccactgtcctccgcccaacttcggcgcaggccacggggtgagggtagtctctaaaaactgcgaccaggttctaggctccctctgggggtggagccagacccgagcgacaagcgaacggtccaattctgggcgggctctaggcccgacagccaatcggaggccgggggcgcggagcgtgcagggaggcaaggcgctgtagcttcggggatcccccgaggctgctcggcccggccccacctccgccgtgggtcccggccctacccaccctagctcaggccggcagagccagcgctcgcggatgcggctggtgcgcagtagcgggcctggccagcggctcggggcttgcagggagggcggatctcgggtcggacccgcagccccagacgccgggcttgggggttccccccgccccggcctcctgccagtcactaccacccctagcctctccaactgagctcggcg

SEQ ID NO: 315753 - DNA, 4001 bp, Homo sapiens
ttgctggtgtagacggggatgacagggccgctgtgcgcgaaggccccgttgggaatgaggaaagcaaactggccatcgggagccggtaccacctggaagcctccaaacaccttagccgcctctccagcctggctgcccagcttgcagggggcgccgccgggagggggcgccgcgcccccggggatgggcacgagtggcggcggcggcgcgaacggcgcgtgctgggggccgccgggtcccggtgggggcggtggcggcgcctgcaaggcggggtgcggctgcccggggtaggtcatggcattgatctgggtcatgcagttggccaggtggccgagcagccgagtgcgcacctcggtattaacgccctcgcacgtggacaggaagcgggtcacctcgttcatgcactcgctgaagccggctcggtacttccccagcacacttgggtctgtgctcagcgcagctgcgggccagaaagagacagacgggtcaccgaacggccctggccccgtggccactgcctccgccctgggaggtccctgtggcgcgcctccctgaccatgcgcccgtgaaactgcctccggcagggagggtgagatgggtttagaaaaaaccagccacctctccacactagcgttgctgccaaaagccgagccactccttcccgattccctgtagctgcatttaaacctatctcagccccagatctgtcacccccacccccgcgcgcgatgtgaccttggacaatgcctcccaatccatcatccaagcctcatttccccttctgcaacgggaaggagtgctaaaccagtgacccccaggctccacgcagttccaaaccgccacagtcctaagtcctttcgcccctacccggcgcccgccaccctcgcggctgcaacctctttccctccctttccggaacagtaacaacttggagttgtggctataaataagccccagaccgtgggaacgcaagagtgagccaaggcagtaaaatgtagctgaatgcctctcacaaccacgggcggaagtctggaagaaatcaccgcgaggcgagcgggacgcccgcacagggggacgcggcgagccgccctcacccgtcatctgcgcccgctgcaggttccggaggtgcttcactgtcatttccagaatgtccgccttctccagcttggaatgccgcgagctctgcatagagtaggcaagaaaggaaagtgagccccgtgtcagctgcttcagagtgctgggggtccctcctcccggccacggagcgcaagcattatctctggaccccagcgaataaggccgggccctcccgcctgggagaacgcagtaccagcgagtgccagaccccgcagggcggggggtttcactcttagtagctgagaaagtgtttgttttttaattaaaagagcgagcagcatttccccacttacatctttcttcagagcatccaaaatcagtgttttcagctggctcagactttcatttattcttgctcttcgtcttttctccataataggctttgatgactgcaaataaaaaaaagagttctgtgttcccatggaatctgccatcccggggtttcaagacagaaagaagccccccaacccctacttaattttgaggggctgcaaagagatacaggtaccgcccttacctttctgtgctcagatgctgtctttggtttatccggtgtcgtgttgacactggctggggtagcagccaccggggacgaggaatttttctccattatatcagctggcattttccttttttttttttttttatctctagagaattttatttttggagttcttcacgaaaaagaattttttgtttgtgtctcttttacttgagactttcacaaaactactgagcaagtgctgagggtttattatattttgtggctacttggtgatcagtagcgctgttccaggaccaaggagagaggtagacgggggattccgctgttatcagcaccagctccggatcctgtgtgatccctaggccctggcggcctctatatatatctgggactgcacgcgaacggctcgtgtgaaacttcccaaactttctttcccacagtaactttcagccaatgggaggaggagacacgcggcaccgctcgtggaccgcgcccccccattggccgccaggcacaaggtctggcggccaatggcgcgcgcctgagcccagggcaccggaggctacaacgtcaatcaaaaggattttaaccctttgctactctccctctgggctttggtttagagattttttttttctttccgctttggtcttgatcttgtctatttcttttggagccagggtctttgctctttatgccctctctcatatgtaacagagctgctttgactgtagtaagttcatttgaaacatattttttttaaaggtataaacaataaagaaaaaaacagcagtggttaaaagggggcggggggagggggggacgggtgtaagaatgtgagttaccgacacatctaaagttcccgctcagactttacattcaggagggtgaaagtagatggtaaaggaaaagggccaaaaaaattttcctgtttccatgcagaaaaaggaaaaattgccttctacctcacaaatgcaggtttttcggagcaaggtagttcttgaatcccacccccaccccgtctttcagaaattcctcgtttggatttggggccttagaccccgggcttccccaggaaacaatcagaataatttccaactgggtggaaggaaacggtatttcaaatgaaaaaatgaacaaggggggctccgagggcaatgactcagggactcgcgccctccttcaccaccctttcccttttcatccgtaggctttaggttctgcggcgcgttgaggtggcgggcaaggaagcagcctctccctcctcgccccgcgggcggcctcggcccccggcgcccgcgggccctttaagagctacaccagccgagctgcagtttgacatcagccggccggcgtgggcgcgcctggagccggagcacgtgccaggatgttttattgccgccgcggctgcggccgggccgggaggatgtgtgtgtgcgtgcgtgtgtgagtgagtgtgtgtgcgcgcgccccgggggcagggaggcggggggcggcgacgggcggcggagagcgggggccggttcctggtccccgggagaagccaagaaggtaaatagcagctgctgtgctcgagcctgggaaaaccccgccccctgcgcctggcccgggctcattggcgcgcgctgcgtgtggggggtgtgtgtgtgtgtgtgtccggggccccctcctccggccccgccgggccaggaatccgagggggcggcgggctgggagccgagccccggcgcttaccctctctccccacccccgcctccccaggccaaggtcagctcttcccggcggggagcgcacacccggggtggagagtggggaattcttccaacccccgcctccccaccctcactttcgggcttggggttttcactcggccgaaagccgcattcgcaacagcccgggggcgaggtgggggcctccaagtttgctcctcgcccccgccctctccccgcggggccctgggcgcccgccgcggtcacgggatgcctgaccgcacttaggaagcggccgggtcagcctcctgcctccgctcggcgactgcggttaaagcggcttcgcgccgcccgccccttccccgggtcccgggcggccgggccgctccccctcactacgcccgggaggccgccggcgggcgcccgggaggaggcgggcggcgcgggcggctgcgtgctgcctgctggccgggccgcgcgccgggaggagtcgccgccgccgccgccgggtgccacgtggcgggcgccgggccgggagcgccagggctctggcggcggcctccctgggggatttgccgagccgggcgggcggcgcgcactgcctgggccggccggccgcctcctccgcctccctcccgcctgcccgggtc

SEQ ID NO: 315754 - DNA, 4001 bp, Homo sapiens
tatgggaccttttcagttttgcacgccgattttgaaaccaaatctaaagttaaggaaaaataaaataggtctcagaaacattattttattattcttaacatttcaacatcatgaataacaactaaatttgaaaattacctggattctgtcttcctctagattcaatttttgagctaagtcttctctaatatcgataccaggatagcagtttactctaaagacattttctaacacttcaatctaagaaaaaaaaatgttgatattcagtatgtctccaaaaatgagctttaatttctagagtaaaatgactacatttaaatcttggcaattaatctggatgcctttttaaaaatgattacctggaaattgttaaaatatggtagtctactgtttcattaataaggcttctaaactgagataccaaagtgagtgggcttttgctcaacttggtgtcaattaaagcctttatattatcattattgggtgaaaaaacttcccacctggttttgagtaaaagcagttcttggtcttcggcctctataccaactcaactctcttttcaaagacagtctttctgaggctgaaaagtaattttcatatttcgaagctctttcttctggcattgggtgatccaccacgctagggaatgaaatcccactgggaggatttgggacatgtagacataagttaccatctttccctaaaaacaaaaaaataagccctgtcttagatggtcaatcttatgttccacaaagttctatagaggtagtttcaggaactcatctttcatttcctagtggaattctggggttcacaagagaattgcaccccgttaaccaaaaaccaataaaaaatgaagatcctgtcttggtaatcctgcctctttggtctctgaatgtcgtttatttttcagtgaaaagagatttcaaatatctgatgtgtcaaacagggagagatcttctgaagtaaatgcaggttcttgggatttcctgtgagtgaatttatccactttgctcaatccaaagctgatattcttttaatttcccataggactcagttggaggcattaaaagtcctagactctggctgggcgtggtgggtcatgcctgtaatcctaacactttgggaggctgaggcaggcggatcacctgaggtcaggagttcgagactagcctgaccaacagggtgaaacccccctctactaaaaaatacaaaaattagcaggccatggtggtgcatgcctgtaatcccagctacttggcaggctgaggcaggagaatcgtttgaacccaggaggcggaggctgcagtgagccaagattatgccattgcactccagtcttggcaacaagaccaacactctgtctcagaaaaaaaaaaaaaataataaataataataataaattaaattaaagtcctaaactctagctctatgtagtatgaaataaagggcaaattaaacactgtaaatgaaataacaaagaattgaaacaattaagctgtggcatacctgatgagctgcaggtgtctgcccagggcctgtggggtttcattaatggaacacagtctttcttctggtccagtcctaagattctctcaattgaaaaggagcaagttgagggtttgttttccccgagctgagcgccttcctgaaggctgggagacatcctctcgtggtctgcacagagcaacagctctggcctctgctggctctgccccacgtgtatagggctgggatcttcctgcagttcaccttatagctccgctgacaagggggctggatttagaacgtcactaattaaaatcctgtcttagaaagttttagcatgtcaatgaacacttgcccagccagcagcttaaggagttaattgtttatttgtttgcaagtaattagcaactaatggctacaccaggggggccacctacagggacaaaaagtgttatctctcctaagcagaacacagacttaactttctctaaagaagtgatgcacaaatgtggcacttatcttttatttgaaatcattaatgtataaaatcaagctttttattctgaagtttatactttcatgggctccagttacctaaacatacaggcaagatacgagagcagtcgagtaataaataatctaatttaagtaaattttcttccaaggaaatgggaaaaaataataatctcttaatgctattacagtaattctgatgaaaatgcctgtttttcatatgcatatgtaatagggaatgttgtcaatgaaaacacaatagtatttggagtgcagcatagtggaaaaggttggcaatgttattaacatggagtgtaattgtcttccaagtgcctggattaattcataggaacagttgcaccaagtattttaaataattaatgggctaattcctttccttcctcttttcttttaaatgagagagatacatgtttatatgaaggttcatatgtaatcaccttcaagcaacttagaagcatgactacttaaagtgaataatttctctatcacagttatttcaaagaaaagaacatagtttgctttctaaagaaaaatttccgtctgttgatcttttgagggatgggcagaggatggagtctttcaagatggtaaggcttatgaaaataaccaagaacagaatgttttaatttcataatcctaagaaaacttgaaattaaaattaaagtataactgctgattgggaagattttgaactggctgttccccccgcaaaggtatacttgtagtttttatactctgctcctcctcttcttccagtaccttcctgaagataaatttaagtgcttagctttattcattatttaaacaactgctgttctttccttcagggaagggaaaaacagtctccactcatagaggaaatagcctctataggatggagctcatcttcatcagcttttatcctattatgatctcacaaatattgagctaaattcctcctgatgaaagctctcgggtaaataaaggatctcacatgcaaaacatcaacaggcatatggatttataaatgtacgtgtaaaaccattctgcggatgaataaaccggtgaacatttatacctcatggagattttgtatatagtgctgagatgtagattgtgcaaaggtggggggtatcttaatctgggacgactaggaggaagcgagagaatacaggaccttttcagctttctttctctcctttgagacattcattatttccttccacaattggttgagcaccttctcagaaccagaaaaaaacaaaatactatccttgccttcatagagctcacagtggtgcagggtggggggcaggaaacaaataataattataggtaaattatctagtatgttagccagggtaagaatgagaaaaggaaacaggtgagccaggtaagatgaattagtgcaggaagtggaggggtagatgtcagtgtaggcctcactgagcccctgagccccgcagatgagtgcctaagaggcacaaggcagaaggatgccacagcgcatgccagagcaactccagttttcaacttcttctttattaacaaagatgttccaatatttttattcagcttaaattgattttccttggatttacatatctatatctatctatctatatctatctatctatctatctatctatctatctatctatctatctatctatctatttttttgagacagagtcttgctctgtcgcccaggctggagtgcagtggtgtgatctcggctcacggcaagctccgcctcccgggttcacgccattctcctgcctcagcctcctgagtagctgggactacaggcgcccgccaccacgcctggctaatttttttgtatttttagtagagacgaagtttcaccgtgttagccaggatggtctcgatatcctgacctcgtgatccgcccgcttcggcctcccaaagtgctgggattacaggcttcagccaccacgcccggctggatttacacatatcattttatatatggatgagta

SEQ ID NO: 315755 - DNA, 4001 bp, Homo sapiens
tcatagaatgttcatcagaaaacaaagtttctatctactctttcttccaagacttcaactcctaccactgacatcatgaccctcagttctattcccctagccctgcccactcccctgaaatccagatccataaatccaaccaccgcctgggtatctcagtttggctgtccctccatcaactcaaatttggctgacacagttttggattctagagcatgcaggcattctgtatgtgctgtgcctttgcactcactcttccctccagaccccgtccttcctcactttgccagttccaacttctctctgaagactcagtttaggtacaggctcctttaggaaatttttttttgactctacctagcccagactcagttcatctacgatattaatctgcagtgtcatgcactagcacaaaatatttgctgaatgaaagaatgagagttaacttttagtcaggcataaagataaaaaaccaaagtcttttactccggtgtggagtgttttcaggattcctaccaattaggaaggtgtttgattcttcaaactcagaaacacctccccttaactgatggattcttcaaactcagcatcagttagagggcattagggcacttctcaaaccctgcattcagggaagatgtctgttgtggggtggtctggcctacttggcctgagccaaggttctgggcagttctgttcagttacacatgcatgcgttgagcattgattcaagcctggcctgggcactaggcatggttttagatattagggacatattctgttttccttgccttaagataccagtctagtaggagccactaaggcccctttttgagcctggacttcgcattcaaacataccctgcttctaatcaagtcatctattggcagtgaccttgggcaaatcatagtctctccaagcattacttttctaattgaaacaagaacctctctctataccccagatttattttgaggattatgagttaattcatagctaaaatgcttagcacctaacagcacataacccacacatacttttcaattgcgtattactaaaaagaaggaatgatttcctagaggaggtgcttcttctggccaagggctgattcagagccttaattaactaaatagatcaagcatatctaactggtcaccggaagtggtccatgaggctgcagcaatgggaaggtgtcagagcaggggttgggaaaaagacatagagagaaacgtgcatgtccgtagtggaggggagctcttaggatgtctacagatttccaagacaataattgaaatgaacaaaggcaagggatgaccaataagagcttcatttctttcctttatcacctttcccttgttcttcagctccagctgtgcccacagacaccacagggaagcctctgaacacaggggtttgaaccagggcctctctaagtcttttccaactctgataccctgaagttctcagaaacttccataaattttggctgaagaagccatagcaaacttgtcagatggtttcttacctttaactcagccattttctctctcctctatgtgtggtgacttcaggaaacccaggcccagaggatataaagccacaatgcttctttctccttcaaaccactctttggatattccggttcccactgcttcactgcgcttcactggtcagtgcgtcactcaaactagctgaaagaattgtctaactcatacacagggacaaagtccagcaagcttatttaaccggttacacaattgcctttggtttttacagtttgttcctaagtgtttccagaggcttggttcctcttcacctgaggtagagattgaccaattatttattccagttaaaagtaggcttatttcaaaaggcagagaatttgaagctatcggggaaaggaactgtggcagatagtgcctgctgtgtgtggtggaggattctctgctcagtcctgactcaggctaggaaggaacagggcagtgctgagtctcctggagagcagtgagaaaacccccaggcatttaccagctgcagatgtgtacactggggtaagatgtttacacacagccacctgaagacagggaccaggaccagaaccagttttctgcaggtgcctcccaggaatgagctcaggttcttgggtgaaccattcagagcctgagatatttcacttagagcaaactgatatgtttcctactgctccttttaatttcttaaagtacgtttagttttcttataaattctttaagagttttgtttcctaatgcctctatacttctaaaacagaccaagggattattctccagccacctcctctatgactcccttgttcttcatcttggccgctctccttggtcattggcaggtagcagcttcatgactagtggtgttcagaaaggagaaaacatatattgagtttctgcttttgtcagatttttccatatctaacttcacaaaaacaatcttgtaaattaggcattatcacaactcaaatgccaacagatgagggaggaagtgtaagtgaataaagtaggctagctgatttttcaagataagatgaagctccaatttttaaccattggtaattagagtgagagagacagagaaaccaccctgtggtagatggcaaaaaatgctccaattcctcctatccttgtatgtgtgcccctttgaatgtgactttgctgttcctcccatcaagaggtagggtctttttctttggctagtagcaaacatgacacagagtttgaaacatgcctgtgccttaggacagggcccattcttgcagcctgagaccacagtgcagagaagctgggctggcctccagaggtccaggcaacagccctgcaagccccacaggaactgccagacatgtgaatgaggcagtctggctgccaggtgactgcagaacatgtgtgatcccaggcaagaccagcagaagaaccaccagttaaatctggcccgaactgctgagccacagaattgggaacaaatagaatggtgtatttcacactactaaattttggggtggtttgttaagcagtgataaataactgatataatcatgcaggttgaaaaacatgtgcatatttgaagtggccacaggctgctagtttgagaccctctgctttagataaatgggcttaaacaacctccaagggtccccaggctccagcatactgcagtagcagcagaattattgcctgtgtatgaggtgctagcacagactgggccagaccaaaggggacatgttgataggaaacatgctggtagcaaaccatgtggactgatgcctacggaccgggcagctgataggaaacctcagcatatgtcagcatagacagatggcattgtggcattatataaactattctggaattcatatgcaaacctaggaggaaggtaggtggaggccctagctttattgaggctaagttttcactattcctataacatgcagactctgaaactgaattcgaagaaaatatctcctgtgtatctaagtttatgagtaccttgggccttcaatctctattgatcttggaagttagcagttggtcattagataaacaaatgggagctaataaaagacaaagggaaatctttactgccttatttttcaacaaactttctatgttacttccattgaaccagttgtgaaggcagatttaagaagtgtttcagttctttcctaaggtatgagagacttctgaaggggtaagaaagtgttaacagttccttgactggattaaaattactttgaggggcttgaaaatatttaaagttgaatacatctttcactaaactttagggattccttctaaaaggagagaatacacacaggggatattaaaatattattttattatttaattttttttttgagacaggttctctgtcatccaggctggagtgcagtggcacaaaaatggctcactgaagcctcaacctcctgggctaaagcgatcctcccatctcagcctcctgagtagctggga

SEQ ID NO: 315756 - DNA, 4001 bp, Homo sapiens
gcctggacagggctggggagacaggttgggtgagggaattacagtctccagccaagcctagccccacctcatggtcccaccaccccagtggggacccactctgaagagagattgcccctccagccccttggggaccttgtaccatcactctgcctgcccctgtgccccccacagttcacaggccaccgaacaccagtgccccatcccagctgctgctcttgcccccaccccacccatcaaggctcttgcccgcagagccctcactcgcagcctgcctccctcaccttcatttacatcttcataccttccagaggcaccggccccaccctctgccaaaaccgctcctgccaaggcccccatgacctgcgtgcggagaaaccccacctctatcactacagtcaggtttctgcctgcagggtccccacctcgatcagtgagtctcccttagctcctcacaaagccccagcttctctaagaccctttctctgactcccactcccctccctgagatcccatgaccaccccaggtgctgcccctagagccaagcctccatcctcgcattaagcctccagcctgtcactgacccccattcccccaacaagtccctgagctccagcctgtcacatcccagtccctgcctgtgtccgtgaccacactgccccactctctcagcgctctgtgtattcaggccctgggcaccagctggaggctgtgctatttgaggaggtgcccaggagtagcggatgtggggccaggcggggccaggcggggccagggagggcactggctgctgtccaaggtgctgaccagaatcaggccccggctgagtctcaccactccctccagcgggggcctagcttgtcccctggagaactgctgggccgtactacggctcagctagcacctttacccttcctatcccgcttcagcctggctcaggggcttcccaaggactccatggatacagacataggacccaaattaaagggaggaagcagggaacatgtccaggcaactcttgggctgacggggccaagaggtggctgatgtggcccttttgcccacccttgatcctcccctaaatcttcatccccagccctgtagccatctcccctgggccccccagcagccgacggtctcctcgtacagatggaggggtcatgggccagataggggcagggacctgtcaaggtcacatggcagacctgggacagacttctgcctgcctcccttcaggattgggtttctcagtgacccccctctggaatctggggtaagagaagaccaccactgcccctgcccacagcagaggctgccagcctgatggctgtgctgtcggcctgagggtggaggcacctcctcatcagttgggtgggggtggagaggccctggggatcaggttaatggagcaggagcttgaaaccggagcatggtgaagagcccgtgaaatagctttgtcagctgcctcccactcgccactttccaattttagctccccatggccggtgcggggtgtccccagtgaggcctctgcaaggagctggcccccagcctggggcctctcctgatagacccccagaccagggctggcctgtggacacgggggcataccctttcccctggtcctgcctgccccagatgccccgggggtaaagccccttttggggcctgtgatttgggatgagggcctggggtgtgccccacaagtctcaagagccccagagtagctgcatccccagctggcactgaccttgaggaggccgcaagggaccctggcacactgcccacctcaggctctggggtccggcttccaactgtccgtccgtgcgaccggctgagctctggggccacggtggggtgtgtccagccctggggtccccacccccttgaggttatgagcggtgagtggtgacagcgggaggaggagggggaggaggaggtggccttcctggagcggagctgagcagagtggagcagagccgagtgctgcagagctgctggccacagggagccgcagggaggatccttgaaggggggcgggtgctgggtggggggagggtgtccagtagcataggctcagacagggacacctgggcctctcttcagcctgcctcccctggctcctagagagcctgtgcctctctctcactgctacccaggacttccctcttccaggaagactcctggtggtcccaccagcctctccaggcttgtaagccctgcccccaccacagacacacacagtcacaacatgcaaacactttcatgcttgggctccagggactccagctcctacctttacatatgacctcctaagggctatcccagggcagacttgtctcgccccatgacctggtccttttcattatgccgtgagtcctggctggccatgcatcagtgcctgagggagggctgacttgcctgatgggactggaactggcatgggacatgtggctgagagggatccccataagtcagccctgtcccatagggagtgtcctggatggaggggtgctagcagggtcacttggcaaggcttgtgggtacttggaatggctggtatcctctcggtggcagagtggaggcagacaggaagacaggtgtgttcctaaccaactgggagtcctggtaggacagggccctcattctggaagggagcatccaaggcctcagccctggatacctgaggggaggggcatcctgaaggtgcccctgagattaagaacctctgacagtgccccttcggttgaggccaagtctcgggcagctgtatgtgtctgtgctatctagggggacctgttcacctgtgtgcttgtggggaggctctcgggggtagaaggagctttgtggctgtgatcagtcacaggacagctcctggagcccctgctgatcctatgaccccagcttcaggctcagttgaggaggcaggagggaggtgctgctccccacccatcagggcccaggaaggggagagactgcacttaggcagggagctgcctcccgagcacatagacacgctggcctggagaacagcaaggagacgcccaacctacacactccacacaggacacagaggcccgtgtctgtggtccccgaccctgagaagcatgaatggtgactactgcacagtgtgggtgctgggttagagctgtggtgggtaatgggcactagagaggccagcatcaggaagggaaggatacctgagccagacttcagggttaaggagggcttcctcagggaggggtagtcaaaggttgttaggagtaagttaatcatagtagccaggatgtacatggattaactttttaatgtcaccacagcccatagggaagatgttgccactgtacgcagttgggagaagaaggacctggcacatgaggaagccaagtagttggatcagccctgtaagctcctggcactgactgccctgcaggggcgacaaccccgtgcacccacactggggccctcacgaggctccaagaaaatggctcaagggagcagacagggtggtttgaccccagagttaagaacacaggttcagccaatttacttgaccctgagctggtgtgacccacttcttagggcctcagatcctcagttgtaaaatgggcataccgctggccctggccctcactggggtggcagggggcatccggtgattcactccatgacaagagccttgctcataaacagaggctattagagagccacagacaccctgacccccagaggcccagaaaggctggattcacactcagaagtgaggccttccctgggtgacccacacacagcagggtctgcagggagtgtggtgtgcggaaatggcaagaggggtggagggctagggaagtcccatggatctgtggttggacagcctgaggccagctccactgtgtctgaggggggtggcaggggagggcacctggcaaggccagcccacgtgagggacaggaagctgactgagctaagaccagcacttggccctggggccagcttccca

SEQ ID NO: 315757 - DNA, 4001 bp, Homo sapiens
tatatactggaaactttagttggggctaaattagaaggattttgaacatataaacactacaactgaataccaaggaaaggtgtgtacatgttataaagatagtattgtgttagaaaggagaacctaaagttataataagccagaatagcaggatttttctggtggcatatgtttatagccccagttaaacggaatggacttggatcctcattttcttttctaggagagtcaggtcagagtcctagatagggaatacctaatagctagtctcatctgacagaagaataaggaggaaggaatttctcttgaataggcaattggtcttcccagaaattaagtcaggaagcaactggctcttggatagcccctgggtcgctgctatgcagatacttggaaaaggggtattcattcctactaggcaggggaaaagtttgcatgcctgcagtcagaagtcagttagacagacattcaaagcctcaaagagaatgctggttatgtaactcagaacaaactctccactcctaggcaagtctctgggaatttagagttgacatgacaacctcaggaggaaaaacaccttgtttaatgctgtactacgtgacctacaccggtcactgaccagagcaaggagaagccacccagaatcactggttaatgatcaaaatattaagctatggtctattttaagcacctggaggaaaactcaacacaggaattggtttctttcccagctcaggccaactgatagaacatgctggtgggccacacgccaaaagtaggcagagccttcattcatggatttatttaagagccaccaaactttcaggctactcaatatgattatataggaaatcatttgtcttttacatctatattctgaaataataatatttattaaacactttctacataccaggcactttgctaagcactttaataaatttcatttaatcttcacagcaatactagtctacccccattttacagattaggaaactggctctgagaaaaatatacaactggttaatgatgaagcaggtaaatgcaccaaggattacttgactctagagactatgatcttgaccactacactttattgcatcttttgattaaaatatgcttataatgggatatgacaccaatttgccattctggacagaaattatttcctccaagtttctaggaaatgggaagctcaagtttgttttgtcaggtaccagtaacacaaaaaaacctaaattacctgttcatatttttttctattatccaaagtcccaaacaatagaaacccaatgagaattgaatcttaactttttgaatcttgttttagttattaaaaaatgacataaacttaatgattcttccctgagacagtggaaatatctaggagacttctaagtttcttgtattagaattcaaagatcacgattcttctgctagataaccactactacggtccttttgtttccaccacagaatggaacgcagtgcatcttggagcagctaataaaactctgtagtgtaactagatgaacaattacaagtaagaatacactcttagagatttttttaaagttcgcagataattttcaaaacaaacattgctcatccctctttcactgtcttaccagaatgttaggtattttcctcatttttgctaagttcttttatttgaaatatatcagcatgttccttcaagacaaccttttactaagtatttgtttggtgcatatgcacaatacatagtatatgcactaaatcaatttaaaagatcagtcactaattttttcctaacgggaaaataaagtgtcaactaaaaaccacccatatttgatttattcatgcccacttttaagttctaggtataaacaacttagaaagaaatccttaccttacttagaaattcataccgtctagtcaaatgctaagtagtccataagaataaacattgaattcagctatgagtttctcagagagtaaagtccaaggtacgtttgatttgctacctatgacagaccaaggaaatcacatcatcaccaaggactccctccttcaaactaagccccacccagatctgagtcagtacagatctgaaaagtccaggaattagaagatgcagtttcagacaacatattgaaacagctaagcattgagctgtgggagcagtggactctggtttccatgctatggtgtcagcttcaccatcaacatgatacaggcaacctcctgaggttggactgcctgtgacctgtctagcttgctgcagagttgtaaagaaaattgtgtagctggttgcagtgggtgccaatagttctgtgagaaagaaccataaccctacacaaagttcatctgcacctacaattcccattacagttctggtcgctagaacacccaagcttaaactcaacttcagagaaataaagacctctctgaattccacatggaaagttgggcagtgcccagcctctatgctgtcatatcatttaatctctctctccctcagtgtcacatgcatggcatgcatgcacatacaacagatgctaagagtcatgctttactcactattgtatcccaaacaactaccacttacttactagcacatagtagctggtcaatatctgtttgctgagtgcatgggagcaaaagttacaaagtgaacaaaaattaccttaggaggacaataaacaggacccttctgtctggaacaaaggatgccatccaagccttggcacagcacacaaatcccctgatcatataatcatagggccctgtctagctttatagcctttcggcattactcaccacatcaacgttaacctcctgccacacatgcacactcaggggagagggcaaagtacatttggggaactccccctcctcttccccatctcttccttgacttccttcttctctagtcagagtcatccatagtgagccttctgctgcccactggaaactgggttgaaagcgccagggctcttcctagaatccccaaagtcacccacgccaacgttttcttttttgtttgtttttgtttttcgtttttttttttttttttttttttgagacagagtctctttctgtcgcccaggctggagtgcagtggcacgatctcggctaactgcaagctctgtctcccaggttcacgccattctcctgcctcagcctcccgagtagctgggactttcaacccagtttccagtgggcagcagaaggctcactatggatgactctgactagagaagaaggaagtcaaggaagagatggggaagaggagggggagttccccaaatgtaccttgccctctcccctgagtgtgcatgtgtggcaggaggttaaagttgatgtggtcagtaatgtccaaaggctataaagctagacagggccctatgattatatgatcaggggatttgtgtgctgtgccaaaggcgcccgccaccacgcctggctaatttttttgtatttttagtagagatagggttttgctggggttcctggtttagccaggatggtctcaatctcctaacctcgtgatccgcccgcctcggcctcccaaagtgctgggattacaggtgtgagccaccgcgcccggccgccaacttttatcattaataagatctattatgaaatgaaatcaaaatcaaactgggacttaaaagatgcaggcaatccctgctttcacctctgaatctccatggccatgtagttaatggtacatcacaccactgtaatattagtttagggaaatagcagagctcctaaagcatacacatgaggagagcagactctcacggaatttgaaaatagaagaattacatattttttgaagatttttgaagttttaggaagaaatgccgtatgcatacaaacatacctgttatgcagagattgttcaagctgaaggtaaaaatagaatcacggttttaaataatatcaatggctgaggaaggaaagaacaatttctctgagatttatgtcacagagaaagtggctatgatatg

SEQ ID NO: 315758 - DNA, 4001 bp, Homo sapiens
agtcagaccttactccatatccagtcttttcactaccccatggatataactacaggtagggtccatacaggacacctgttgtgcaggacttcaacctacttagtccacctcttactccagccacattgtagcagtcagttctgtgaaggttttaaccggcagctacaggggcagtcagtggcattttgccttggtgctgcaccactgcccaaagagctctgaagcagagattgagagcaccacaggaatcctctcagcacccccacaacacatgcacacacaacccagaaagagaggaggtaatatccgtgggggccctggagaggatgaataaatgctcccactccttgcccttgttgagtggttctgaaacatatttactaatgttctccagaaaatcccccgggattaagcatagttcccaatggttgggatccaatcagtaacacatctgtgttgaccttccctcactgctggtttcactcccccgaatcacaatcctgctcgttggtacaagactacccacaccagcctttttccaaaataaagaattgtgcatgactcaagcctgagaaaaactgtctttatataattatctcacagaatatatatttctagtcttaaaacagacttgcatttctaactaccccacaggtattgatactcttgaaaactcttggaatgccatattacactggtcagaagtacagtatcatccttttgccatgaaaactagcctctccagaccttaattttggcaaggcaccacttttctccttaatttcaaaatgttgagtcctcccacaactgttcgttcctcaagaatgttcagctgttgtgtttttttagtttcatcatcactacattgaagctctgttcacaacctccatttcaccatctcaccagattaaacagattttctccattccctctgtaaaatatactcttagttcaggttcccttgaggcagagccagaaatggtgattatcatgcagtggaattactgagggtgagctttcaggagaaaattgtaaggaatcaaggaagtaggacagagaaagggaagaagccaagcaaaaaatgagcttggctgaggtctggtctctatctcatagcatcaggagcactggaacctgagtggcaccacagacttgctcacccttgctgcaaggggccagcttgtcctcaaatcagcctgtcattgggcatgggccacccccggggaaacatcatagcttcccaggcatctctgggcaaaggtaaatctctggaagagtgtatacaaaggccattagcagccagcactcacagcagctggagtttgggtgcacctgcctagaaaaggggatctgggcaggacatcaacaggccctactgttcatacttttccctgtcccttgacatagctagtagtctgcaaggtccagccagggagcagaaacaccacaggtttttgataaagaagaaatttattatcttacagaaaattggccacatgggtgatggctgggaagcaataggggtgagtgaggcaatccagaaattagcagtaacaagaagctgctataacccataaggctggagggataacagaagaaggaactggtgagagtctggaccgtctggggggattagagccactaagaggatgcagaagagaggcagcctctggcaggacacctcaggaagtaagaatggtgaatggggggaacgtggcttcttccctcccctctcctccagccctcccgttttccgcctgtgcctgccattggctggacatacacagaagccagagggaaaggcagtctgggaaatgtggtttcttgcaatgtggcacatagcagagtgaggaagggcagaaaagagaacaagaactgataagcagacactgacacaccgctgcagtacatctgcacaattctgttcataccaagtgagttatatacttaccaaaacagctgtgttttgtccattttctctgctatgatgtagagtaaactagtttggggacatagacatctcttgagattaaaatagaagtaatcaaatctatgtcaggccctagttactgcaatcaaatgtgtatataccatgtatgatttctctagctcagtttctagttctcaactatggaaaagaccaaccttgaaagctacactcctttcttgtgcccaatacccaatcttaaatctagaaaaagggataagctttttctagagcttggctctagaaaagttggaggatttttgaaggtagtatcaagaatgcagctccatttcattcataattttggcacagactgatttaccatgatgctcctctcacttgaatttccattttctccttcttatatctgggtaaataatacttaatgtttgatattacttgatgttttcaaaatgttagccatcactttaaatatttcactgtgcactaaataacataagtaagcattaaacataggtccaaatttagttggcatatttacatgtgtctttgattattatttgcaaagttgtgtcagtacttgggattactcaagaggcagtttagaccaaggccatcccaaggggcttaacaaaatgattacaggcttattagaaaacacagaaagacaagcttcccaggtgttgttctctactacttgcaaatcacaccgctgataaaagaccataggtttgttatgagtagaacaatttcctaagtacatatgctagatacagacacatacccctatttacacttggtaaagtgagaaacaacagatttctgtaaatgttcttaattctatatttctttaaaacaacatggaaggtctataagttacaaccctctaccagatttatagtgcattttggtgaatggtaatactatttcttgtgcaagaaatagtatttttgtgtaggaatatctgcatacatttgccaaaacttcatttgtgctaaagatgatgactgaatatgtcttttaaatgttgtattaaaatttttctgttcaaggaatttatacacatagagtaaaatatagtatagcaaatactcacctcttccccaaatccaattcttgatggtctctcaagctttcaaatcagccttgagatgtaccacaagggcatccagttctatatgtgctgagatgagaaatcaaatccataatcataacaaacaagcaaatttattctcactgccaatgtggatgtgggatgcagttcattttcagtgattaatgacttgtgagaatcagaattcagatcattatactatgaacatttctcttgataatccaaatgaattactctgacttgccaagaaatttcaaaaaaattaacaattaagccagctgattttttccaataagaggggaacaatatgtcattaatctctacagaatatgatggatgaaaataacacaaatatattaacaggtatttttgatgaattttgaattctttgggtatgtttcccctgaaggtaatatgtaaaatgtataattgctttttattcatgtaagacttgtttttcctataaatatcaaaactgggactaatataacatcttttattaatttagcctaatttctctctggaaaaatatattttctctgatctagataaatataagcggtataagaatacaaatttggggagtcatgaggaggagaaagaaagtgctaatttttaaaaagtaggggtatgtcaaaaggacacaggcatcaactttaaagagcctgtaatgaccaaagcagctagaaattttaagcagcaaaataaattataatattagattataacccaaagaataaaaaatccatgtaatataaataatccactaatgtgcataaatggttgaatacataacttttttccataccaaataatttcaaataatatatataaacatactaccctcctccaagaggtgggcagcttaatttccctccccttgagtgtgggctggatttagtcattcagttccaacaaccagagcatgggggaaaaaat

SEQ ID NO: 315759 - DNA, 4001 bp, Homo sapiens
agaggtatgaaaggagacacagacggtggcagagactgaacttatattgacacaagacaaggaacaccaggagtcgccagaagttggcagaacaaggaaggattctcccctagaatcttcagaagtgtgggcctgccaacaccttgattttggacttctagccttcagaactgagaggatatgtttttcttaatttaagccaccatatttgtggtagtttgttaaaggagcctgaggaaagtaacacaatgcctaaatttggagagaaatctttcttctttctttcttgactgggaaggagtaggaaacaaatgggaacataaacaatggcgttgacatgacaatgggagcatagcttatacaatgatacattgaacagagagaagccactcaaaacgccagtgcattcccctttagaacactacacacgcgtatacacaccaccaactaaatgatataaacattggaatgtgatattcagtaggtccaaaaatgagagtcagttcaattatctaacaaaaagtttatttccacccctgccaataactcagcctaagcaaatgagagaacacaaaatacccaaccaccagagtcacctgctgtgaggtggtggcgatggtggttgcaataatggattataggtctcagacaaaatgagaaaaaaaaatcaagagcccatcacgtacctactatgtcagaactgatttaattacctggccactaactgggcaaaataaaaaactgacatgctacataatatacactataatccaaaataggtggggtacaggaatggcatgcaagtgaccaaaaaataaagcccaacctggaataaaacagttcaaagaacagaaaggaaaacttcacttaaattaggtctataccctctagaaaaaaatatacaaaataattatatgttttatattagaaattaatgaccagcatatgtacacaacaaaacaagtactcaaaaacaagctaaacaaaatgataggatgagaagaggattgtagatatgaggaaacaaaatatggactaaaatttctagagataactaataagaatgtagagctagcaaagtacagaagtgatatcactgaaagccaaagtagaggaagatttgtgatatcttcatgaattcagatgaaagagatgaatgcactagatgaggttgagctatagaacataaattgaatgcaattagatgaggttacattatagcacataaatgacacagtattaggataattgatattggcccctgaagtcaagaactcatcaaatcaaggagttgatacataaatacaatgtaagaaaacttttctaaaatgaagacagaattgaatctgttgatctaaagtttccacattgtaggaaaagttgatacagaaaactcagaaccaagacataactgaattaagcagttgaatgccaaataaggggaagaaatattttacttttttgcctaaacaagcaacaaagagatggggcatgggtggagaagaaaaagaaggtgctttgacttctccacaaaagacaacagagcataccgagtccaggattttttttaaatttcctattagtgtgtgctgttttcaaggagacagctagcccagaacagaaaaggcagcaccaggaggcatttctagtaaatgccctcaaggaacttcttttcccctctcccttcctacctctcctcccttgacttcaggactgtattgcataatctctcctgtgagttaggcttccaacagtaaaactaggaaaaggctcactgtaacctccgcctcccgggttcaagcgattctcctgcctcagcctcctgagtagctggaaggagagtaaagtagcatttgctaaagtccatgtagcaaggaaataccaaggaagtgttcccaacttgaattggggaaaatgaagtgttcccaacttgaattagggaaaacaaaatgaaactgaaaactaattcaaaaaagtcgattacatgacttgaagagaactgaatgtcttgtactgtcagaatcaaggaatccccacacggaatttgaaccaatcaaaatgcaattagcaggggaaaatgttgagagagatgttagttaataaaatgtttgtctcagcgtactgtcaggagaataaggggtaggaggttgaaccctggatggtaaaatatttacagtttccagtaatcatggtttccaggtatcatgctatttcagacctgttatcgaaagactaaccctcctactacaacagaacagaaaatgaaatcaggtattttctctttcaaactcatttatataccattttaaagtcagactgtttaatcttcatgttaatattcatttccctactataaaaatcagatctatgtaactcacaagtatacattcttgtgtgaattagattactaatataaatagcaacacagaaatcaaatctagattacttgtcttatttcctaaactatagcatatctcaactttcttctaaaatgagaatatcaacccactacctcagctcagttatgtggattaccttttatattgtacaggcagcacacaaaccacagagctcataggcaatacttggtaaatgcgagtcactcgagtcactcggatgaaaccaatttagaagcagaagagaaacaatagaggagttaaggtagcaagcaggaagaagtgaaaagtaaagcatgctgcttggttccaagaagaaaggaggaggcaagatgaccttgaggctgcttgagttgagggagaaaggggtagaatccttatgagaaaagattacaagaatttgccaagcagattaaaactaccacgggccaccctcaacttccaaaagggaaagagaaacaatgcagtctctcaaattagcctacggaagaaaataggaatataagagacaaggacaattgaaataattgggggcaggggaggaaaattgtggtggggtggggaggaactaaggggtaagaattgaactggagttaccttaataaaaaagactgtaagaagataactctagaagaaatgcctcaagaacaacaaacgtgtttggaatcctcagaaacgtaaataaaagtgggaaaatagaacctatacatacttagtattcagtcatctatttctgcagtcacgtctctggaattcacagggaagacaaaagtacagtaaaaagaagaggtaaaaagcttttcaaagacagcttgcagaactatgtcagagcatgcaacactaaaagcacaagagtgaacaggaattagaaatgtaatctacaaagcacacttaggatataatgttttgcatataaaataaaacgctaaattcaatagggaacattggtttggagggcctaggtctcctcacactcaaattttaaggagactaactccaagatcagaagacataaattagaagagatattgtgcatgtataattccttcctttccagtgaaaggaagagaaaatttcagtgaaaatgagagaaaggaaattctctcatttcattgtactgctatgaaatatttcagctgtgttagaagctaaacgtaaatatttgatgtcattagtcatttttgattactctcaattcccagattaaagaacatttagataaatatgacagcattattaaaataaagtgtttgggaatttagatttctgttacaagcaataagagcaacatcctggaactggcttagacaacaaagggaatcttctgagaaacataactgaggcttctaggagcctctggccagctctacccaggacgtatgtcactaggtttcacgtctctgctttgcctcctgtgggtttaccttatacacaacctagcttccctcgtgataatgaagtggctgtagatgtttcaggcctgacctcacacaccgctaaacccagacgaaaagaactggagcttcaccagcgcttcttattaaggagagaagcttatttcctggaagccccagcaaaccatgcttttcctattattggctcacc

SEQ ID NO: 315760 - DNA, 4001 bp, Homo sapiens
attaatatttaaaaatccaacacatatcagttatttgttattctgtagtcaaaatattataattcccatatagtacatatctaaaatactctctgaatacaaaattttgataactgtctaattaccacgtagaagtttccaaagtattcatggtttatagccacctgaattgaaaactggttaagtatcaggaacaataagttctaatcatataatttgagagtaacaaatcagatgaataatccaagccaatagccttattttacaggtggggaaagggttgtgagagggttatacgaattgctcagtacaaggaatacatgtctggtggggtaggattagaatccagctcttctgatagagagtcctgggttcttttgattgacgatatattgccaaagcatcaatcttacgctgctgatgtaaattagattaaattggcagataagaattctgattagaaaatttaagaatccattactcaacagaagcccacgttgttctctttgaatgatatatataaaaaaatcatgcctaaggtaaacggaatcttcttcagtgacttaactcatctaacaatttcaattgtgatttgaaaagacttttttcactacaccactgccagactttccttcattatcgttttctcatccacccacagtagttgtcccagatttctgtcagaaagttgaatagacgctaaaaaaggcaccagtaaccagatatttaaagtcagtttggagagcacaaattaattctgtacgcttagtaagacacgactgaagacctttccacagggaacctaaagaggcattaagggaagatgagccgtccagcatcaggagacgtaacaggttgaatgaaggatctttcttcacagtcattttgtcacgggaattactatctaaagcaacgctggcttcaaactgattttgcatcagtcgcccatcagcttgtttaaaatggctgccaaggccccagcatggagatccggattcaggtggtctggggcagagctcaaggaatctttaagaagccccttcaagtgactctggtgcacaaagagaactcctagtatacaggactccaaatatgtgtgtcatgctggagcttcatgaccaggttgtcaccgcttcaacctgttagaactttccatccaaacctgtcttactccaaagtgcctttgtacttccggaagcagggatccctgtcgtggggattactccgaagagggaaatagctgcttcccactccgggaatttaagacaaaggcgaatatcactgctgcatcatgtcggctgctcctaattctgcccttacgctgtgctttgtaatctctaacccgccgactcggcaggagaaaaatttaattcggtcacagaagcactacacaggaccctaggccttatcactttcccagggtggaggaaacaccaggtcggggagaaaagcaagaccaggactggaaggtcctctgctagtacgccctcccctcaacctcccgaccttcctcgccgcctctcttcctgtgaccttgtcgtgactccgtgaccggagcgctcgctctcctatcccgcctcgcctgccgcttagcccgctcttcagaatgttccaagctccggggaagctcccgctcctcgctccccgccgtcgggcccagtcaacaccctcctggcccccgtctctcattaccaccccatcagcgagtcttccccgctcggcaactcactccacaagcttctgctccatctcctcgctggctccgtctcccctcacccgaaggaccctaggcctcggctcccgactcctctcatccgcccatgctcgaggccgggcctgagccccggcaactccacctctcctccctcattcgagacacggactcccagcccccacccccaaagtcctttcggcctggccaagcgctgccccacttcttcccgccccgcggcccgagtccctggctcgcagtcccccggcttgtttcgcttacctagagcgagaaaacctctcacaccccaaccggcttccgatccctgcaggcgcacccagtcctcccggcttctccccacccacagccgtcccagccaatcagaggccagcggccgcaaaaggacgcgtgcgtgtgcgcggcgggtggggcagtgcagagcgggtcctggattggctgggccggtgagtgctggcccactaccccggctctagcgtactggcggagacagacgtgagagctcggcgcctggggttcgcgcccgggcacttgaggggctttggctcctggcccaaggactcctcagatttctcctgcccttttcccctcgggcagcggaggcgagcaccgcgaacgccgtgtcccgagcgccgccgcctgcggacgcctcacgggccgggaagggatgcgggtgaggggtttcggctgcgggtgaggttgtgttccccgacccacccgggtccgactgcttgttctcgccgttcagtaacgagatgcagacagactgggaaagaacggagtttatttctgcaacaggttacagggagaaggtcggagtaactcaccagaccaactcaaaattattaatacaagtttttctagtgcttaaatacattcagtgcatttacaagtcgaaagccaaagtgtttcactcaagccaatctttaacggtaatagggtcaggtgtctagacaattgcttcagagccttggaaataatctaaagtgggtcctggtacaaggtgtgcaagaacaactccattattttaattaaactctaggggttgaaaaagctcaggcgggatcctaatggacttgtctttacattctagcctttctcctaaggcaccagtttctccaatgtttaacttatacatgcatcagaatgacagtgaggcgttggtgagagctgctctggttgctaatggagatctggcctgccacagtgggagcagagcttgcccagtgcgccgggacgactgcgggctccatccattccgctcccagggcggttgtcggccaggaccgtgagctgtcaggtcccccgcgggatccttcctggagcttacactatagtaggaggcagccagtacttgcaagcacggggtcgcgggaactacgacctcacccaggccaggcgacctttctctcaagaaggagatgtcagaggcccctcgtgacagcgagcttccggggacagggctcctaatgtgtttgtcaagtaaataatgagtaataatccggccaattggtgggtcaacgaaaaaagtcaaactctaagatatttgaagagatttattctgaaccaaatgtgagtgaccgtggcccctgacacagccctcaggaggtcctgagaacatgtgcccaaggtggtccaggcacacttggttttatacattttagagaggcatgagacatcaatcaaatacatttaagaaatacattggtttggtccagaaacgggggacaactcaaaggcgagaggggagggggcttccaggctataggtaaatttaaacattttctggttgataattggttgagtttgtctgaagacctgggatcaacagaaagggaatgttcaagttaagataaaagattgtggagaccaaggttcttttgaagtcttgtagtggctgcctttagagacaatagatgacaaatgtttcctattcagatgtttgaaaggtgctagacttttaatctctttaggattggggggcctggaagaaaaagatctagctatgttatagggattctttacagatgagaatttttccccgcaaaggacagctttgtatggccatttcaagatatggcaaagaaatatgttttggggtaaaatatttttattttcttccttgtcttataatgttatgccagagtcaagttggaaagtaagtcacgatatatagagttaaataaaacccatttgatgataacttattatttgtggggcatgactccccagaccccttagataggaatttgggcatgataaaaaaaatcag

SEQ ID NO: 315761 - DNA, 4001 bp, Homo sapiens
tgaatacaaaattttgataactgtctaattaccacgtagaagtttccaaagtattcatggtttatagccacctgaattgaaaactggttaagtatcaggaacaataagttctaatcatataatttgagagtaacaaatcagatgaataatccaagccaatagccttattttacaggtggggaaagggttgtgagagggttatacgaattgctcagtacaaggaatacatgtctggtggggtaggattagaatccagctcttctgatagagagtcctgggttcttttgattgacgatatattgccaaagcatcaatcttacgctgctgatgtaaattagattaaattggcagataagaattctgattagaaaatttaagaatccattactcaacagaagcccacgttgttctctttgaatgatatatataaaaaaatcatgcctaaggtaaacggaatcttcttcagtgacttaactcatctaacaatttcaattgtgatttgaaaagacttttttcactacaccactgccagactttccttcattatcgttttctcatccacccacagtagttgtcccagatttctgtcagaaagttgaatagacgctaaaaaaggcaccagtaaccagatatttaaagtcagtttggagagcacaaattaattctgtacgcttagtaagacacgactgaagacctttccacagggaacctaaagaggcattaagggaagatgagccgtccagcatcaggagacgtaacaggttgaatgaaggatctttcttcacagtcattttgtcacgggaattactatctaaagcaacgctggcttcaaactgattttgcatcagtcgcccatcagcttgtttaaaatggctgccaaggccccagcatggagatccggattcaggtggtctggggcagagctcaaggaatctttaagaagccccttcaagtgactctggtgcacaaagagaactcctagtatacaggactccaaatatgtgtgtcatgctggagcttcatgaccaggttgtcaccgcttcaacctgttagaactttccatccaaacctgtcttactccaaagtgcctttgtacttccggaagcagggatccctgtcgtggggattactccgaagagggaaatagctgcttcccactccgggaatttaagacaaaggcgaatatcactgctgcatcatgtcggctgctcctaattctgcccttacgctgtgctttgtaatctctaacccgccgactcggcaggagaaaaatttaattcggtcacagaagcactacacaggaccctaggccttatcactttcccagggtggaggaaacaccaggtcggggagaaaagcaagaccaggactggaaggtcctctgctagtacgccctcccctcaacctcccgaccttcctcgccgcctctcttcctgtgaccttgtcgtgactccgtgaccggagcgctcgctctcctatcccgcctcgcctgccgcttagcccgctcttcagaatgttccaagctccggggaagctcccgctcctcgctccccgccgtcgggcccagtcaacaccctcctggcccccgtctctcattaccaccccatcagcgagtcttccccgctcggcaactcactccacaagcttctgctccatctcctcgctggctccgtctcccctcacccgaaggaccctaggcctcggctcccgactcctctcatccgcccatgctcgaggccgggcctgagccccggcaactccacctctcctccctcattcgagacacggactcccagcccccacccccaaagtcctttcggcctggccaagcgctgccccacttcttcccgccccgcggcccgagtccctggctcgcagtcccccggcttgtttcgcttacctagagcgagaaaacctctcacaccccaaccggcttccgatccctgcaggcgcacccagtcctcccggcttctccccacccacagccgtcccagccaatcagaggccagcggccgcaaaaggacgcgtgcgtgtgcgcggcgggtggggcagtgcagagcgggtcctggattggctgggccggtgagtgctggcccactaccccggctctagcgtactggcggagacagacgtgagagctcggcgcctggggttcgcgcccgggcacttgaggggctttggctcctggcccaaggactcctcagatttctcctgcccttttcccctcgggcagcggaggcgagcaccgcgaacgccgtgtcccgagcgccgccgcctgcggacgcctcacgggccgggaagggatgcgggtgaggggtttcggctgcgggtgaggttgtgttccccgacccacccgggtccgactgcttgttctcgccgttcagtaacgagatgcagacagactgggaaagaacggagtttatttctgcaacaggttacagggagaaggtcggagtaactcaccagaccaactcaaaattattaatacaagtttttctagtgcttaaatacattcagtgcatttacaagtcgaaagccaaagtgtttcactcaagccaatctttaacggtaatagggtcaggtgtctagacaattgcttcagagccttggaaataatctaaagtgggtcctggtacaaggtgtgcaagaacaactccattattttaattaaactctaggggttgaaaaagctcaggcgggatcctaatggacttgtctttacattctagcctttctcctaaggcaccagtttctccaatgtttaacttatacatgcatcagaatgacagtgaggcgttggtgagagctgctctggttgctaatggagatctggcctgccacagtgggagcagagcttgcccagtgcgccgggacgactgcgggctccatccattccgctcccagggcggttgtcggccaggaccgtgagctgtcaggtcccccgcgggatccttcctggagcttacactatagtaggaggcagccagtacttgcaagcacggggtcgcgggaactacgacctcacccaggccaggcgacctttctctcaagaaggagatgtcagaggcccctcgtgacagcgagcttccggggacagggctcctaatgtgtttgtcaagtaaataatgagtaataatccggccaattggtgggtcaacgaaaaaagtcaaactctaagatatttgaagagatttattctgaaccaaatgtgagtgaccgtggcccctgacacagccctcaggaggtcctgagaacatgtgcccaaggtggtccaggcacacttggttttatacattttagagaggcatgagacatcaatcaaatacatttaagaaatacattggtttggtccagaaacgggggacaactcaaaggcgagaggggagggggcttccaggctataggtaaatttaaacattttctggttgataattggttgagtttgtctgaagacctgggatcaacagaaagggaatgttcaagttaagataaaagattgtggagaccaaggttcttttgaagtcttgtagtggctgcctttagagacaatagatgacaaatgtttcctattcagatgtttgaaaggtgctagacttttaatctctttaggattggggggcctggaagaaaaagatctagctatgttatagggattctttacagatgagaatttttccccgcaaaggacagctttgtatggccatttcaagatatggcaaagaaatatgttttggggtaaaatatttttattttcttccttgtcttataatgttatgccagagtcaagttggaaagtaagtcacgatatatagagttaaataaaacccatttgatgataacttattatttgtggggcatgactccccagaccccttagataggaatttgggcatgataaaaaaaatcagagcttagtcctcagatgcaaagcatctacaactgcaccatggagaaatctgtgattaagttagagtttcttgatataaccacaaaacaaggca

SEQ ID NO: 315762 - DNA, 4001 bp, Homo sapiens
cgtacaaatatttaactaacttaaagtaaaataaagattaaccgcacacatcacctgcgaattctcttattttctaggttaacgccagaaatataatcaaaatttaattatctactattatactcactactcccgtgtaatagcgtagtccaaccacatgacctctcaaacttccaaataaaacggaatctacttcttcatcactagttagaaagtcatctggagggataacatcttggaattcaaaacgtggaaagaaagttggatatgagaggcgtggaaaatttccatgaactccatactggacagtctgcaagtacttccaaactggatccctatttttttttaaaggcaaagaaaaacaatataatatttaagtatttccaaagaccatatgagtagttttctcatgctttacttcagcaaatgaaatcttacatgggaatcacggtaaagattaatagttactctcgttaaagcaggaattgcagtgagtggagaaggcttctaggaactctacctgttttcaatattggctcttctacctgccccctaggtattcaaaatgaaaagcctagtcagagttcactaacctctttcccagtgaaaatcatctaaattgatatgtatatgatgtctgtaactacaattatgggccggatgcggtggctcacgcctggaatcccagcactttgggaggcagaggcaggtggatcacctgaggtcaggaatttgagaccaacctggccaacattgtgaaaccctgtctactacaaatacaaaaattagccaggcgtggtggcgcccatatgtaatcccagctactcgggaggctgaggcaggagaatcacttgaacccgggaggcgtaggttgcagcgagccgagattgtgccactgcactccagcctggacgacagagcgagactccatgtcaaaaaaataatttaaaaaatgaaatcatatgccaaaatttcaatagggattgagctatataaaagacttataaaaatacaactattaatgtaccagaagttgtttataattttccagaaaatacatccagcatccatcactgtaactccctgcgagcagaacacctattctggtatccaaaccacgccaccgtgggaaattggccccaagccacccgtacccgccttccgtcgccggtttaagcataaccccaaacccattaggtgtaactgtttcgggaatgaccataaataccaatttggacaatgaaaagtgaaggggagtctactggagcattgcaaaaagtttccattctcctaagaacagtcgcttatttgcgatgcgttttccttgcaagtggcgcatatctctactagcgcctctgcaaatacttatctgcacgtctgtgcatacagataagctgtgagccacttggggacaaggactgtcttactcggccctccaccgagcacaatgcctggcgcacagtgggtatctaatggatgttttgttaaataaagcactggccgagatgctttaagccccaggccccccacagtcggtgacagagatttcccaagtccctaacacgggactcgccctaggagcccctactcgccagcgaagacaatgcatttatttctccggcggccacatatgcgaccaacagaacgaatacagctgcacaaatcgcccagggaacgcagaggaacgcggggaaggtcaggttcatttggggacgcctccaggccgttagaccgagcgccccaccccctccgcccccttcacctcttgaacatccaggacatggcgctgagtgggatgacaagaggagcgcctcggctcccctggatcgttttcgagccgcctcgatacgcctccttccaggccccgcagccctgaagccggggacaaattccgagcgccggatcaggagcgcacgactgaaaggtaagtcgccgcgagtccagtcagacgtcgacgccgtctccttctgcaacaatctgggagaccagcgtcgctctgtgactggcactaggaaagcccaatcacgaagaggagagtgcggagccaaaccagtcagagcacagaagggagggcaactccgccccgctgccattcaaagacggcggggggtccgggctgcaagggtggttccatccgggttcttccccgcccccaaggcgggcgcgcgggaaagccacgaggccccaggagtgcgactgcggtgcctgcggtgccggtgttttgtttgattccctgcctcaaacggagggaaacgaccttcctttatcctacgagtcctaagactgaaccccattctaaaggctctaccgtatccttcctcttattttcttctcatctaatgtggcacataatagggccttatactaaaggagctccacggtttacgagacctagagctaccggcgagatactttacttcattccctgtggtgaaccgtggggactttcgctccaaattttcatgttaagcctcagcgtatgcatgagacacaacgagtttggaaaatcttaaatggaacttagagtcccctccccacctctttttgttatttttaaggaaaattttcctttcttggtgcaggaaacccatcacatgtttattacagctatgggggcgtttgcctgaaatggtggacgggaccattttccccgtgggcacttggctgctccagccaagagggggaggcccttgttttcctcaaggaactgcagaggggcgctctgaggccctccatggctctctttccagagtctgaggtgaccggaaggagaatgcggccctgggaccgtcaaccttggaccagctgcagccgacgcctggcagggctggtcgctttgcgttgaggaggctgctgtccccgaagctggccttttaatcgcacagggcaggaagctggtggtggcgcccagctgcacaggcggcaccatgtaactgccagataatacttgcgcgtcacagagaggtccatgttacacgcctgtcagcacaataatattaggtggtcagcttttcttttttcttttttttgtttttttttcttttttattgagatggagtcttgctctgtcccccaggctggagtgcaatgggggtgatcttggctcactgcaacctccgcctcccggattcaagcgattctcctgcctcagcctccggagtagccgggattgcaggagcccgccaccacgcccagctaatttttgtatttttagtagagacggggtttcaccatattggccaggctggtcttgaactcctgacctcaggtgatccgcccgcctcggcctcccagagtgctgggattacaggcatgagccaccgtgccaggccggtagtcagcttttcaagacacatttgttcattatcgtaaataaactgtagtgatctctaatcatgaaccatggatgagcaatagaatttgaaacaatgtattatttcatttgaccaaagttgatgaggaagataaagacaatggcatttcaaattattttaattgttgtatgttcttcttgaagtgtgttgaggcaaatggcaatacagttcagcttttagtatgccagattttaaataaattcttggaaaatatgccagaaattgctcaaattgatgttttgtaagagtaagaaagtcatgctcactagacaaagaaaaaattccaaatatgagaacatagctctttcagacttaagactggccaggcgcaatggctcacacctataatcccagcactttgggaggccgagttgggtggatcacctgaggtcaggagttcgagaccagcctggccaacatggtgaaagcctgactctactaagaaaatacaaaaattaagcagacgtggtggcacgcacctgtagtcctagctacttgggaggctgaggcaggagaatcgcttgaaccagggagacatgggttgcagtgagccgagatcaagccactgcactccagcctgagcaacagagcgagactccatctcaaaaaaataaaaagacttaagat

SEQ ID NO: 315763 - DNA, 4001 bp, Homo sapiens
taggattacaggcgtgggccaccgtgcccagccaacaatcacgatttttaaaaacatgtcaaggtcatttaaaatatttaagacatggagaaactattactttctagaacgaagcatttttattacacacacatacaaagacacacacactttcaggagataaggcaaaaaactaaaatatgaatgtaagtgactggtaattccaacactacagggataaatactataaacacaatgaatgcaattaaacttcagataaccaaaccaaatacgtgtttctagccttagtaaaagacaaacacaaaaagattgaaaacacaagcagaaagaataaaacttttcaatgctcaagaaacatcagaagtgttttaaattaactgatcttaagcctgtcctaggcctagagaagtctgattaagctggcctggtaaagggcatagaaatattcttaaattttttatttttttaaattttttctttaggcagggtcttgatctgtcacccaggtgggagtgcagtggtacaaccatggctcatgaagcctcgacctccccagctcaagtgatcttcccacctcatttttttattttttgtagagatggggtctccctatgttgcccaggctggtctccaactcctaggctcaagtgatcctcccacctcggcttcccaaagtgctggggttacaggcatgagccatggcacctggccttaaatttttttattatatttttaagatactccaatgaccctgatgatcagtgaaagctgctattttaaaacacaaagctcatataaatttggcatatattaaggctagtatgccatgtatagcaaaggcatttaaattgagcctgaaaaatacgtctttatcagtgttagaagccactgataaaacttctttcatgaggccaagagaggttctcaactggaagtcagaatatatcagtaaaggctggtttttaatgtcatcccaagaggctgagcacacaccaaaccaaataggagatgaccatcacgaggctgggcgaggggctagcatagtgcaatgctggttaccttctcaaagtgcagtcgagacagaagcactgggctgttggattgaggactcttgttgtaagaggggcagtacttatcagggtccctccactccgggagccgctgctggccccgccgatcctggtaggcgcaagctctcgtgagaacatctctaggtaagtgacaggatgttcgcccacacattcttcaacaccgcccctcgcaacctttaaattacaaaacgtaaggaaaaggcttacgtatctcaaatattaggtcttattccttgagtccccgccttctctttccgttcccacagggccgtgcccctccgtgaccaccgtctaaagtcttccccaaaaagtcccacaaagacaaggatgtgcccgtttgcttcgctccctgagcccactgcccagctccgtgcagggcactgaggcaagtcccgagaggagctctgcaaatgcctgcctgagcgcaggaagagccgcagcggagggggcttcacagtccagcgaagcagggcaagcgcagctagctggggtcgcctcctccgggtgacttggtgcccccaactccccgtccttccccccagtccccgctggggtcagcgacccacgccggccagcaaccggtcacctcgagggcggccactggacggcccggggccggggtgcagaatccccgcctcccgcccgctagtccgcagcgtccccgggcccgacctgcgaacctgtgggccgcggatcccgctccggactctgctccccggagcgggggccggtgctcggggagcaggtggcccccagccaccggccgcgatccctcgcccctccccgcgtcgcctccgctccgctccggccctcagactccgccgccccgcgtcgcctcacttcggcccaggccgccctctccgcgtcgcctcgcgtccgctcgggcctctgctcccctctgtcagctcgcgtcgcttcctttcccctcccctcccctcgccataccccgaccgcccgcgtcgcctcccctcccctcacctcgccccggcagcgcgcgtcacctccctcgactctcctcacccccgctccgctccgctttggccacccgcgtcaccgcccctcacgtcagccccgcctcagcccgcgctcccggcgccaggccccgcccccaagggcccttggttcccgcggtgccctcgggccccggaggcggcgtcttctcccctccggtttgggatgaattttctcccgtttccccaggagacagtgactgccttgggagacatatcgatcccaagcttctcgggactccactttcctccatattggccgttccctggcggggttaaccttcctccccgcccccagcgtgtttcagggctggcagggaaggttcccgccgcgctgagtctagggcacagggtcatggaaggcgggaaaccaggaaactccactccttacttcacagtcctgccagctgcctcacagtgcgaggcaaaaatggaggaacactgaagaaatgaaagtcagaagaacttccaggaatcgcgcacttcgccctcaaacattggtgggcactagaataagcctttcctgccccagcccctcagctgaatctctaagggtgaggcccagatttttaaaacagccctttcgggtgtactttggcctcaaagttggtaaaatagcctggcttgagtttaaaagcctgctccccttgggacctaaaccggagattcttcatctgcaaccaacagagaatgctctagagggctgttcgcctatgctgattcgctgaactgaacagggagcagaaaccccagggcacactccatgtaagaccagatgctggaacgatcagacacaggacccaagccctttggagcctccatttatcgactatcaaaggaggatgcgttgtgaagaagcacgaacgggagggagtgtgaactctgcctgttagctgattcactcaaccaccctctaccgctcccacccctgggcttggtgctgggacagcgatgacggggagagggtcctgcctcacaggactacaacagccaaagggctgtgggtgcaagggggacagggcaggtgttctgcctctttaggggaggccttgaaggggaaggtggagccctgaagcatgagtctgcagaagtagcaatcattcaataaatacatgctgatttattacagggataagatggtttcttgggggatagattcaagaggagttgagaatgttttattcatttacaatgtccctttcctggaagggtggacagcaagatttaggacaagctaaaatcatcccctatttaaaaaaaaaaaaaaaaaaagtcaccagcaagtagtcccgggtgggaggtgggagcagaataaaaaaaaatctgcaatgattcctaattgtttttcaatacagaagcttgggaaggggtttctgccagtttcatgaggaaggcacaacttccaggtagtgttggggaagggtatgaggtcctatgcaggctggcctcttatcccacagatgccaagatgatgtctactggcagctcctccaaacttctggctgtcacctgcattgtcactgtgtccaaaagcagcagccgggagcgcaccaggatgtcatgaccaccccggaacacacctagaagggaagagagaagtacagatatatacagcagaagggactgtacagggcaggctaaggatggcatttgcagcaacccatgaaggcagctctggtgtagtgaaacgggcaggagagctgggctgaaatccctgagtgagggatttcactgtgaaagtcactgtctctcagccaggcgcggtggctcacgcttgtaattccagcactttgggaggctgaggtgggcagatcatgaggtcaggaattcgagaccagcctggccaacacagtgaaaccccatctctactaaaaatacgaaaattagctgggcatggtgg

SEQ ID NO: 315764 - DNA, 4001 bp, Homo sapiens
tacaaagacacacacactttcaggagataaggcaaaaaactaaaatatgaatgtaagtgactggtaattccaacactacagggataaatactataaacacaatgaatgcaattaaacttcagataaccaaaccaaatacgtgtttctagccttagtaaaagacaaacacaaaaagattgaaaacacaagcagaaagaataaaacttttcaatgctcaagaaacatcagaagtgttttaaattaactgatcttaagcctgtcctaggcctagagaagtctgattaagctggcctggtaaagggcatagaaatattcttaaattttttatttttttaaattttttctttaggcagggtcttgatctgtcacccaggtgggagtgcagtggtacaaccatggctcatgaagcctcgacctccccagctcaagtgatcttcccacctcatttttttattttttgtagagatggggtctccctatgttgcccaggctggtctccaactcctaggctcaagtgatcctcccacctcggcttcccaaagtgctggggttacaggcatgagccatggcacctggccttaaatttttttattatatttttaagatactccaatgaccctgatgatcagtgaaagctgctattttaaaacacaaagctcatataaatttggcatatattaaggctagtatgccatgtatagcaaaggcatttaaattgagcctgaaaaatacgtctttatcagtgttagaagccactgataaaacttctttcatgaggccaagagaggttctcaactggaagtcagaatatatcagtaaaggctggtttttaatgtcatcccaagaggctgagcacacaccaaaccaaataggagatgaccatcacgaggctgggcgaggggctagcatagtgcaatgctggttaccttctcaaagtgcagtcgagacagaagcactgggctgttggattgaggactcttgttgtaagaggggcagtacttatcagggtccctccactccgggagccgctgctggccccgccgatcctggtaggcgcaagctctcgtgagaacatctctaggtaagtgacaggatgttcgcccacacattcttcaacaccgcccctcgcaacctttaaattacaaaacgtaaggaaaaggcttacgtatctcaaatattaggtcttattccttgagtccccgccttctctttccgttcccacagggccgtgcccctccgtgaccaccgtctaaagtcttccccaaaaagtcccacaaagacaaggatgtgcccgtttgcttcgctccctgagcccactgcccagctccgtgcagggcactgaggcaagtcccgagaggagctctgcaaatgcctgcctgagcgcaggaagagccgcagcggagggggcttcacagtccagcgaagcagggcaagcgcagctagctggggtcgcctcctccgggtgacttggtgcccccaactccccgtccttccccccagtccccgctggggtcagcgacccacgccggccagcaaccggtcacctcgagggcggccactggacggcccggggccggggtgcagaatccccgcctcccgcccgctagtccgcagcgtccccgggcccgacctgcgaacctgtgggccgcggatcccgctccggactctgctccccggagcgggggccggtgctcggggagcaggtggcccccagccaccggccgcgatccctcgcccctccccgcgtcgcctccgctccgctccggccctcagactccgccgccccgcgtcgcctcacttcggcccaggccgccctctccgcgtcgcctcgcgtccgctcgggcctctgctcccctctgtcagctcgcgtcgcttcctttcccctcccctcccctcgccataccccgaccgcccgcgtcgcctcccctcccctcacctcgccccggcagcgcgcgtcacctccctcgactctcctcacccccgctccgctccgctttggccacccgcgtcaccgcccctcacgtcagccccgcctcagcccgcgctcccggcgccaggccccgcccccaagggcccttggttcccgcggtgccctcgggccccggaggcggcgtcttctcccctccggtttgggatgaattttctcccgtttccccaggagacagtgactgccttgggagacatatcgatcccaagcttctcgggactccactttcctccatattggccgttccctggcggggttaaccttcctccccgcccccagcgtgtttcagggctggcagggaaggttcccgccgcgctgagtctagggcacagggtcatggaaggcgggaaaccaggaaactccactccttacttcacagtcctgccagctgcctcacagtgcgaggcaaaaatggaggaacactgaagaaatgaaagtcagaagaacttccaggaatcgcgcacttcgccctcaaacattggtgggcactagaataagcctttcctgccccagcccctcagctgaatctctaagggtgaggcccagatttttaaaacagccctttcgggtgtactttggcctcaaagttggtaaaatagcctggcttgagtttaaaagcctgctccccttgggacctaaaccggagattcttcatctgcaaccaacagagaatgctctagagggctgttcgcctatgctgattcgctgaactgaacagggagcagaaaccccagggcacactccatgtaagaccagatgctggaacgatcagacacaggacccaagccctttggagcctccatttatcgactatcaaaggaggatgcgttgtgaagaagcacgaacgggagggagtgtgaactctgcctgttagctgattcactcaaccaccctctaccgctcccacccctgggcttggtgctgggacagcgatgacggggagagggtcctgcctcacaggactacaacagccaaagggctgtgggtgcaagggggacagggcaggtgttctgcctctttaggggaggccttgaaggggaaggtggagccctgaagcatgagtctgcagaagtagcaatcattcaataaatacatgctgatttattacagggataagatggtttcttgggggatagattcaagaggagttgagaatgttttattcatttacaatgtccctttcctggaagggtggacagcaagatttaggacaagctaaaatcatcccctatttaaaaaaaaaaaaaaaaaaagtcaccagcaagtagtcccgggtgggaggtgggagcagaataaaaaaaaatctgcaatgattcctaattgtttttcaatacagaagcttgggaaggggtttctgccagtttcatgaggaaggcacaacttccaggtagtgttggggaagggtatgaggtcctatgcaggctggcctcttatcccacagatgccaagatgatgtctactggcagctcctccaaacttctggctgtcacctgcattgtcactgtgtccaaaagcagcagccgggagcgcaccaggatgtcatgaccaccccggaacacacctagaagggaagagagaagtacagatatatacagcagaagggactgtacagggcaggctaaggatggcatttgcagcaacccatgaaggcagctctggtgtagtgaaacgggcaggagagctgggctgaaatccctgagtgagggatttcactgtgaaagtcactgtctctcagccaggcgcggtggctcacgcttgtaattccagcactttgggaggctgaggtgggcagatcatgaggtcaggaattcgagaccagcctggccaacacagtgaaaccccatctctactaaaaatacgaaaattagctgggcatggtggtggacgcctgtaatcccagctactcgggaggctgaagcaggagaatcgcttgaacccgggaggcggaggttgcagcgagcagagattgtgccactgcatgccagcctgggtgacagagctagactccgtctca

SEQ ID NO: 315765 - DNA, 4001 bp, Homo sapiens
aatcagaacatacacaacacatatcaattaagttcaccatctcacatgggcacagttcatggcaccccaaaactactacaatagtaacatcaaagattgctgatcaccgtaatagatacaataattatgataaagtttgaaatattgccaagaactatcaaaatgtgactcaagagacatgtagtgagcacatgcagtgtgaaaaatggaactggtagatttgctccacacagagttgccacaaactttcaattggggagaaaaaaacacgcagtatcggcaaagtacaacaaagtgaaatgcaaaaaaaacaaggtatgcctgtatatgtctttacttgacaaaataagcagtcagatactatgtatggtaaccccacagtttttaattgagccacgaaatcccagggtctggatatcactgatctatttattcaactttttgttttttttttttttttttaacataaactcagaccccaaggtttctataaactcacaccgaaccagctgcggggtagggattagagagagatctccaatcttccaggttcaagttctccacttcattaatagcatagccaccagcttttgcaacgtaaatactgaactttacacccatcttgtaaagtatgaatcgaaggtaagtgtattaaaggaattatatggtaaattcttctgtaatctaaaagggatctagttttaaatgttggatttttctaaaataggattcacccacacagtatttccttggtattgcttcacatttctggtgtgaaagagtaacggctgctcttacaactgtttgtttttgtttgttttgggacggagtctcactctgtcgcctaaactggagtgcaatggggcaatctccgcctccccggttcaagcgattctcctgcctcagcctcccaagtagctgagactacaggcgcccaccaccacgtccggctaatttttgtatttttagtacagacggggtttcaataaattgaccaggctggtctcgaactcctaacatcgtgatccgcctgcctcagcctcccaaagtgttgggattacaggcgtgagccactgcgcccggccacagatgtttaagagaagagaggggggcagtctgagttctacttacacacatttaaaaatcaacacataatgtgagctttcaaaaaccgaccggaagtagatggaggtacagatgtgaaagaactgccaagagttggaataattgttaaagctgggagtacttggaggttccgggatacagtactagtctccttattcctacttgtttttttggtaagtctttgaaatctgatgcactaaagagttttttgttgttgtttgcttaagtatccgagatgagtggaatccagccagaggcctttctgcagaaaaccaagacgaagagatgtcagcgtctccgccccgacagaagcaagctcatacctatgcttgccgcgacaaccgcatagctcaatgcgacttcaagcaatcagcggccagacccagggagaccatccggcaaattccgggaagcaagaagtcccatccctagctagagctacagcccagacgttcggtccgctagctaggaggcctcaagctggaccccaggcggcccctggctctctagattactcaccagcctcgctgtaggccaggcgcaacacccggcccagcgtggagaaggcgcaccgcggctggcacagctcctggccggccaccgcgaacgcctccaccttgcagcccgccgccacgaaaagcgcgtcacgccccccgccacagaaccggtccggctccagcttgcagggcaccacctgctgcgacccgaacgggtgcaggttgtacagctgcaccatcccgacgtccggcgggatggcacagcctgcccgccctgcagggcgcccggagaccccgcgctgaccgcgaatgtaggactacttccgcgagcgagccaatgacgccgggtcacgtgaacgccagccggccccgcccgcggctccgctacttaaagaggccgccgcggggcgtggcaggcgtcgggaaagcggtcacgccagcctggtcagcccgcgctctggcgctgcagtgctttcggtctctgcgcctcccactccgccgcgcgagcttgccactgctctatgctcagtggccggtgggtgcggggaccgctgggtccctgcctttcgtcttttactgctttgggccaggcggtatgttttggcttttgagtacgttctgacaattcatcatctatcttgtaacattttgtacttactttgaggagcgttattcatgtctcttcagtagtccctgagcttctggaggatggggttgcaaaaactgaaatggggtgcaactcggggctaaacactctgaagagttgctttaaaataatggaaattctagaatagttcagctggaaagagcaaagccttgaacgtgcttggcaaaaagatatttgttgaaagaaagaatccatggacttcatcttgtaggcatttgacaaaagactagtttgagccccagaggatagaagaactaggagggaaatcccctggctttcagtccagtgctcctaaaactatgcagtaaattatctattcctgacatctcaacgtggagttcacgatcgcaacactttcccttttctaaaaaaatcagatttagataaaacaagtagtataactttgtccagttcacctagaaaatatatgtgttagcatggattgagggatgctgttttatttaggcacacagggacataaatgaaagtgcaacattttcttcagtcagtttccagttcagaatttgtaaattagatgcaattggattgaagttaaacttgcctccctttcctaggcccttcagatgaataaagtacctctaagtaatgggaaacaacaggttcgtcaaactcagtgagttagagaagtaaacatggaggtagctcaggtcaggaactagggctgcaaaaaatcacagaaggctcctatggaaaacaaccagactaatagtccacaagttatttgttctagatacaaaacttaagagcaaatatcaaaatcaatagtaaaaaagattcctttccacaagtatctgccatattattctttttggcttaattttcttcttcaagacttaattatcctaattcaattttctcctaatgaagactgatattaactttagtgtaatttcacctgcataaaaagaatgtctgttttggagaaagaagtgagatttgctcaaaacctggaaccccattccttcctagagatagtgtcttcttccttgctgtagtcactgcacctgactcatctaagattctttgggaagagacatgctacccaagggaaggtggggcatgtgtctggtttccacgtttgtcaggagctgtgagcaggagctgcccacttgtattcctgttacgaatgcaggggcagcaatggcacaccatcaattccttgcgggaggttgcatttgtttgcaagggctgccataacaaaacaccacagactgggtggcttacacaatagatatttcattttcacaggtctggaggctagaagtccaagataagatgtcagcaggtatggtttctcctgaagccccttctccttggcttgaagatgactacctttttattatgtgttcctatggtctttcctctgtgtgcctgcatccctggtgtccttcccttgtcttataaagataccagccatattagattaggacccacccttatgatcttatttaaccttaattatttcttaaaggccctatctctatatacagtcacattctgaggtattggaggttacagattcaacatatgaatttggggggaagacacaatttagcccatagcacatgcacttagggtagcactctgttgaaaagggttgtcttgagaactttcttccttccttccctcctttctctctctttctttcttttctttcttatttaaagagatggggtttcgctctgtcaccc

SEQ ID NO: 315766 - DNA, 4001 bp, Homo sapiens
tgtaatctttgtataagaaatttcccatttcaactggccaactggcaaaacaggctgctgtctttatagctctctgttggtccctggggatgcatcaaaataaataaatgttccctgccgatagggacaggctgaacgtctgctcatgcctaagaggccacccaagttacagaaacacgaagagcacttttttaacaactactcccaagaatgttactggaagtctgaaacacaatcgcaggtgatcacaggctacccctggcccaaggcttctaattaggtttcgaccttttcccattccagctgcactttccatccataatcctcctacactgtgatgtttccatgaagccctgtattcccagattggctaattcatagactctcagtgctgcaaagatccttggtccaacactctcacgctacaaaggagggttccactccttggccaaattaactatccgctgccacagcactgtcatgccttgcttggaatcttccagggcttcccaccactgactccccatcttggtcccccgccctagaatcctggcatccttattaatctctacattctaggcaaatcaaactatccattattcttcccactcaagagtattgttttgtttttgttaatactgaaccttctacccagaatgcccatttccaagtgccccaaatgactcaatcttaaaaaatccaagtcgatgccaccttctccccctctctcctccactccccaggtcggattgtcttcctccgatccgccttctttagcttccacaggcatccatctaatggcccattcacttcctacacctgcctcagctactggtctctgggaaattgtctcttgtggggcatacgctatggagggatgcttcttgtttttctctataccatgcgtccgatcttttggcttccctgagccacactgggagaactgtcttgggccacacataaaatacactaactctaatgatagctgatgagaaaaaaaaaaaaagcgcaaaaaaaaaacctctcataatgttttaagaacatttacaaatttgtgttgggcggcattcaaagctgtcctgggccgcacgcggttagtgagccacgggttggacaagcttgctctataccttcagtctccggtgagagtgcctcgcacaagtaactgcggagcaaatgttcattgaatgaaggaatgaggaatccaagcccagagaaaacatgagtgactttttccagcacgagtcatattaatagtctcgcatgccaaaggaatatcaccatccaactttccaaaatccaatacgataataattacttgtattattattcatattcacttcagtgaggacagtaggcttaaaaagccttaaacaggttgggtttctagtcccagctctgccacttaatagctgtgtaacctagggaagaaagtctcttgccctgtggactgagttccccagtctgtgaaaaagaggagggtggataagctccgttgttctctagtcatgtcaacttttcccacttgccagttggttagaacacggttggttgccggggcgcctcgaggtcctcccccactccgcccagcacacctcactctcaagccggggtcttcttctcgcaccgggaggcagctgtgtgtgtcctggggtctctcttggcctcgcagctgccgaccttgccgccggcggccgcgggacgactccatctgtacccgggagacacccgggaggcaggcgccagccatcactcggggccgtcctccagggccaacgccagcaccagcgccgccacgctgaaacggtcccggcggcccctccgcggctctgagacgcccgcacgccggggggccgacgcgctgggctcggcgtccgggcgctgccgagccggcacgaggctctgaccatggggagccgcccgctccgcccaggaggcggggcacagtcgctccggctagacctcgcttggccccgagcccagcttcgcccgcccgcccgcccgcccgccggggaactgcaccttctcgcgccccgacgcagccgcctccgcgcgcgcacgcaacgcacgcgctccagcgcctacggtcaaagcgccgcgcaaccagttattccgcccccggctccgcacccgcgtctcggacgttcccgcagccaacgtttagggcaccaggcgctgtgctaggcgccgcggttataaagataatcggttttgttgagcccaggaatgttcgggtacacccatcatgagtacacccactcttctagcctaacaaaaattcccttagggcccaaggaatcatggtacctgcaccccaagaaagcctctgggtctttgagtcagcaaagtggcggaggaaggactggccctaaaacaacctcactgcttacacacaccacaccacacacacacacacgccagatagccagcagagacctccaaccacacacacacacacacacacacacacacacgccagatagccagcacagacctccagaccccgccccgcccccctcccccggcccccctccgcccccacgcgccaaatagccagcagagacctccaggatatggctgtgagtttaaaaataaagctggggcagggagagtatcctttttctcactgctaaaaaaagaggccaggaatactaacctagctaagtaaggaacccttgaagactaagtgaactttatggagcgctgcacaggacgttgcttcaacctagtcataacttagatttttattctgatgtaaatggaatctcagctaaaaggattttttcccacttatttgaaggctaaaaaatatctcgctaattttatgtattttgtcataatgggataacaactacctaaatatgcaacttttttcgtaaagctattgggttgtgttatgaaggttaagggtgaatctgagtgatctgaaactttgggtctggattggcacctttggaaacagtccacagaaggacattgaaaacgtaattattgacaaagtggaaactagaacacttgagaagttgtagctttttttatgcattaatattttcttacatgttccttaatatatatccagagttataagctgaatcagatatgcctttcaatacccttttaatgtctcaaagagaaagccataaacatgcatttgctttatgtttctcaactatttcgatggagtcatcactgtaggaagtggttcatgattttatacaggagaggtattgtgagcatttataaagccatcctgcttatgagccaaatttattatgtttgctaggttaatctgttttctctaatcaaacacttaatcatccagtctcctctctgcgttatggattcatgaatgtgaagtgaggagagttgctcagtcaaggtaaaatgataaattatcttttcattttcagggtatttgtgattaaatgcttcataatagaattaaaatgaaataaatcttgtaatttcacttctagattcctgccaggtatagataaaacgcatttggttaagaacaaattcaattcaatgcctgcgtggaatttataggagaaatgtagaaagcgttgtagttcaggagagccctgagttctctcttcatttctatggattggagagagagttgatcaatcggtggtactctacggatgagcagtggaaaattaaaatttccattaagaaagaatgaggacttagccttgggcagtaataggcaaagtttgtcttaatctagagttgtaatctggggctatgattggagcagatgttaaattacacttaaataaacagttcctattattttggccattataagtgaagccctgtgtggctggcattctctgttgctgcctaattttatagtaagagttgaaacatattgaaaaaagcataatggagatgacttagtcctgtttgttgttgagtgaataaagttcacattccagaaaaagccctataaggtaacaaaaattacaattggctttttaacacatggaaactca

SEQ ID NO: 315767 - DNA, 4001 bp, Homo sapiens
ttccatcagagggagagtaggttatttggggagcttagaggcaggcttcatgtctctctataatgtctatcggctcctctagtccagtttaggtaggcgtgtaatctaagcgaagacagtaagcttgtttcacctcaagacaagcccacaggcttggctcctacctgatgcctgctccagagcccacatggaacttctggaacccacctgcttatattcaatggctccctaacacccttcttcctgattccatacccacctagaagtggtggtgccaggaattcaccaggaacacatttacccagacctgttcaaatcctacccatgcatcattacacagcagaagcctcctcccatccagtcttactagatctcccctcattaaattgctccagtacatttaccactcctttggtcacttggctattgttggggctcagaacatggtatctcaaagtatggtacttttggcgtgctgagtcctttgaactgaagaaaatgggaagggcctcagaagccagatctgtctgaccttctgccctttgttctcctactctgctttctcccccaaggcaagccatagaaactaaaatttctcttctccaggacagtcacagatggtagaatccctctccccgaaagcatccataaatcctaaaatatgaatctaaccttccccctgtgtctttctttgtaggagctggccataaagacattctctgacctactctgtttgatagtaggtcctcagatccgcattccaaagggatcctgtcccatacttgggagcaagaaatgccacacagagaggccatgaagaactcaaacagagaggccttgctgggtccttctttcagtctatgactcttagattacagccttttgtcccatcacacttctgcattctgcacagcctttgtgaattctaagtatgcaagtggccagtttctttggatatctgagtcttcatttatgaagactccagtgtcaggtaaaccttggattaaataaatttgtatgttttcttcttcttcttttttttttttgagatggagtctagctttgttgcccaggctggagtgcagtggcatgatctcgactcactgcaacctctgcctcccgagttcaagcgattcttctgcctcaaccccctgagtagctgggattacaggcgtgcaccaccatgcccagctagtttttgtatttttagtagagacagggtttcaccatgttggccaggctggtcttgaactcctgacctcatgatccgtccgccttggcctcccaaagtgctgggattacaggcgtgagccaccgcgcctggccttgtctaccagttttatttcaggctcagttaggagccttaggagggttgagaaaacttttccttctctctagtttatcctagtaacttacactgtttgcctgtatgtgccagtgtattattatttcctggaggccaaggcccatagcttattctaatgtttctctggcagtccttagcatgtaactgggctcagcataaatgcttatatgtacccacaaatcgaatcatagttgcgggtacactaataacaaatattagtttgaaggaaaaaagaacaatttagagcagccgcagaagccaaacaaaaaactctgaccaaagccattcattgtgcaaagcagtaagcctagggggtagagtcacatttgcccccgtgagtaatctcccaactcagctctgccattggcaattcctcaccactctgtccaagtgggcatcagcaatccgcagcaattggaaaaggtagccatcccgtcgccttttattgatcaggtctagagctttctcagcctccggctcaacagcactgcagtcagtgggactcacggcacacgaatactgcaatgtgatcaaaagcagtgctgcaatgagtgccttcattttgttaaaccatcccttgctatgatctgccactgcagagaattttatacagactttctgaaacacacgcaattgattaaacaaaaccttgatacatttttgttgtgtaactgagggtgttcaccttgaccctgggttcaaataaccatcaacaagctgtaaatgattagtgggtcctgggggcagaaagctgagaaatgctgatgagtgggtggaactgtgatctgcacaaatctggatttttctagtagatagcagatctaaagtacgtctttgaatataagcagtgcctatgttggtgtagggggtggggctaggggtaattttcctccatctgcctgcctgtctcagctggaaatctccatcatcagtcagtggactgatggatcatggcactaaaactcctcagtagaaggcagctgcattatctaagcgggggaacatgttaaacaggtaccattataaaaggaatgacttcaggtaaaatagaacaatgaagaggctgtcgttttgaagtcaaatctgaatttctcacctggctctattactttcttactgtgtaatgctgggtaagcaacaaaacttctctgatagttccctcatttacgaaatatggattgatacctcttggcaggcttgtgtgataattaaataagaaatcaggctgggtgcggtggctcatgcctgtaatcccagcactttgggaggccaaggcaggctgatcacaaggtcaggagattgagaccagcctggccaacatggtgaaaccctgtctctactaaaaatacaaaaaattagctgggcatggtggcacatgcctgtaatcgccgctacttgggaggctgaggcaggagaatcacttgaacccgggaggcggagattgcagtgagctgagatcgcgccactgcactccagctcgggcgacagtgtgagattccatctaaaaaagaaagaaagaaaaaaagaaagcaaccagtataattcttggcatagagtagatgctgaataagtgatgctatttattattagtgtgcctgcaaagaagttggggacacctcatgccaccccaattccctgcaaaaagaattgattcacgtggaagaggatggtggtgagagtaagagtcaaatagttggatgcccatcccactgttagaagggatcagcagggggggactgggctatgatacagctgaccccctaccttcacacttcagaagaaacccgtatacctatatgcaaccctcagaccagcagagccagcagcatcagaagggaccagagggaatcagcctaggttccgtcctcactgccaagaaacagccagttaggcagcatctccattcctccctgttctatccgcagtgagtgtctgtgagagtctgcagtcatgtctctcagactcggcttcatgttagaatcaccccaggagctttaaaaagtcctgatgtcaaggactcctccaggacaatttaatcagaatctctgggagtggactttggtattggtagtttttaaactcctaggtaatccagtgtgtgcagtcaaggttgagaattactgggattctagagtgaactgaagagagggaaaggatttgaagacagaaagaaaagggaggtgtatgaaaagtagatctcatttccacaagtcacagggttaatgagtgcaacaggttttgaataatgtttgcaattgaacttttaatgtcagtaaccctggcttttaaatacccaatgggaccagtccagtgcaacagaaaatgacaggaatgtatggaatctggtcaaggtgttaagaggctccaacccagtggggaaggggaaagctattgattaaaacaaaaactattttgagtttttgttattatgagttgagctccttaatgaagtttttctattatggctatattggctgcaccctaaatggggtgtcctgggtgaaccaaatgctggtgtagggaaaggaatgggaatgttgaggggatgggaagaggcatcaagaacaggaatataattttcctacagtgctgttctgctgagactacagagtacctcagggagtcatgcatcctc

SEQ ID NO: 315768 - DNA, 4001 bp, Homo sapiens
cattctcctccggggagggtctcagatcatttctcgtgaggagacgcagcccgctgctttgttgcggtggcctcaagggtaagggatcgagacccacctggtgtgatgaataaacctggactctagcaatgagggaagaaaaggcagacagatactgtggcgaccaggtaactctgtgcatagaccaaggtaagaaaaaccttgggggcagtgaagtatttccttggtggtcaggacatcctggaggttgaaagtgtgtgagtaagacacacaattgagtgcagagcaagtgcagagtccggatctggttctgtagtcacctcatatggcttaaaggcagcttgcctgttgtggggtttataccaacctgcctatgctaagagggacttgaaaatttccgcaagagaagcatatggagaaggataaagcaaaagctgaagagtgtgaaaaatctctagtaggagaggttgagccccacagactcactagggtgcaagaaatctctagtaagagagattgagccccatggactcagggaaaaactctttctccaggatgggaaatacagcaagtaagacaaaagataggaaatatcatgatcatgataatataccctctgatagtcccctaggcctaacgttagaatattggaaggataatggaaggaccaaacacaagaaaaagcagcaaatgataaaaaactgctgttttgtttggactgaagaaccttcctctcccccaagcagctgccaccacagacccttcccctaaacctaaaaaaggagcttaaaccactcttagatgacccttatggagtggcagatcagatcgatcagttttaggaccccagatatatactttagacgagttaatgtctatcttagacatcttattctcaggagaagaaaggagcatgatacaaagggctgctatgaccattcgggaacgtgaacatcctcccggtcagaacgttccagcggctgaacataattcccagcccaggatcctcaatgagataacaacaatatagcccatcaaggaaatatgagagaccttagggagatggtaataaaaggaatttgagaattagtgccccgcacccaaaatcttaccaaggcctttaatataaaacagggaaaagatgagggaccgacagaatttttagaaaggcttaaagagcaaatgagaaaaatacgctggcctagaatcagaagaccccctcggacaaggaatgttaaagctccactttgtcaccaatagctggcgagatattactaagaaatcacagaacaaatgtttcaaatgtggaaaaataggtcattttgaaagacaatgtcccaaatgggaaaaagaagaaaaagtcatcccacttacagcttttgaagaagactagggaggtcaggggctccatctttgtctcttgagtcccaccaacagcccttggtaaatttagaagtgggacctaaacctaagcttattacctttttaatcgagtcagaagcagctcactcctcagtctgttatcttccatctagtgtaacttgttcacaagaaaaactttttatctctggagtaaaaggagaaggatttagagcaaaaatcttagaggagacaaaagtgaaatatgaaaactgatcagctagcagcaaatttctgttaattccagaagcagggacaaatctattaggaagtgatttaatactaaaattaggcttaggcctccaaatcaatcacggaaaattcctcccctcccctccctaatcttgctcaccaccgcagacgaagaacacatttatcccgaggtatggtcaaaagatgggatcaaggaaagttacagatttctctgattcatgttaaatttaaaacccctggggaagtagtaaagagaaagcaataccctattcctttagaagccagggtaaatttaaaacctgtaattgaaggtcttctccatgatgggcttcttaaatcctgtatgtctccctgtaacactccaatactgcctttaaagaagccagacaggtcatactggttagtgcaagaccttagagctattaatcagatagtacagtaatagatttaaatgatgccttctgggcttgtccattagcagagggcagccaggacctacttgcctttgagtggaaagaccctcactccggttgaaaacagcaatactgatggacagtcttaccccgggggtttacggagtctccatatttacttagtcaaatattagaacaagtcctagagaaattttccctgccctcgtgcatatgtcccctccagtacatggatgatcttctaatttcaggagatgatagaaaagaagtagcagctttctcaacccatgtcttaaattttctgtgggatgaagggttaacggcctcgaaaaacaaactccaatttgtagaacctgaagtaaaatatttagggcatttaattacaaaggcaaatggaaaattgggcttgaatggattgaaggaggattagtcagatactgccgtctatggatagactcttatgccctagaaacagaactctcatacaaaaagctcacacaagacgagccagaccccatcatttggcaattaccagaaatccaaaaggtagaaaggttaaaacatctattagtaactgcccctgtcctagctttaccctccctaagcagccattccatcttttcgtcaatgtaaacaagggcgtagccttgggagtacttacccaaaagcacggaggccactcccaacccgtaggcttcctgtcaaaaattcttaacccagtaacccatggatggtccaaatgcattcaatctgtagcggcaactactttgctaacagaagaaagtagaaaaataacttttggaggaaaccccattgtgagcacacctcaccagaacagaactatcctaaatcagaaggcagaaaggttgcttactgactcaagaattttaaaatacaaggctatcttgttagaaaaagatgatttaatccgaactacagatgattcacttaaccctgctgccttcttaacaggaaattcaaacgcagaaaaaaacccatgccccagaccagaagaacttgggcatagatgtttagataaactccctttcaaaccggaagacacctttttgtagatggttcttctcaagtaataaaagggaaaaggcataacaggtactcagcagtagacggagacaccctacctaatgactggtctgagcaaacatgtgagttgtttacactaaatcaagccttaaaatttctgcaaaaccaggaaggaactatttatactgactccacgtatgcctttggagtagtccacacctttgggaaaatttgggcagagcgaggccttattaacagtaaaggccaaaacttagtccatagagacttgataatccaagtactagagaacttacagccgccagaagagacagcagttgttcatgttccaggtcactagaagaatctttcctttgagagctgagggaataatctagctgaccaagtggctaaacatgttgcctcttctcaagcagcacccattttccacctaaccccttatcttccccctccagctacagtccctgttttctcccccagagaaaaagaaaagttaaaagaaataggagccaaagaaagtcacgagggaagatgggtacaaccagacaagaaggaaatgctgtctaagcccttcatgcgagaggtattgtcacagctacatcaaggaactcactggggcccccaagctatgtgtgatgcagtcctcagagtttatggatgcgtaggaatttatacccttgctagacaagttgcagatcgtttcagagtgcgcagaaaaaccaacaaacaacctaaagaaaatgggagtaccacatgccgtgcatccaccctcatcagggagagtcgaaaggcctattgccctgttgagagtccgaactgctccctgaaaaaacataggtctacccccttatgagatgctttttagattgccttatc

SEQ ID NO: 315769 - DNA, 4001 bp, Homo sapiens
cactagagatggaaatgtgaataagactcccaattctcccctcgtttttgatatgccttagggatggctggggcctgtcctagttcatccaagaactttctgtcctgctgattaattggccagctccaacagcaatcatttccctagtaactgatagcaaatcttacttctggctgcttcctcaggcaagtgctatctaaggacagactctattcactctcagagagaggaagttcctagggggtgtgggcaagtcaagaaaccacaaagaaagtggtcttgtctagatctcttcaagcactccagaagtgaaaggaagatgctcaggtgcagaccagagtcctgtgcagctcagacaggcctccttctgggtgtgtatttacataatgaaaaggtaaggccgggcgtggtggctcacgtctgtaatcccagcactttgggaggctgaggtgggcagatcacctaggtcaggagtttgagaccagcctggacaacatggggaaacctcgtctccactaaaaatacaaaaattagccaggcgtggtggcgggcgcctgtaatctcagttacttgggaggctgaggcaggagaattgcttgaaccagggaggcggaggctgcagtgagctgatatcacgtcacggcactccagcctgggggacagagcgagactccgcctgaggaaaaaaaaaaaaaaagatcttaatcaccccataggcaaatggcatttccttcccaaccactacggttccatgctcagacctacttcaaaactctgcactacaggtgactgaagagcagagatgatgtccatgtggggtcacccctgttctgttctgctgcagactttgacaacatcgtctctcaactgctgtcacagcttcctaactggtctttctgctcctggttttggcctctttcacacagaagccaaatgatctttctaaaaccacaaatccagttcccctactcaaaactctttaatggctggccactgttgtcaggatatacagaagcaccctggccccacatgtgtgatacaagggtaacaacccaaataaagtctacacatggtatcttcttttttttttttttttttagactgagtcttgctctgtcacccaggttgtagtgcaatggtgccatctcggctcactacgacctctgcctcccaggttcaagtgattctcgtgcctcagcctcctgagtagctgggattacaggcacccaccatgacacctggctatttttttgtatttttagtagagacggggtttcaccatgttggccaggctggtctccaactcctgacctcaagtgatccacccgcgtcagcctcccaaagtgctgggattacaggcataagtcaccacgcctggccccatgatcacattaaaaagaaattcaagtccaacatccagaaaataaaacgatatggaaaagtaacttcaacctttactgaagactctcaaagaggcaaaaccatcacaaagaacttctcccatctgtcgctacatagcgccagctacagcatcacctgctcatcctcaaatcttcctgctctctctctcaaaaacttcaggttgccttggttcccctttaattcccttttcccttctttcacccactcttcaatctttctgatttatggaagagtatcatgtaatttctaatataaatgaacttagctttcccagtgccctcttttctttactcattactctaatcagcctggcaaatgcccacgagataagcaaacaggtctactccggaaacggagggagggtgccgggcagtggctagtatatgtcaataccttcgacccatcacacagagctttttccacctggtctcaccttactgtgcagcctcatctctgattctccactctccccaaataggccctgctcgtgtacaccccatacctttacaaatgctgctctcctgccgggaatgcctgttctcatcctcttaccctggcaagacattcagttagttctttacaacccagttctgatgtcacttccttttagtcattcatccgtccctctgggctgggttaattcacttccttctccagggcttcgctgaactctgcacagacctcaattacaacccttataaagctgggttgtggtcgggtgcggtggctcatgcctgtaatcccagcacttgggagactgaggcatgtgagtcgcctgaacccgggaggcagaggttgaagtgagccgagatcgtgccactgcactccagcctgggcgacagagcgagactccgtctcaaaagtaagtaagtaaataaataaataataaagctaggttgtaattccttaattactgatcagacttttttcactagactgtgggtgtcacatgtgggtctgagtcatctctgtgtcctcagagccaagaagtggggaggtgcttaatgaagttactgaatgctccagaaatatgttcccgtcactgagtgctccaaagaggcattcacctgtctcctcttccctgatcatccctcggggctacctggagtgcctgccagatcagagtttgagagatctgccctggcagtcgcctgactaggcctacatatcttcccgtgtctggccagccttccagagagcagtctgtccctctctccgactccagccggccaggcctggttctcacattgtcaaaaataaaaggagttaaaagaagccaagcgattaggcaagaaaaggaaatgaaggcatccagacttgaaggaaagaagtgaaactatttgaagataacatggtcttgtttgtagaaaatcctggggaatctacaagaaaatttttagaactcacaaatgagttccaggggcccaagtcctcagtttggctttgaaggggtcccttggtctcctggccctgctccccctttcctgtggcacttcccagcactcctcctgtgagtggctcttagcagccgcagtggagcatccactttgacgttgcctactttcccctctcttctccctgcctgggtagagcctttgaagagcttctgtctcatcttcacctcatccctaaagtccttaaataaggggcatatttatcgaggataagaattggacctgtgttatctcattcaatccccacagcaacctttggaagtgggaactgtaattatcacccccatttttcagatgaggctctgggaacctatgcccctggtccaacctcacagttatgaggcccactgggcttgaaagcaagggctgcctgactccaacatccaatttctttttttttttttttttgagatggagtctcgctcagtcgcccaggctggagtgcagtggcgcatactcggctcgctgcaagctccgcctcctgggttcacgccattctcctgcctcagcctcccgagtagctgggactacaggtgcccaccaccatgctcggctaattttttttgtattttttagtagagaccgggtttcaccgtgttagccaggatggtctcgatatcctgaactcatgatccgcctgccgcggcctcccaaagtgctgggattacaggcgtgagccaccgcgcccggccctccaacatccaatttcttaacccgaaatttggaaagagaagtgaggccctattctaatgcttcctcccctagctagatgtatctcttctttccctgacccagactccaaggctgataagctatcagtgtgtagagctgactctgtactgtgatcatttatgcagagcttttctctcccctgtttggctggaagatccatgggagcagaggccacgtcttattcagcctcacatgctagaactgcttggcacatggtaggcatgcacattgcacggcttcagaaagagtgaaatgagatggttgaggcacaatacactaaagagaacaaatgtgtgttctcttttgcatgcacaggagagatggcctcaatcatatttggggtgtcaggatgatgtggctggaacatgtcatggggaaaggccatcctcctcc

SEQ ID NO: 315770 - DNA, 4001 bp, Homo sapiens
tgctatgtgttttctctgctaaggaaaagccaggcactccttcattgtgaagaggaaagtgccaacacagaattctgagagagtcgaagaggaggaggctcatgtataagtccctcctcccttggacactcagctgagggtcaggaaggaccactcccagcccagcattggccaaaccactctggggtgcagggtctcttggcaggctgctccggcctccacccagccctgaaatcatggacaggcagcacctgtccatctcctgcctccacgggattctctgtcacatttgaaaatgaaaacaatgccaggcatcccctgcccttctccgtagattctccccacaccaggagaaatgcctgaatcacactcgaggatttacatggggttgtccaggattcctgtgagcagtggacctgctgcctggctttcctctattcatcctttgctgctgccagacacaagcaaagaaggagctaaggtcccatctgccacctcagtttcattcataatctagagggagtcaggcaacatgggtgttcaaaccccaattctgtcatggaccagctgggcaatctcaagcaaattacttaacctctctgagcctcagtagactatctgttcaataatagtacttaccttccaagaatgctgtgatgggataatgcataatgatgctctcatgtgtacaccctccctctctcccagtctctgctggtttctggctgcctccaagactcttcctataagaccctcaattcccctctccttcatgctccagggacacactccgtctgtgctcctgtcacaggtttctggccccgcaatcatgaaatgagttattcaggcaccttccagcctgaaaaccttgttcaccaggactcccagcctgcctcgtcttgtctgctccaggctgaggcgggagccctctgccggaggacagccactctgcctggaacatctctgcactatcagctgccaggcaagcggacacctcagagggatcagggaatcaggagggaagaggtgggatcttcatggaggactgggggctgggggtggggtaacagagcaggagacgtgacttccttgaggagctgctgtactccagctcctgctcctggcttcctgggctccttcgagaaaaactgagagcaacttctagaatctgatctctgaaagagcagccccgatgcttttctgtcaccagaatccactccctggccataatatccactcattttcccaaagcatcctcctctctcggtacaacgaggaggaggtgatccgcctcttgctccacacccccagctgcagccgaactgcaggggaagggcgggtggtggtccggacagttcccacccccgactccaggtgacgctgagcctggggcttacctcagtgtattcaagtgatttggatcaggatgactccgagcaaaaccctgactctctccccttaaccagctgatgctcctgggcacaacttccctccccgagcctcagtttcctcctctgtaaaatgagtataacaatattgcaacagataatggatgcccaaagcctggcacagtgaacgcactcaaccaatgggctggcactacggttagcagcgaactcagaccctggggaggctcaaagaaaacgaggctccccctctgctcgcccgagctcaaagacggacgctcagggcgcgcaccctgcccaagcccggggaagctaaaggtgtctgcgcgtcgagtgctgaggccacagtgtggagaggggagcggtgccaccgagcgagccgccctccgccaccctccccaggccacccgcgtcgcgagggtacccaagcgcgctcttctcaagcgggcggctccggggttcccggccgccctgccgggatgcccggaacccagcctggccagcgcgcagcctcgcccagccgcggcggccccgctcccgcccaagcccgcgccccgctgcgactcaccggcgccggctccggggaaagtttggtggcgcgttggccgcggcggccaggctgctgggtgtcgcgggggcggcggcgggggcgccggggagctctcggggagcggggcgccggaggaggagccgctccgaggggcccacccgcgagcagcggggaaggcggggacccgggccccgcgggcctgcagcgcccccgcacccggttccacgcgcccagggccgcccccgcggagagagggggcgcgaggggcgcgcctctcgctcggacaccctctcccagctcgcgccccaggtttggagctgctcccgctgggtacccgggctcgggctctgcgaggcggactgctccttgggtttggaaggaggggtggcagaagggtcagaaccttggtgagacaactccacccccacccacgcacctgcgggcacacaaaacgacagacagagataaatcaagacaaagaggcacagatggaaatagagatgaaacgatgtttggcagagtcaatcacagatagattgaaaaagacaaatagtgatacctgcgcccctcattcctgctaggggcgccaaaatcgaaaaaggcaaagtcagacagaggtggaacaagattgacagtaggaaccctacccctagaggtttcggggaactaaagagaccccagggtctacaacctcacacctctcttctgtttctccctagcccgtcctgatgaatgagcccacatttcaaaataggatgtgttttaattagcaacctgtgccaccccgagcagcaaggggaggagtggggtgggggtgaggcccctctgcaggtccccgggaacctctgtccctggcaatgggagcttgaggattcttcctggctgccttcatttccagagctgggagagagaggtcgaggtttttctgccttctcagcgccgggaaaactccatttgaacctttgaacagttatggtttcagattttaccccagcagtttcgaagggaccacctaagctcacagggagaggagggtgtttgaggaggtgggacatggtgggttggggtgtgggggtgggggtcagaggggtattttagcctcctcccagtagcagcagtcccaccagccctggttgtggaccacacagagctgggtctgaggctcagcttcacaagctgtgtatggtaggtccatggtcctttttcttggcctcagggcccatgtcggtaacacaagggttcataaagacaggggccattgtgtcagatgcttttctaagtgctacagatgcttactcatttaatcctcacaacaataataggtcctagtaggtaggaactattattatccctattttacaggtgagaaaatgaaggcacagagagattgagtaacttgcacaaggtcacatgtaggagaactgagcatccaccctactcagcctggccccaaggtccaaggtgctgttataacttcatctccgtggggctgttggaaagtttcatgatgccatttctataaagggcttagtgctccataaatggtagctcagagatcactgatcccatctgcaaggtggggattaaaggactttgtgatgcccagtgatatgagactttggccttgagataatggcaggccatgtcactgtcctgggcattatggattcgagaagtcagggatgtcccatttgtttttctggccagccctctgcacattagcacaaccccacagccaagactcaccctggatccacgaaagccctctcccactccctggtgattctccagggcctccatattttacactttaccagactaatgcaccctttggaaccgagttagcactcaggatagcaactgttataaattctaaaggaaatacatttcctctctctatagctgtggggcttaagggaggtaagggggggatggaggtgggaggggggatgggggcagggcgggtgggggaagcctgggaaatggctgcgtccacactttcatccctcctctctccattctgcatttcagcaaaggcttggtta

SEQ ID NO: 315771 - DNA, 4001 bp, Homo sapiens
atcacttgaacctgggaggcagaggctgcagtgagccgagatcgcaccattgcactctagcctgggcaacaagagcaaaattctttctaaaaaaaaaaaaaaaagaacaatgcagctatggccaggcacagtggctcacatctgtaatcccagcactttgggaggctgaggtgggaggattgtttgagcccaggagtttgacaccagcttgggcaacatggcaaaaccctgtctctataaaaaatgaaaaatttgggcggacatggtggtgtacacttgtagtcccagctacttgggaggccgaggtgggaggattgcttgagcctgggagatggaggctgcagtgagctgtgatcatgccactgcactcaaaaaaaaaaaaaaaaaaattcagctatgaacattcttgtacaagtttttgtgtgaacagatgttttccatttttctgggtatataccaggggatggtcttgttggatcatatggtaatcccacgattaactttttgaggaacttgccaaactgttttccaaagtaactgcaccgtggtacattccatctagaaatgtttgagggctccaatgtcttcacatccttgccaacatttgttattgtccattttcttatagccctcctagtgagtgtgaagtggtacctcattgtggctggccatctgtatatctttggagaaatgtctgttcaagtcctttacccattttttggctgggttgttttttgtgtgtgtgtgttgagttgtaagagttccttgtttaggctgggcgcggtggctcacgcctgtaatcctagcactttgggaggccgaggcgggcagatcacaaggtcaggagatcgagaccatcctggctaacacggtgaaaccccgtctctactaaaaatacaaaaaaaaaaaaaaatagccaaacgtggtgcgggcgcctgtagtcccagctacttgggagactgaggcaggagaatggtgtgaacctgggagacggagcttgcagtgagcagagatcacgacactccactccagcctggacaacagagggagactccgtctcaaaaaaaaaagagttccttgtgtattctggatagtacacctgtatcaggtgtactatatgagttgcaaatattttctcccattctctgggtactgcctttttctaatttacactggggctccttttgggctggtagggaccttagttcctcagccagagcaccagatactctcccgccataacaaaagaaagtgtatcagtggcctcactcaagaggacaacttagtacctcagtacctttacagatggcctgctatgtgccaggcgtggaggatgtgaatctgaagataacagggtccgttccggtcgctgttccccatcctcaagaaggactcaatcaataactcagacgctcaagccagaacactgggggctgactggactcctcccccatcactccaccatccaatcagccatcacagcccatgatgactcctcccaccttgtgccaccatccaatcagtcaccacagcccacagtaactcctccctatcactccagcatccaatcagccacctcagtccctggtgactcgtcccccatcattccagcatctaatcagcccccagagcccgtcacccctccattctcttccccacgccccagcggagtctaggcggtaattgcctctcacctggctggtttcagtagcttcctgtctccagacctcagggcttgcttcttgtagttcatttctccatcagtgcacgagcagagtgatttttcttaaatgaaaaatcccattgagggctgcctggcggacaacttctctacggctactatcaaaagaaaatgcacacggaagccgacagctccgtgtcatctggcacccactgctgtctccactcccctccttgaagtgactcagtctgactaaactgttggtcagtttcccagcacataccacctccaagtgctgccggcatggtgtgctttgaaatgagggacggtaaagaaatgcgtcagggattcccgaaataagtcacgggttaggcagtaacttgtcaggcaggagctgggagtttgctaggggcacggtaagggttccggttatgggaaagagcctcgcttctgcctgtgcaggcgcttggacacacaggcctgccttggtgctcatgagtcacccgagaagatgtgcctagaaatgactctcctgggtgtgtgagagcctgagtctaccccaggggtttggaaggcggattcagctgccttccttaggtcgtcttaggatcttcaaaccccagcgccgaaaaagactaatgaccatgtggcccaccccttcatccctttgcctctataaacctccattcttcccatctcaaaaatgggaacaatgacatttttttagatggccgtgaggctcaaagaagattatctagactcctgtgtgagttttaagttggatggggaaactgaggcccaaagaaacgaatcggttgcttccagccttgacgtgtgttggaatcatcgggggagtttgttagaaataaggatccctggatcctactgctgggttggggtagagacccagtcatctgtattttttaacctcccaaggtgttgctgcagggaaccaggtctagctctcctcccagaatcctaaggcagcctctggccagagggtcactgaggtgcaggctgtgtgtggtcagcacgccttgcttttcctgtctggaagccaaaagctggctttcccactgccaaactgctggcaatacagaggccattctggcgactgttttctaaatgtggctatcaaggatgttctgggagagaaaagccctggcacacagccttggtctctgaggggcttgcaggcacctggggtaggggaggctcagtggtgtatgggagttgtcggggaggggcaggatgctccatcatagggtgaatggaattgaaaccaatgtttaaaatgagctgggtttagggccgggcacagtggctcacgtctataatcccagcactttgggaggccaaggcaggcagatcacttgaggtcaggagtttgcaaccagcctggccaacatggcaaaaccccgtctctactaaaaatacaaaaaattagccgggtgtggtggtgggcacctgtaatcccagctactcaggaggctgaggcaggagaatcgcttgaacccaggaggtggaggttgcagtgagccgagatcatgccactgcactccagcctggtgacagagcagacgctgtctcaaaaaaaaaaaaaaaaaaaaaaaaaaaaagctggttttgttgtgggtggggtggagacagggggaggtgcttcagttgtcacctccatgtctgcttcaggcccctccttacccttcctatgaaaacattttctctgtacaagatctggaactcatgcacactgaggcacagttatctaatcataccaatgtagggctgagcatggtggctcacgaggcctgtaatcccagcactttgggaggcctcgttcacctgaggtcagaagttctagaccagcctggccaacatggtgaaaccccgcctctactaaaaatacaaaaaattagctggcgtggtggcaggtgcctgtaatcccagccactcaggaggcaaaggcagaggcaggaggattgtttgaacccaggaggcggaggctgcggtgagcaaagatcgcaccattgcactccagcctgggcaacaagagcgaaactctatctctgtctctctcaaaaacaaaacaaaacaaaacaaaaaccaatgtaaaacatgaccacatttccttcttttttttcttctactctctccccctctccttctttctccctccctctgctttctaattttgcccctggtcttgagcttttaatctgaattacatgttcccaggttctttatttcctcatttattatcgatgttttccaacttgcttggctaagccaccactctggtcataatgtatcccactttctg

SEQ ID NO: 315772 - DNA, 4001 bp, Homo sapiens
atctgggttttattctaacttctaagggcaatgtaattcgctgaagaattttacataaggaagagtcactttttgctgcagagtggagaagggattagaggggcacagaatagaaaacagagacacaagtcagtcaggaagatacagtagtagttgaggtgagaaaatgtggatgatttgaagtacggtctgatagtgaaaggaaaaaagtagacagattagatgcagaattgacctgacttgcaaagtcattacctgaaattaagaaagaggcagagagaggttatagagtttgggaatttgtcattggagaacgttagcaggctcactagagaaacagaggatcagagggatctcaagcccatactgactgaatattcaagagtttggccattttcactttatacggtcatcagtttgtgcaggactttttccagcaaagttcaggcccacgggtgcaggtacaaagagggcaaaaggttgacttcatccagagtaagagttttgtcagaaaaaagtgcaggaagggacaagagaatttttcaaaggaacgacatacattctggataagggggtgcagtggatagaaaatggaaagatcaatgcaatggaggtatagatgaaggtcaagaattgtctccctggtagaaagtggtcagatagtaggaggctataatttgtttcttctgcttggaatgggcatctcccccttcagcaaactgtttgacccctaaatacatccatccttttctgctccctgacttcctgaaccccagcaccactccctgagtttgtcaccatctcatccaatcagaaaggcccacctcagcggatcacaaggtcaagagagcgagaccatcctggccaacatggtgaaaccccgtctctactaaaaatacaaaaattagctgggcgtggtggcacgcttgtagtcccagctgcttgggacgctgaggcagaagaattgcttgaacctgggaggtggaggttgcagtgagccaaaatcgcgccactgcactccagcctggtgacagagcgagactccgtctcaaaaaaagaaaaaaaaaaaaagagagaaaagaaaaagaaaggccgacctcaaactattcgctccttgaagcatttatgttctccccactgagatccctcctcctaacaaccctcacagagtgtactactggtagaatagttcaggtgaccacatagtaagtcattctttttcctttctaggctcctttggaaaaggtattgttataaatattcaaaagtctctggatcctgcgacagtattcagaacacagccctgcacggtgcaatcattcaataaataataacagggatctcaggctcatgggcctccaaacctcatccccacttgctaaaccagggttcactgaaatagaataaaagcgcataatccctgttcacaaaagtctcagataacttccattaatctcaaaggttgccttcaatttcacaaatttaattttaatcccctctaaacgttcaaaacacctctatttagctaatgatgggcaaatataaaacaaaacaaaacaaaaataacaccccatgcgtgaaacagcactcgtaggctaccctacgacgatcaaaaatctggatgccacaattcgagaaatgccacgctcactagaaaatatagatttttcttcatagtctaatgcaaggccagagagacctgggttggggctaaggcaaacggccccacgaggggtgccacgagagtcaactggcattgggtttgtactcagggtcggacctcagcctggcacctaccttcctcccctccagccccagccgcaacgatcacaggagtggtcgcctcggagcctgctgccatggctaccgcaaggcgggttctgccggaacccaaggcggagcggagctggggtggggtcagagtaggggccaaactccgagacccgaagctgcaccacaggaaggagccccggcgactcccgcccggctcctacggaaacgccggctctcacgtggaggtcacgtgacggatgctgggcgggaccacgcagctttgttttgataccccgggtgtggaaatacaaacacgtggtctgagttgtggcgctttttacctaacccggaccttagcgttctttattgtagtcttagcttcgtttctgtttctccttttctagtcagatccttcctttccacctcggcttttctccaccctaaaggattggagttttaggggaaggtttgccgcttagtggggctccggcggtgggatgggtctctgccgtgagctttcgcgagccgctcttggcagcctggaatgcgaggctagctcacgcttctcttacacctctcttgcccttctggtggtaacctgactccttctgattttagtggctgccgggaaatacgaacctcgggcaaagaatcctgtgattgcgttccctgtgactcatttcccgatccagacaagccaaattgcttgactttaggttttcaaggacactaatccacagctgtcaggcttctgaatttgtataccaaaataaacaaacagctgtgtgaagagatcaacaaccacctttcttctcgtttaccctgtggtcaaatcataatcactggagatggatctttggggcaaaaatcttccaactttactggacatacctttattgctcgcctattggcaggcgaaatgggtaaagtttacatatatatgaatgaaattggctagtttggaatctcctctttggatatgtaagacaaaaaagtaacaaaaataggtagtacttattgcacgtaagaaatgatttttatgagataatcccctgggaccaactacgcttaaactttatccttcgcctataatttctgaagttactaactcaacaaaaatgagaataagcccaaaatagaagcaagcatcaggttaactgacgtcacttaacaggtcactgagttgtttattaggcacaagatttaacttggacacttcctccaaacaccccagggttccttgcccaacctcctcgaatacagcctctctgggagtttccctctccccgactcagccgcgctggtccctgccttttcagcgctacctgccctccgtctgggacctggctcctttcctctcgccggtgtttcctcgccacccgcggaggggagggcggaccccagcctccttgccgcctgccccgcctccccgcctccccgccggcccggctcgggccgcgcaggcgcaccaggcgcggtccggaggccgagggcgaccacagcagcctccgcctcctgctgctcaggactattctgcgctgggctagtcggcggtgacccggactgcgcccggcagtggcttcgcgggcgacgcgtcgccatgggctctcgctggagcagcgaagaggagaggcagccgctgctggggcccgggctcgggcctgggctgggggcctcctggagaagccgggaggcggcggcggcggcgctgcccgcggcggtcccgggtcccgggcgggtatacgggcgccgctggctggtgctgctgctcttctcgctgctggcgttcgttcagggcctggtctggaacacctggggtcccatccagaactcggcgcgccaggcctacggcttctccagctgggacatcgcgctgctcgtgctgtgggggcccatcggcttcctgccctgcttcgcgttcatgtggctcctggacaagagaggtgaggggtcgcggagcgccagcccgcgctgtctctcctccgggagcaggcgcctgcccgcgctccaggcctgccagccgcctcccttggccccggcataggggttgtgtgaggtgatagagtgttgctagcattccatttctgacttaggaaccctccgtccccaaagcgacaaatatggaaaggcaaccttgcaaatatttatgttttttatcaaggccctttatgcaacaccagggatttaagcgatctctaaacgttcaagtttttacacattgtgaacat

SEQ ID NO: 315773 - DNA, 4001 bp, Homo sapiens
agaggagaatcacttgtacctgggaggtagaggttgtagtgagccaaaatcatgccatgcgctccagcttgggcaacagaagcgaaagagcaaaactctgtctcaaaacaaaaacaaaacaaacaaacaaaaaaacctctttcctaccaccaccaagaaaaatctatccctggacaaaacaaaacaaatcaaaacagcaaaacaaaacaacactttgtacttgtcattaagaagctagctttggccatgaaaactcttaacatataatacaattatacaatgcaataagggcattatggagatatgtataaagtttcctggaaatactggtgagggataattaattaatcatagcatggttaaacagggaaagcctttgcaggtacaggaaaaagtatgagcaaaagcagaggcataaaaatgcaggatgcatcagacatgtgaaatcagcagtctgatgtgctacctacttactgcaaaggcactttagggctagagttgggggtgagagatgaaaattaactgaggaagacaaaggaggcttgcatgccatggtaaggacaccaggttttattttgtaggcagtcagaagtcttagaaatgtttaagaaggtaagtgaaaggatatctgagttttggcagagtgaggtgtgcaggtggcaaggtacagcttgaagagagtagtgctgctgctccagggaaaaggcgtaagcaaaaagattaaagaatgcttttgagaatatagctgaaattataaccttcaaaaggtaactggaataaaaatggtctatgtttttttactcttccattagtgcttgaaatttagggtttatattgctaagtaaaagataattcaatttattcaggattggatcaggaattgggatgcagattggggtcagaggccaagggaaaatgttgttgggtgtgctggatcagtactagtttcataaaacagcaggccagagagggcaacaagctgagaaaataggccagcattgagtaatttgaggtcctgatgaggttcaggagcaggtgtaaagtgggctcaggtaatgtgcaaggatgacaaaaagatgagattgcagttaggttccgagcctgggattgtagagttttgaatttagggagtgattccagggctggagtatgaaaatgtataggattgctccataactcttctgtatcagtgaagacctgcttactgagagagatgggaaactctgcaaggcttttacagcacttcagtcaatggaaccttgcctatatttgccatgtatatgtatacattttcttttccctatttttttaaatcactgcctgctggatctggcctctaggatcctgacatacacttctcagatttgtacacttaactttttggctttgaatactcatctctccccaccatgtcttgctttaactgtccatgtccaacttaggggtgtgcttgtgtttcctagatgtctgacctattctttcttagtttatgaattatgttcccgttagtttgtctgttggctccaatgacttccatccatttcataagcaaaatatattcacgtgctccccaagctcccccagatctcatctaatcatggcaccagtctttgaagtccatgatctcatgtattgtatcaagtcaagaaacagatgaggctccttgaggctgcagtgcatcttgactcagagagctgtaaactaaacaggcgatttatttgttctccaatcctttatatgtaatggtgagttgagggcaggataattgcaatagacacccctattcaaaaagataaggaaatgggaaacacatagtggccactgacctgaaattcacccagacaaatgttatcagagtgctctcctctgagggttagaaatttaccttcactagggcccacttctgcttctgatttggttctctaattcactgcactccacggctcttgaaacgccctccaggctcttgactctgctcttgaagagatcctgtctggtctctggaaagtagtctggattatagctaagtagccttcttagcctgctttctgcctacagaaagtcttttcattttgagctctttcccttttagtccaagttagtatagttttcttcaaaactttgtgtctccctatgaatcggattgacagtcactacgtgccccaaatgtcatatgcataattctttccaagacagactttcttctttttcagactatttcagactattcttagactattagggctgtggggcaacacccttaagatttttagaagtccctttctctagcttagatatgtagaaaatatctgagatatttaaaaatatctcgatatttaaaaatatttagaaagggcagggcacagtggcttatgcctgtaatcccagtattttgggaggccaaggtgggtggatcacttgaggtcaggaatttgagacccgtctggtcaaaaaggtgaaaccccatctctattaaaaatacaaaaattagccaggtgtggtggcagttgcctgtaatcccagctactcggaaagcttggacatgagaactgcttgaggtggagttgcagtgagctgagatctgccactgaactctagcctgggtgacaggccagagtgagacataaaaaaaaaagaaagaagaaggcattcttattttaaatggaatttacatatacgcacacctcattgcttaaatggatctggttattgttttcaagagacatctgcttgttagtctgccacacttgagaaaataattaaattgcaacaatgacaatcttagagaaaatgacaccacattcaatgaacacactgaaaccagctacaggagcacctgctatggaaaagagaggaaatacacatgtacagactcagtaggttgtactatttgctttgtttgactgttgctgaaacctaaagagaaaagaagttgagtgtgtggggtggaatgtaaaggaagggtggggagatatggcagaagtggagttgtgaaggtaatagaaactgatgtttattcctgagattatgacttcaattaattaagagactaccaactactgtgaataaaacccacaattgcggccaggcatggtggctcacacctgtaatcctagcactttgggaggctgaggtgggcagattgcttgagctcaagagttcgagactagcgtgggcaacacggtgaaaccctgtctttactaaaatacaaaaaattagccgggtatggcagtgtgtggctgtagtcccagctactcaggaggctgaggcaggtgaattgcttgaacctgggaggtggaggttgcagtaagctgagattgcaccactgcactccagcctgggtgacagagtaagactccatctccaaaaaacaaacaaacaaaaaaacccaaaacataaaacaaacccgtaagtgctagtgatggtagtggtggcccatctggagaggttgctgcaaacagaccagctgtggcaggtgaggtgaaggctgggctgtgcacttcagggagctggcgggagctgggaacaggtgagaaccctgcacccttctgagttggtggggtgggagccccacccccccaggtgcagcagcagccccccagctacagctgtggacctggacattcctatgctctcagggtcatgggaaccctccctgcccctgcaggttcagaagtgcctactcttgctgcctgatctctccccactcccagcacccactctcatttaggagcaaagttgaagccgagcccgagtgttgtgtgtgtgcttgaagcagtgatgatatgacagccccctgccgccttggcatcctctggactttgggcactgacaagaatgggagagaggccgaggggggactgagggcagctaggtgcaggcctgcagatgcccctcagtacagcctgagcaccatggatgatgtaattgatggtggcaggaggcagacaggctcctgggtggaaaggagcaagcccccagtgaaaccccatgttcaagcc

SEQ ID NO: 315774 - DNA, 4001 bp, Homo sapiens
tcgtgcctctccatcgcataggaaaagcatctaacttgcgttaaatccatccagggtgcctattgttcaccacggggccagggccatgttgggttgacagggcagagggtcctcgttccttattagaagccatggaaaagatgcagggactaagtctcaccactcccaggatggcagacagggtgaaggagatgttgacacgggtagggatgctgtagttggtgaatggacggaaggcctttctgtcaaacactgcttggaagacagcagggtcaaccccatgctggtcaaagcctgagcaattgatggtaaaagcgtcgcctcttcctatagagagcagagactccgtgagagagggactctatttccagggctggagtctctctgcagagagataaaataggggacgtactgagaggagcaggtgagcccctccttcccatgccaagactccccaaggccatggttggggaggatgggctgggctggtaggcaaatggtggaagtggatgtggtgagctgaggtcagggctctattctcattcccattgcttcatcctcatgcaaagtttgcccaaatctgtatgaaaacttggcctaagtgcaatggcagctacttccaggagtcctttaatgtacccatcacaagactcttggctcacctagcagtagaactgcccaaaacttgtggtccaagtcacctaaaaatcgatgctaatgtatttctctctctaactcttaggatcttaagtctactgaaggcaagaactgatttatcaagaggataagagacattttacacaactgcactcaccaggtagatatgagaaacacggtaggtatctgactgggtgcttaccttggtgctatgcatttattttgctcttctcagatttagtgacctcagttgtctcgtgggttatttctagcatcgggatcatgaggtgacatcactgagcatacagcatttgttcagtcacaaagtgaggccggtgtgccgggcgcggtgactcacgcctgtaatcccagcactttgggaggccgaggtgggcggatcacaaggtcgagagatcgagaccatcctggccgacatggtgaaaccccatctctactaaaaatacaaaaattagctgggcatagtggcgctcgcctgtaatcccaactactcaggaagctgaggcaggagaatcgctcaaacccgagaggcggaggttgcagtgagccaagatcgtgccactgcactccagcctgggcgacagagcgacacttcatgtcaaaaaacaaacaacaacaacaacaaaaccacaaagtgaggccggtgcagatattgtctctcggccatggccagggagtcatctgggtagtacctgagtggcatctttgctccatcgccatcattatatggtccttttctctgcctccttctctctatctccatctctttccataatatttaaggtatgtgtccagattgggaacaaatattacctcatggaagcaaaatatctgctcatttccacctcagattgtcccctccctcagggcatgtttaaaatcagtggctactcttctcatagatatcatgtcaggagaaacagagacaaggagagggggaagaagggtgtggtagtggagcatcagaagtcagtgaaaaggtggaattggagaagtggtgaaatgagacagtttgatagatccctgtgcaggcaggaacagagaaagtctgtgtgcactcatcagtgaactgtctttctatctgtcaccaaaaggaaatcaggacacagacattatggaagaaatatttaacacattaattctgaatgccctccaagtgctagaggtgagtccaggtgtccctcggaaccacactctggtcttccctgttctcgtcccatcttaccttgaagcagaagactgacagtgaggcagaggagggcactctgccttgcaggccaccctccttccattcttctttctggactcttctctggggattcaccaggagctcccaaaccctggagcttaaaggagctcagaccacaccctggttgctggttttgaatactactcatggcaagtgaccactccctgtgacagcctgtgaccagagaggtcccagccaagtgtcctgcattggctctgcccagatgcaccttccgggctccaggcaggcaggaaattgggcggacactaggggaaaagcattctatttggcagctgtgtgctgagatccaaaacaaaataacgtgccttaatgagagaatgtaggctggggaaattaggattgtgtgcttccaagaccagggaatctgtgtgcaccaagaccaggtgcaatacttagtgatttggttatgaataccaaagtatctttttttttttttttgagacagagtctctctctgtcacccaggctggagtgcagtggcacgatcttggctcactgcaacctccacctgcctggttcaagcgattctcctgcctgcctcagcctcctgagtagctgggactacaggtgtgtgccaccacacccgcctaattttttgtatttttagtagagacggggtttcgctgtgatagccaggatggtttcgatttcctgacctcgtgatccacccacctcagcctcccaaaacgctgggattacaggcgtgagccaccgcgcccggcccccttaccaaagtatcttacagcttttgttgacattggaattattccaaatgccaaattataaagcttggttcataccttcatcatctagtgtctatgcttttccagtagcccctaactagatttcctctttacagcgtctctgcctttctgatttattctctccaaaccaatgttctccgtataatttttaggctatgcactgattacatgataatagaactcataaaattaagatagtaacactttgtgctgtcaatagtgttaatatatagcattattgtaaactagtaatctcagctaacatcaatatcattggcatgtgttaatattatgtcttatgtcaccacattcctattaaaaaaaattggctcaaatgaatgaattggagcatttttatttcaagtatcttagctacgtttccagaaagacttggacagtttttccttgcagaaagggtgaagggccagatgtagaatacaaaaaaaactttgttcagaattagtgatcatgacagccctaagtagaaagtgctgagaaatgcaggaatgacttagaggcccaaagtaggaaggcacaggagagggctgcagtggattccatttgaggtttgcggtagctgcagtccttcagacctaccacctctgcaagtaatttcttccctgacttggaaacttggccaacttgagccagaggttgaagggaaagaaagaatcaaagaggggagaaagagaggcagaaaggtggctagaagtactggagtggaaggagtgagaaagggaggaatagaagggaacagaggaattgctagaaaacctgctccaggccaggcacggtggctcatgcctgtaatcccaacattttgggaggccgaggcaggaagaccgcttgagcccaggagtttgagaccagcctaggcaacacagtgagaccccatctctacaaaaggtaattttttttttttttgagacagagtcttactctgtcacccaggctggagtgcagtggcgcaatctcggctcactgcaacctctgcctcctgggtttaagcgattctctgcctcagcctcccgagtagctgggactacaggcacgcgctaccacgcccagctgatttttgtatatttagtagagacggggtttcaccatgttggccaggatggtcttgagctcttgacgtcgtgatccacccgcctcagcctcccaaattactgggattacaggtctgagtcaccgcacccggctaaaaagtaatttttaaaaggagccaggtgtggtgacatgtgcttatagttctcactacttgggatgctgaggtgagagaattgcttcag

SEQ ID NO: 315775 - DNA, 4001 bp, Homo sapiens
gtttcaccaagttggtcaggctggtcttgaactcctgacctcacgtgatctacccgcctcagcctcccaaagtgctgagattacaggcatgagccacctcgcccagcttctgtttgttttttaatactagccatcctagtgggtgtgagatatcttactgtagctttgatctgcattttcttaactattagtaacattgaacatacaccttttcttgtgcttattggctgtttgtatttcttctttgcagaaatgtctattcaagtcctttgcccatttttgaattgggttgtttgatttttttgttgtgagtaactaattttacaaaatccaatcaaagggccaggcacggtggctcatgcctgtaatcccagaactttgggagaccaaggcaggtggatcacctgaggtcaggaatttgagaccagcctggccaacatggtgaaaccctgtctctactaaaaatacaaaaattagctgggtggggcagcacgtgccggaggctgaggcaggagaatcgcttgaaactgggaggcagaggttgcagtgagctgagattgcaccactgcactccagcctgggtgacaagagcaagactccatctcaaaaaaaaaaaaaaaaaatccagtcagagggtccactgctcaccactagaccactgcaatgttgggtgaggacttacaacttccagatggcagacaaggtgaaggagatgttgacatgagtggcgacactgtagttggtgactggaccaatagcctttctgtcaaacactgcttgaaaggctgcagggtccaccctgtgctggccaaagcctgggcaattgataatcaaagtgtcgccatttcctgtagtgagcagagactgagagaggagggccagggctggggggcctggagagtgtttctgcatggagagaaaacagggggcactgggagaagcatgtgagctcctccttcctggtccaggaagagtaggctgagctggtaggcaaatggtggaaactgatgaggtgagctgagtcaaggatccatcctcagtgccattgttttgtccccatgcaaaacctgtccagatgtgtatgcaaactcaaccccgaccgccactttacagtgtcctgccatgtccttaacaatctcactgcaacctctccaccttctgccagtgtccttctcttgcttacctccaacctggagccatgtgggtgatgtcagtgacaaattttgcactcacagttctccgcctcgctgtattaatatggcatagatgctaataaattaatgataaggggagtaatcagataggtagtgtgagatatatgggatcttaaggaaacaaatcaatttcagtttttcaatttgatgagtatttactgtgtctttactatgtgctgtgattgttctaacatttagtagtcttcatcactaggattatcttaaagagttcccaggctgggctcaggggctcacgcctgtaatcccaacactttgggaggcccacgcgggcagatcacctgaggacaggcattcaagaccagcctggccaacatggtgaaaccccatctctactaaaaatacaaaaattagccaggcacggtggcaggtgcctgtaatcccagctacttgggaggctgaggcatgagatcgtttgaacctgggaggtgaaggttgcaatgggctgagatattgccactgcactctagcctgggtaacagagcgagactccatctcaaaaaaaaaaaaaaaaagaagagaaaagagttaactaaatattaggatcctaggaagaggtacaaagccatcagtgtcacgagcatcatttttaccataacgaacatccaatcattgactatctcagaataaaaaatattagcctgttttctctgcttcccaggagttacatgtctgctcagctcttgctcttatcttaaggtacttgcagcagcaggtggaggatgaagccaaggaggaatcctttcccatggaaccagcctctttccatcttcctctctttggcacttctctgggtacttgatgatgatgttaacctttaaaaaacctcagatcacaccttgagccctacctttgaataatatatatatcagctggcattaaccgcctctctaacaagaccccttggtgacaaaagaatgtcacagaggaataactcaccctgtgctttaactgggcctgaatctagcctccaaaagtaatatggcaaatcagtttggagaagaggaagcaaaaatatgtggtccctggagcagtgctaatggcttcctcatactttaaagtcactctggcgtacagtgcctcaccgagaaggcatggatgactaccactgcctccaggtggcacgtgaacttgttagaccctgctgtcatctttctttcttttcttttcctttcttctttctttctttcttttctctttctttttctttctttctctttctttctctttctctttttctttcttttttctttctttccttctctctctctctctctctctctccctccctccctctctctctctttctccctccctccctcccttccttttttttttttgcgacggagtctccctctgtctcccaggctggagtgcaatggtgcagtcttggctcactgcaacctccgcctcccgggttcaatcgattctcctgcctcagcctcccaagtagctgtgattacaggcgcctgccaccatgcctggctaagtttttgtatttttagtagagacgaggttttaccatgttggttggctggcctcaaactcctgacctcaggtgatctgcccaccttggctcccaaagtgctggaattacaagcgtgagctaccatgcccggccccctactgccatctttcaaaaaagaaagcgtgttggggggaggggggtccctattaatataagcaacttcatacactgaggttttaaacatgacttcagtatagttaagactttaaagtatgaggaagccattagcactgctccagtgatgacatatttctgcttcctcttctcaaagctgatttgctatgcctttttagtgtttcaaaagcaatctggacccaggtctacccaatgaagggagtgattagtggagtagggggtggtggcagaggtaatacttttttaaaataaaagctgacttatgatttttttttttaaatggagtttctctcttgctgcccaggctggagtgcaatggcgcgatcttggcccaccacaacctctgcctcccgggttcaagcgattatcctgcctcagcctcccgagtagctggaattacaggcatgcaccacaaagcccagataatttttttttcatttttttattatactttaagttctagggtacatgtgcacaacgtgcaggtttgttacatatgtatacatgtgccatgttggtgtgctgcacccattaactcgtcatttacattaggtatatctcctattgctatccctccccgctccccccaccccatgacaggccccagtgtgtaatgttccccaccctgtgtccaagtgttctcattgttcaattcccacctatgagtgggaacatgcagtgtttggttttctgtcctcgctcgttttctcagaatgatggtttccagcttcatccatgtccctacaaaggacatgaactcatccttttttatggctgcatagtattccatgatatatatgtgccacattttcttaatccagtctatcattgatggacatttgggttagttccaagtctttgctattgtgaataatgctgcaataaacatacatgtgcatgtgtctttatagcagcatgatttataatcctttgggtatatacccagtaatgggatggctgacgcccagctaatttttttgtattttttgtgttttgttttagtagagatggggtttctccatgttggtcaggctggtctcaaactcccaaacttaggtgatctgcctgccttggcctcccaaagtgctgggattacatgcatgagc

SEQ ID NO: 315776 - DNA, 4001 bp, Homo sapiens
ttttgagacagaatcttgctctgtcgcccaggctggagtgcagtggcgccatttcggctcactgcaacctctgcctcccaggttcaggtgattctcctgcctcctgcctcagcctcccgagcagctgggattagaggcacacaccaccacgcccagctaactttttgtatttttggtagagatggggtttcgccatgttgcccaggctaaaaataattttttcaatattttattgtgataaaaatatataacataaaatgtactctcttaaccattttaagtgtacagttccgtggcgttaaacacattcacactgttgtccagccaccaccctccatcaccagagctcttttcttcttgcaaaatggaaactctacacccgttaaacagtaattccctatttcaccctctctccaacccctggcaacagctattctactttctgtctctataaaattagacaaatacactatttgtctttttgtgactgacttatttcacttagcataatggcctcacagcttatccacattgtggcatgtgttagaattttgttccatttgaaggctgcatagtattccattgtaagtacataccacatttaatctgtccattcatctgtcaatagacacttagactgcttctgagttttaactattgtgagtaattctgctatgaacataagtgtacaaataccccgttttcacttttttcgggtatttatccagaagtataattatttggttgtatggtaattctatttttaatattttgagaaaaagccatactgtttttccacagtggctacacaattttacatcctcacaagcagtgcacaagggttccaatttctccacattatcaccaacacttgttattttctggttttttaattttgttttgttttgtttttttgagacagagtcttgctctgtcacccaggctagagtgcagtggcacaatcttggctgtctgcaacctctgcctcctgggttcaagcaattctcctgtctcctcctcccgactagctgggattacaggtgcccaccaacacgcccagctaatttttgtatttttagtagagatggggtttcaccaagttggtcaggctggtcttgaactcctgacctcacgtgatctacccgcctcagcctcccaaagtgctgagattacaggcatgagccacctcgcccagcttctgtttgttttttaatactagccatcctagtgggtgtgagatatcttactgtagctttgatctgcattttcttaactattagtaacattgaacatacaccttttcttgtgcttattggctgtttgtatttcttctttgcagaaatgtctattcaagtcctttgcccatttttgaattgggttgtttgatttttttgttgtgagtaactaattttacaaaatccaatcaaagggccaggcacggtggctcatgcctgtaatcccagaactttgggagaccaaggcaggtggatcacctgaggtcaggaatttgagaccagcctggccaacatggtgaaaccctgtctctactaaaaatacaaaaattagctgggtggggcagcacgtgccggaggctgaggcaggagaatcgcttgaaactgggaggcagaggttgcagtgagctgagattgcaccactgcactccagcctgggtgacaagagcaagactccatctcaaaaaaaaaaaaaaaaaatccagtcagagggtccactgctcaccactagaccactgcaatgttgggtgaggacttacaacttccagatggcagacaaggtgaaggagatgttgacatgagtggcgacactgtagttggtgactggaccaatagcctttctgtcaaacactgcttgaaaggctgcagggtccaccctgtgctggccaaagcctgggcaattgataatcaaagtgtcgccatttcctgtagtgagcagagactgagagaggagggccagggctggggggcctggagagtgtttctgcatggagagaaaacagggggcactgggagaagcatgtgagctcctccttcctggtccaggaagagtaggctgagctggtaggcaaatggtggaaactgatgaggtgagctgagtcaaggatccatcctcagtgccattgttttgtccccatgcaaaacctgtccagatgtgtatgcaaactcaaccccgaccgccactttacagtgtcctgccatgtccttaacaatctcactgcaacctctccaccttctgccagtgtccttctcttgcttacctccaacctggagccatgtgggtgatgtcagtgacaaattttgcactcacagttctccgcctcgctgtattaatatggcatagatgctaataaattaatgataaggggagtaatcagataggtagtgtgagatatatgggatcttaaggaaacaaatcaatttcagtttttcaatttgatgagtatttactgtgtctttactatgtgctgtgattgttctaacatttagtagtcttcatcactaggattatcttaaagagttcccaggctgggctcaggggctcacgcctgtaatcccaacactttgggaggcccacgcgggcagatcacctgaggacaggcattcaagaccagcctggccaacatggtgaaaccccatctctactaaaaatacaaaaattagccaggcacggtggcaggtgcctgtaatcccagctacttgggaggctgaggcatgagatcgtttgaacctgggaggtgaaggttgcaatgggctgagatattgccactgcactctagcctgggtaacagagcgagactccatctcaaaaaaaaaaaaaaaaagaagagaaaagagttaactaaatattaggatcctaggaagaggtacaaagccatcagtgtcacgagcatcatttttaccataacgaacatccaatcattgactatctcagaataaaaaatattagcctgttttctctgcttcccaggagttacatgtctgctcagctcttgctcttatcttaaggtacttgcagcagcaggtggaggatgaagccaaggaggaatcctttcccatggaaccagcctctttccatcttcctctctttggcacttctctgggtacttgatgatgatgttaacctttaaaaaacctcagatcacaccttgagccctacctttgaataatatatatatcagctggcattaaccgcctctctaacaagaccccttggtgacaaaagaatgtcacagaggaataactcaccctgtgctttaactgggcctgaatctagcctccaaaagtaatatggcaaatcagtttggagaagaggaagcaaaaatatgtggtccctggagcagtgctaatggcttcctcatactttaaagtcactctggcgtacagtgcctcaccgagaaggcatggatgactaccactgcctccaggtggcacgtgaacttgttagaccctgctgtcatctttctttcttttcttttcctttcttctttctttctttcttttctctttctttttctttctttctctttctttctctttctctttttctttcttttttctttctttccttctctctctctctctctctctctccctccctccctctctctctctttctccctccctccctcccttccttttttttttttgcgacggagtctccctctgtctcccaggctggagtgcaatggtgcagtcttggctcactgcaacctccgcctcccgggttcaatcgattctcctgcctcagcctcccaagtagctgtgattacaggcgcctgccaccatgcctggctaagtttttgtatttttagtagagacgaggttttaccatgttggttggctggcctcaaactcctgacctcaggtgatctgcccaccttggctcccaaagtgctggaattacaagcgtgagctaccatgcccggccccctactgccatctttcaaaaaagaaagcgtgttggggggaggggggtccctattaata

SEQ ID NO: 315777 - DNA, 4001 bp, Homo sapiens
gaacatacaccttttcttgtgcttattggctgtttgtatttcttctttgcagaaatgtctattcaagtcctttgcccatttttgaattgggttgtttgatttttttgttgtgagtaactaattttacaaaatccaatcaaagggccaggcacggtggctcatgcctgtaatcccagaactttgggagaccaaggcaggtggatcacctgaggtcaggaatttgagaccagcctggccaacatggtgaaaccctgtctctactaaaaatacaaaaattagctgggtggggcagcacgtgccggaggctgaggcaggagaatcgcttgaaactgggaggcagaggttgcagtgagctgagattgcaccactgcactccagcctgggtgacaagagcaagactccatctcaaaaaaaaaaaaaaaaaatccagtcagagggtccactgctcaccactagaccactgcaatgttgggtgaggacttacaacttccagatggcagacaaggtgaaggagatgttgacatgagtggcgacactgtagttggtgactggaccaatagcctttctgtcaaacactgcttgaaaggctgcagggtccaccctgtgctggccaaagcctgggcaattgataatcaaagtgtcgccatttcctgtagtgagcagagactgagagaggagggccagggctggggggcctggagagtgtttctgcatggagagaaaacagggggcactgggagaagcatgtgagctcctccttcctggtccaggaagagtaggctgagctggtaggcaaatggtggaaactgatgaggtgagctgagtcaaggatccatcctcagtgccattgttttgtccccatgcaaaacctgtccagatgtgtatgcaaactcaaccccgaccgccactttacagtgtcctgccatgtccttaacaatctcactgcaacctctccaccttctgccagtgtccttctcttgcttacctccaacctggagccatgtgggtgatgtcagtgacaaattttgcactcacagttctccgcctcgctgtattaatatggcatagatgctaataaattaatgataaggggagtaatcagataggtagtgtgagatatatgggatcttaaggaaacaaatcaatttcagtttttcaatttgatgagtatttactgtgtctttactatgtgctgtgattgttctaacatttagtagtcttcatcactaggattatcttaaagagttcccaggctgggctcaggggctcacgcctgtaatcccaacactttgggaggcccacgcgggcagatcacctgaggacaggcattcaagaccagcctggccaacatggtgaaaccccatctctactaaaaatacaaaaattagccaggcacggtggcaggtgcctgtaatcccagctacttgggaggctgaggcatgagatcgtttgaacctgggaggtgaaggttgcaatgggctgagatattgccactgcactctagcctgggtaacagagcgagactccatctcaaaaaaaaaaaaaaaaagaagagaaaagagttaactaaatattaggatcctaggaagaggtacaaagccatcagtgtcacgagcatcatttttaccataacgaacatccaatcattgactatctcagaataaaaaatattagcctgttttctctgcttcccaggagttacatgtctgctcagctcttgctcttatcttaaggtacttgcagcagcaggtggaggatgaagccaaggaggaatcctttcccatggaaccagcctctttccatcttcctctctttggcacttctctgggtacttgatgatgatgttaacctttaaaaaacctcagatcacaccttgagccctacctttgaataatatatatatcagctggcattaaccgcctctctaacaagaccccttggtgacaaaagaatgtcacagaggaataactcaccctgtgctttaactgggcctgaatctagcctccaaaagtaatatggcaaatcagtttggagaagaggaagcaaaaatatgtggtccctggagcagtgctaatggcttcctcatactttaaagtcactctggcgtacagtgcctcaccgagaaggcatggatgactaccactgcctccaggtggcacgtgaacttgttagaccctgctgtcatctttctttcttttcttttcctttcttctttctttctttcttttctctttctttttctttctttctctttctttctctttctctttttctttcttttttctttctttccttctctctctctctctctctctctccctccctccctctctctctctttctccctccctccctcccttccttttttttttttgcgacggagtctccctctgtctcccaggctggagtgcaatggtgcagtcttggctcactgcaacctccgcctcccgggttcaatcgattctcctgcctcagcctcccaagtagctgtgattacaggcgcctgccaccatgcctggctaagtttttgtatttttagtagagacgaggttttaccatgttggttggctggcctcaaactcctgacctcaggtgatctgcccaccttggctcccaaagtgctggaattacaagcgtgagctaccatgcccggccccctactgccatctttcaaaaaagaaagcgtgttggggggaggggggtccctattaatataagcaacttcatacactgaggttttaaacatgacttcagtatagttaagactttaaagtatgaggaagccattagcactgctccagtgatgacatatttctgcttcctcttctcaaagctgatttgctatgcctttttagtgtttcaaaagcaatctggacccaggtctacccaatgaagggagtgattagtggagtagggggtggtggcagaggtaatacttttttaaaataaaagctgacttatgatttttttttttaaatggagtttctctcttgctgcccaggctggagtgcaatggcgcgatcttggcccaccacaacctctgcctcccgggttcaagcgattatcctgcctcagcctcccgagtagctggaattacaggcatgcaccacaaagcccagataatttttttttcatttttttattatactttaagttctagggtacatgtgcacaacgtgcaggtttgttacatatgtatacatgtgccatgttggtgtgctgcacccattaactcgtcatttacattaggtatatctcctattgctatccctccccgctccccccaccccatgacaggccccagtgtgtaatgttccccaccctgtgtccaagtgttctcattgttcaattcccacctatgagtgggaacatgcagtgtttggttttctgtcctcgctcgttttctcagaatgatggtttccagcttcatccatgtccctacaaaggacatgaactcatccttttttatggctgcatagtattccatgatatatatgtgccacattttcttaatccagtctatcattgatggacatttgggttagttccaagtctttgctattgtgaataatgctgcaataaacatacatgtgcatgtgtctttatagcagcatgatttataatcctttgggtatatacccagtaatgggatggctgacgcccagctaatttttttgtattttttgtgttttgttttagtagagatggggtttctccatgttggtcaggctggtctcaaactcccaaacttaggtgatctgcctgccttggcctcccaaagtgctgggattacatgcatgagccaccacgcccagctgctgacttatgattttaaagaaaaggtcatgagctattagcctgaaagtttatgttatttttggccctgctagtgttttttttttctttttttaaagttagttgtgtaacacttaaacattgagatttcacataaaaactgtttctggcttcatttgaaaaataagatctagcaacatgaggct

SEQ ID NO: 315778 - DNA, 4001 bp, Homo sapiens
ttttaaatttttaaattttttttagagggagtctcactctgtcacccaggctggagtgcagtggtgcgatcttgactcactgcaatctctggctcccaggttcaaccgattcttctgcctcagcctcccaagtaactgggattacaggcactaccaccacatcaggctagtttttgtatttttagtagagatggggtttcaccatgttagccaggctggtcttgaactcttgacctcaggtgatccgcctgcctcagcgtcccaagtgctgggattacaggtgtgagccacctcacctgacccgtcccaccctcttctaactaataaatttttaaattttctagtcatgaaaatgtgttggaggagcaacaacttggactgagagagatggttgataacctctgtgccaaggacattgagccttatccattcccaacgtcacagtgctttccagcaaattcttaaaccactctaagaacagtgaatattcatttgtcaacccctgtgtgcaagtgcccagaggagctttcataaccatttacactgcctagaccaggtgtacaatttgtgtctcttccctgtgctggcctttaaagtcacctctggttcagtcctctcctgtgcctccttatccaaagtcatggaataatctaacgaggagagatgacagttattggcacttttaccaagtgccagacactgtgcttccctccttctcttactgaatcctcacaaccctgcaaggtaggttctgttttacagatgaggaaaccagagctcagataagttaagcagtgcatccaagtttataaaactagcaacgtgagacaccaagattcaaacccaggtccacctgtctccaaatcccatgttcttgtctctctaccatgctgaccccctggaagagaagcacattctactttcacccttgacctgctgccttctggcaccttacctaacctagagcccttggatccagcagatggacagggaaattatggctaaaggaggtgggcactttgctacaatggtttgggtttcatacctgtagagagaaagaattacacctgtggatagaaagatggatggatatagaagctaaatacaagagaagacgatcgtggatggttgtcttccatgtagggtaccaatggagaaaagacagacttttcaagtagtattgggaaaactggatatccatatgtgaaaggataaagtttgctggtgttgaactctatttttcgagaaggaaaatgaaagtgctcttgtttggcatgtaactggaaggggattttccgtctttcagaaaaggaaagtctatgtgggcatcttagtaatgtagctatgaaagaactctatccatcttagacaatctctaggagttggaaatttgaaaaaagttcctagatgttctactagagagaggtcctccttcttccgccttcccccatcattgctcctttcttaccttgaagcagaaaaccgagaaggaggtagaaggaaaatcttttcctgtggaaccagcttccttccatcttctttgtctaagttcttctctgaacatgtactgggacccaggaatgcccagattaaagcagcacaggccacacctagagtctgactttgaatactaatagcattggttgaccactgacatttgtaaccttccttcaaagagtgttctggttgtcttgttcttgcctatgcttaaggttcagtctgcttttaagactttatcttagtcttaggtatttcactgcaacgtaaatggttatagatagttcatacgtgatcaacttgcagatcttggtgagatcccttggtctgaagactcatctcttcaattttggaaaattctcagacatttataaatgtttcacttcctctatttttcttattagacatgtgttgaatggtttccttctatcttacatgccttttattgctgttgtaacaaatcacaaacccagtggcttaaataaacacaatttgttattttactgttctgtgggccagaagtttgaaatgggtctcactgggctaaaatgaatgtgtcagcaggaccgcattccctctggaggctctagaggagaatccatttccttgccttttccagatttttttttttttgagacagggtttcactctgttgaccaggctggagtgcagtggcgcaatcgcgactcactgcagccttgacctcctgggctcaagggatctttccgtctcagcctcccaagtagctgggacctcacaggtgtgagccaccaagcttggctattttttttttttttagtagaaatgaggtctcgctttgttgcctaggcttgtctccaactcctggcctcaagtgatcctccaaccttgatctcccaaagtgctgggattatagacatgagccattgtacccggccttttccagcttttaaactgcctgtatttcttggttcattatttttacttctccatcttcaaaaccagcaacatcaggccaatgtttctcacaaggcatctcatctctctggttcttatttgtttctctctccttcttccacttataagagcctttgtgattgcattgtgtccatttggataatccaggatagtctccccatctcaaagtccgataattaacaaccttaattccatctgcaaccttaactccccttttccatataacctaaggttccagagattaggatgtggacaaattctgggggccgttattctgcctagcacacctctctttcctattttctacctctttatctctgtccctaatgatttcttcagatctagcttccaggaaaaaaattctctcctcaactgtgtttattttaattaattaattaattaatttttgatgaaactcagtaatttttattgcaactggaagacaatacattgcagaaactttatggtaggtctggggaaaagtgttatttacaatagattatgacataatttgtctttgacaatatgattacatacgaagaatgcaaaatgcaagtatggatgccttccatattttattttattttgagatggagtctcattctgttgcccaggctagagtgcagtggcgtgatcttggctcactacagcctccacctccttgatttgagcgattctcctgtctcagcctcctgagtagttgggactacaggcttgtgccaccacacccagctaatttttgtatttttattagagacagggtttcaccatgttgtccaggctggtcttgaactcctcacctcagctgatctgcccacctcggccttccaaagtgctgggattacaggagtgagccactgtgcttgaccctcaactgtgtctaatctgtccatctaatctgcccactgagttttggttttgtttttttgtttttttgttttttagagagagggtttcactgtctcccaccatgcctggccctcaactgtgagccaccatgctgggattacagacgtgagccaccgtgcccggccctcagctgtgtctaatctgtccactgagttttgctttttgttttgttttgttttttttagagacagggtctcactgtctcccaggctggagtacagtggtatgatcatagctcactgtagccttgaactccagggctcaagcaatcctgccacctcagcctcccaagtagctgggactacaggtgcatgccaccatgtgtggctaatttttttttattgtttctagagacagggccttgctatgctgcccaggctggtgttgaactcctggcctcaagcaatcctcctgcctcagcctcccaaatcactggaatttacaggtatgaaccactatggctaaccttttacccatttttaaatcaagttgttttttgttgttgagtttcaggaattctatgtatagtttggatattaatcccttatcagctatataatttgcaaatgttttctcccattttgtgggttgtcttctttcctctgttaatagtgtcttttgattcatagatgtttaat

SEQ ID NO: 315779 - DNA, 4001 bp, Homo sapiens
tcatacctttttgtggttaaaaatgtggtcagtttttgagaatactctatgtgtgtgacaaaaaattatgtatggtcattgatacaaagtttgacatgtttattagactaagcttcttaattgtgctgtgaaaatcactatatatttactccttttctactagatttttgttttgttttgttttgtttttgagatagagtctcactctgttgctcagcctggagcgcagtggcgcaatctcggctcactgcaacctctgcttcccaggttcaagtgattttcctgcttcagccttccaagtagctgggattacaggcgcccgccaccatgcccagctaatttttgtattttcagtagagatggggtttcaccatgttggccaggttggtctcaaacccctgatctcaagtgatctgcccacctcggcctcccaaagtattgggattacaggcgtgagccacccgtgcccagcctctccttgattttgaaagcagtgtattaaagcccctcaccattatggtcgatttttcaatttctccttcatgtgtttcaaaccaatgttagggacataaaaattcataattattatatcttcgtttaaaatcctttttgactgtaactgtagggagagaataaagtgttgtccataccatttccagccacaggaatgatgacaagaggtgcagctgttcattctgccaaaagaatttcctatttccatcatgttgccagtaagaagtctgttccatctcccccacttcccatgcttgtttaccaactcccaaggtatataaaggggatatgtgatccagaacaaaagctctatccaaacccatgtgttaggctacggacaggagagttcacagcagggcgggagtaaagtagtccttctcaaccctcgctgtatatgagaataactcgagaagcttaaaaatatcgatgtggccgggcgcggtggctcatgcctgtaatgcctgggaggccgagacaggcagatcacttgaggtcaggagtttgagaccagcttggccaacatggtgaaactccgtctctactaaaagtacaaaaattagccaggtgttgtgacgcatgcctgaaatcccagctacttgggaggctgaggcaggagaatcgcttgagcccaggaggtggaggttgcagtgagccaagaccgtgccattgcactccagcctgggcaacagagtgagactccatctcaaaaaatacaaaaacaaaaacaaaaacaaaacaaaaacgaggcttgggtttcatccaatcaaaacctctgagattagaacctggtcactggtatacagccagagagagaagaaaagattctcttccatgtgctgttatacctcaccctgctgccctggacagagcttctttgagatccccatgccaggcaaatgccatccagcagtggtggaggaagcagaaatgtggataagggctttggggggccactttgccaggggctggaaaaaggttaaggacaccaaggagggctagagaggtcagcactcaccacatctaggatggcagacatcgcgaaggagatgttgacttgggtggggacgctgatgttggtgaccggacggaagggctttctattaaacactgaattcagagcagtgggatccgccccgtgctggccaaaccctgagcaattgatggtgaaagtaacgccccttcctgtagtggacatcgaatgtgtgagatgaaggagagcaaccctgtgctccctatatgagaggggccccaaggcagggcgtggggtcgcccgtgataaaatgaaagctaacatttgttgagcactggctgtgtgtcaggtatattctaagccctttaaaaatggattacctcatttaatcctcccaatcccctatcaggtagatactgctttaccctcatgtaataaacgagctaactaaggtgcaataagaggaagtaacttcctacagtcagacagccaataaaaggcagaagccggacttgttctgaacccaggtttgtctgctgctgctgtgctatacgtccccagggatgagatgaagaatggggaggggatcaccgagaggggtccagacgctgggctcttccttccgaggcccgggaggatggggtgagctggaatgcaaattctggaagctaatgtagcaaagctgagctagagctccagcctcctttctaatatttctgtctccatgcaaagcatgcccaaatctatatgcaaactgtgcctggaatgttgatagtcatccgataggattacagtcccggggccccggagagaacacacctgttttcaccccgactgccccaaccttccttcttacttgactttacccaactctatcaccagcgttctagtttgaggctttaaaaaagttttattttatttttaatggacatataataattgtgcatatttctttcttttttttttttttttttttgagacggagtctcgctctgtcgcccaggccggactgcggactgcagtggcgcaatctcggctcactgcaagctccgcttcccgggttcacgccattctcctgcctcagcctcccgagtagctgggactacaggcgcccgccaccgcgcccggctaattttttgtatttttagtagagacggggtttcaccttgttagccaggatggtctcaatctcctgacttcatgatccacccgcctcggcctcccaaagtgctgggattacaggcgtgagccaccgtgcccggcctaattgtgcatatttcttagtttggggtttttgggggttttttgagacagcgactcactctactgcccaggctggagtgcagtggcgcaatcacttggcctcagcctctgggcttaggggatcttcccacctcagcctcccaagtaactgtgactacaggcgttccccaccacacttggctaatttttttaaaaaatttttgtagagacggggatctcactatattgcccaggctggtctcaaaccccggggctcaagtgattctcccacctgggcctcccaaagttctggaattataggtgtgagccaccattcctagccacatagctatttttagaagtgtgggtgggatttttttttaatttcttttttaaatttttaaattttttttagagggagtctcactctgtcacccaggctggagtgcagtggtgcgatcttgactcactgcaatctctggctcccaggttcaaccgattcttctgcctcagcctcccaagtaactgggattacaggcactaccaccacatcaggctagtttttgtatttttagtagagatggggtttcaccatgttagccaggctggtcttgaactcttgacctcaggtgatccgcctgcctcagcgtcccaagtgctgggattacaggtgtgagccacctcacctgacccgtcccaccctcttctaactaataaatttttaaattttctagtcatgaaaatgtgttggaggagcaacaacttggactgagagagatggttgataacctctgtgccaaggacattgagccttatccattcccaacgtcacagtgctttccagcaaattcttaaaccactctaagaacagtgaatattcatttgtcaacccctgtgtgcaagtgcccagaggagctttcataaccatttacactgcctagaccaggtgtacaatttgtgtctcttccctgtgctggcctttaaagtcacctctggttcagtcctctcctgtgcctccttatccaaagtcatggaataatctaacgaggagagatgacagttattggcacttttaccaagtgccagacactgtgcttccctccttctcttactgaatcctcacaaccctgcaaggtaggttctgttttacagatgaggaaaccagagctcagataagttaagcagtgcatccaagtttataaaactagcaacgtgagacaccaagattcaaacccaggtccacctgtctccaaatcccatgttcttgtctctctac

SEQ ID NO: 315780 - DNA, 4001 bp, Homo sapiens
caagactccgtctcaaaaaaaaaaaaaaaaaaaggatgaatgaatggatgaaaatgtcccaaggttgggggccgggcgcggtggctcacgcctgtaatcccagcactttgggaggccgaggcggatggatcacgaggtcaggagattgagaccatcctggctaacacagtgaaaccctgactctactaaaaaatacaaaaaattagctgggtgtggtggcgggcgcctgtatcccagctactcggaggctgaggcaggagaatggcatgaacccgggaggcagagcttgcagtgagccaagatcgtgccactgcactccagcctgggtgacagagtgagactctgtctcaaaaaaaaaaaaacgaagaaaatgtcccaaagctaaagtaccccaaggctggacctaatatctgacaaggcaggttgacaaggtgggcaggttacagaagactcaccaggggcagaaagtggtttgtcgtgtcatagaagatctggacatagggcagcaccggcagattggggtcaccagcagccacagccacacggaatgcctcggccacacggtgttgcacatacatctgtgacttccctgtgccctccagcactgcgggcatgtagatgctgggatagagggcacggctctggccccacagccaccctagctggtcattttgggcacggatgcctgatgggcactggccggtgtagttggggcttagaaagtcatagttgtagcagtcagggaagccatagaagccccagaggccgcgaggacgcagtgcccgccccagctggagggtgcctgccatccaggcccgtgcagctccctggaactggtcctgggctactgcctccacctgaggagctggccaatcagggtgctgtgcctgtaccagtgcccgtgagcgctgccggtaaatgtccttggtgtcccagttgaaggcccagcgtgggcgccatgcctcccagtcgatgactgccagccctgagaagtcaggagcaggtatggcagccaggatgtcctggaatgtgcgggccaggtgggcaatcaggctggcattctggggcagaccaccaaacacaggctccccagtgggcgtgtagtaggggtaggtgcccagctgggagctatagaaaattgtcatgtcagggccgcggaaggtctgccctgggttggctaccacatcgaagacactgacatccacgtccacaccgtgcctctccaggcaccactgggtgtttgcattccagacggtggtgaagggccggttgggtagcaaggggcccctaaagccttgggccatatcgagtaaggtcaggaagagggcgcagatgggaagcaggtgggctgccatggcacgggactggtcgaggacaacctggccaggggaggcagagctgagaacaggttgcaaagtctccgattcccccactgctcagggctggggggctgagcccttgcgcattaatccaccgctgctctggtttctgttaaacattgacctgcagggctccaggagggcaggggagacgcatggaggggagcatggccactggagggcacatccgagttgcctctcagaccaggcctctgccatctcccacaggacttgctctagcctaagctcgcccacccctgcttccccatgagccactgaggccatgacatatgttctgggaagagtggctgacagccaggccctcagcccccaggctgacccgaccaagggggggaggccttcctgtctcttccaccagaaatcctggcagccactggaggaagatccaatggcctcagtgaccaaggacaggtcaacccagccctcctgtacacccgccagtctgcccgctcgtccctgctgaccttggggctgaagggccttatcctccaaatttcctgaccccaggatgggggcctaagcagggcctggccagattccaccccagctgcaccagagactcctggaggaaggagccgctgctggaaattctgagcttttgtagggggtcaccccacccaggccaggggcgggccaaggggcgggccttggattaggaggccaggccagccaggcatcagggctacctctgaatccctggcaaagggatcttggttgggggtggggctgggccaacagtggcccctcccacgctgtcagcactagggcagggctttgtggccttacctaggctggaggaggtgggcaggggcagaccctgctgggcaggcctgtttgtgacactggagaccgggttctttcgtgtcttgtgctcagggagtgttctttgtccacgtggctgcatctgacattgatgggccctaggcactttactttcgtggatcttttcctccttaaaaaaaatattttaaaatatggccaggcatgccaggtgcggaggctcacgcctataatcctagcactttgggaagccgaggtggcagatcacgaggtcaggagatcgagaccatcccggctaacatggtgaaaccccttctctactaaaaatacaaaaaattagccgggcgtggtggcaggcgcctgtaatcccagctactcgggaggctgaggcaggacaatcccttgaacccgggaggcagaggttgcagtgagccaagactgctccactgtgctactatactccagcctgggtgacagagagcgactccatctcaaaaaaaaaaaaaaaaaaaaaaatatatatatatatatatatatatatatatatatatatatatggctatagtcttagcactttgggaggctgaggtgggagaattgcttgagcccaggagttcgagaccagcctaggcaatgtagcaagaccccatctctacaaaaaaattaaaaattagctgggcatggtggtatgtacctgtagtcccagctacttgggacactgaggcaggaggagtgcttgagcccaggaggtcatgtctgggttacactattatatattaattattaatatatttacatttatattcttcttctgattaaaaaaacattttgtgggcccctgaaagtactgtggccctaggccttgggtctattgtgcttagtggataagtcatccctgttgtagggacctgtttctgaaaggcactgtgttcatgaagtcagggctgtgtcatcaccctttgtatatgtgctgggttagtgactgtgtctttgtgaagccccatttagtgaccatctgagcctctgcacaaattccagtggcaagtaggtgtgagtgtggaacccagtgcctgggactgggtgtgtgtgagccctgctgtcttgtgagcatgagatcctgtgtttgtgtgaccatgcatatgagctgtcagtgagcacatgcttgttcattcatttgtggtttcacttgttcaatatgtgaaaggaaaatatcttgggccccttcaagctgggaaccgctcaggacaaatctgcctcccattctattcaagtcatccttttgcttacagacatagatgcatattatgattgcctccattgcctcttttggaaagactaccagaaactcaaaagaatgcaaccatctgtctgtcacctgcctgtgacctggaagcccccagtggggggccgtgctttgagctgtctccacctctctggacagagcttatgtacttctgttttttttttatttttattttttgagacggagtctcgctctgtcgcccaggctggagtgcagtggtgcgatctcagctcactgcaagctctgccccccgggttcatgccattctcctgcctcagcctcccgagtagctgggactacaggcgcccgccaccacgcctggctaattttttgtatttttagtagagacgaggtttcaccgtgttagccaggatggtctcgatctcctgaccttgtgatctgcctgcctcagcttcccaaagtgctgggattacaggtgtgagccaccgcgcctggcctaatttttttttagatgaagtctcactctgtcgcccaggctggagtgcaatggcatgatc

SEQ ID NO: 315781 - DNA, 4001 bp, Homo sapiens
gcctcctgagtagctgggactacaggcaaccaccaccacgcccggctattttttttttgtatttttaatagagatggggtttcaccgtgttagccagaatggtctcgatctcctgacctcgtgatctgcccgcctcggcctcccaaagtgctgggattacaggagtgagccactgcaatcggccactgtggtttcttttcttttttttttcttttttttttttaattattatttttttattgatcattcttgggtgtttctcgcagagggggatttggcagggtcacaggacaatagtggagggaaggtcagcagataaacaagtgaacaaaggtctctggttttcctaggcagaggaccccacggccttccgcagtgtttgtgtccctgggtacttgagattagggagtggtgatgactcttaacgagcatgctgccttcaagcgtctgtttaacaaagcacatcttgcaccgcccttaatccatttaaccctgagtggacacagcacatgtttcagagagcacagggttgggggtaaggtcacagatcaacaggatcccaaggcagaagaatttttcttagtatagaacaaaatgaaaagtctcccacgtctacatctttctacacagacatggcaaccatccgatttctcaatcttttccccacctttcccacctttctagtccacaaaaccgccattgtcatcatggcccgttctcaatgagctgttgggtacacctcccagacggggtggtggccgggcagaggggctcctcacttcccagtaggggcagccgggcagaggcgcccctcacctcccggacggggtggctggccgggcggggggctgacccccccaactccctcccggccggggcggggggctgaccccccaacctccttcccggacggggcggctggccgggcggggggctgacccccccacctccctcccggacggggcggctggccgggcagaggggctcctcacttcccagtaggggcggccgggcagaggcgcccctcacctcccggatggggcggctggccaggcggggggctgacccccccccacctccctcccggacggggcggctggccgggcagaggggctcctcacttcccagtaggggcggccgggcagaggcgcccctcacctccgggatggggcggctagccaggcggggggctgacccccccacctccctcccggacggggcggctggccgggcggggggctgacccccccacctccctcccggatggggcggctggccgggcggggggctgaccccccaacctccctcccggacggggcggcaggccgggcgtggggctgatccccccacctccctcacggacggggcggctggctgggcagaggggctcctcacttcccagtaggggtggccgggcagaggcgcccctcacctcccggatggggcggctggccaggcggggggctgacccccccacctccctcccggacggggcggctggccgggcggggggctgatcccccctcccctcacggatggggtggctggccggccagaggggctcctcacttcccagtaggggcggccgggcagaggcgcccctcatctcccggacggggcggctggccgggtgggaggctgtcccccccacctccctcccggacggggcggctggccgggcggggggctgacccccccacctccctcccggacggggcggctggccgggcggggggctgacccccccacctccctccaggacggggcggctggccaggcggggggttgacccccccatctccctcctggacggggtggctgccgggcggagaccctcctcacttcccagacagggtggctgccgggcggaggggctcctcacttctcagacagggcggctgctgggcggaggggctcctcacttctcagacggggcggccagggagagacgctcctcacatcccggacggggcgacagggcagaggcgctccccacatctcagacgatgggtggccgggcagagaggctccgcacttcctagatgggatggcggccgggaagaggcgctgctcacttcctagatgggatggcggctgggcagagacgctcctcactttccagactgggcagccaggcagaggggctcctcacatcccagacgatgggcggccaggcagagacgctcctcacttcccagacggggtggcggccgggcagaggctgcaatctcggcactttgggaggccaaggcaggctgctgggaggtggatgttgtagcgagccgagatcacgccactgcactccagcctgggcaccattgagagactccgtctgcaatcccagcacctcgggaggccgaggctggcagatcactcacggttaggagctggagaccagcccggccaacacagcgaaaccccgtctccacccaaaaaatacgaaaaccagtcaggcgtggcggcgcgtgcctgcaatcgcaggcactcggcaggctgaggcaggagaatcaggcagggaggttgcagtgagccgagatggcagcagtacagtccagcttccgctcggcatcagagggagaccgtggagggagagggggagggggagggggaggggagggggagggggagggggagccactgcaatcggccactgtggtttcttttttttttttttttgagatggagtctcgctctgtcacccaggctggagtgcagtggcgcgatctcagctcactgcaacttatgcctcccaggttcaagcaattctcctgcctcagcctcccgagtagctgggactacaggcgcttgctaccatgcctggctaatttttgtatttttagtagagacagggtttcaccatattgaccaggctggtctcgaactcctgaccttgtgatccggccgcctcggcctctcgaagtgctgggattacaggcgttagtcactgcgcccggccctagctgtggtttcttaaaagcgtgtcaactaaagtcagacaacttacacttcagaagaaagtaacagtaacctgtttatgtacatacataagccactttcatacctgcctaccaatgtatggacttcagagtaatgtggcctatattttcccaggattttttttttttttttttttgagatggagtttcactcttgttgcccaggctggagtgcaatggcgcaatgtcaggttgctgcaacctccgcctcctgggttcaagtgattctcctgtctcagcctcctgagtagctgggattacaggcatgagccaccatgcctggctagttttttgtattttcagtagagacagagtttctccatgttggtcaggctgttctcgaactcccaaccgcaggtgatccacccgcctcagcctcccaaattgttgggattacaggcatgagccaccccgccagggctgggattgttcttttgctgttttttttttctcttccttccttctccctattttctcttcacactgcatgagactttacaacctgctaaaaatgagctttccggacctacttatctagcaatgagagatcagatgaaacctgagaccagatactcattttcttgcaaaatgctttctccaaaagattttgaaaaagaaaatggggtaaatgtgaaaggaaagtatcttgggcctcttcaagctgggaactgctcaggacaaatctgcctcccattctattcaagtcatccttttgctcacagagatagatgcatattctgattgcctcctttggaaagacttaccagaaactcaaaagaatgcaaccatctgtctctcacctatctgtgacctggaagcccccagtgctttgagcctgggagccttgatttgagcagtctccacctttctttctggaactaatgtacttcttacatattgattaatgtctcatgtctccctaaaatctataaaaccaagctgtgccccaaccgccctgggcacatgtcctcaggacttcctgaggctgtgtcaccagcaagtcct

SEQ ID NO: 315782 - DNA, 4001 bp, Homo sapiens
tttcagagaaccctgaacagctgatgcccaccctgtacaccgtgaagaacccttgatccagagaaacgacagcatttgggtaaagcagggaacagctcgtcaagaggctacgaaactggaaggaacgctgccgggaggcttctatccgtgtaacactcgcccggcagaagagtgaggctctccggactttctctcgagcgctgacactctcccggcttggaggaggccccgtagggacaaaggggcagcggacctcccacggcggcgccggccgcccggcccttccctccaccgccaccgggaatgcgcgcgctcgcctcccccgcccggccgctcagggctagagcgcgctccgccgggtctttgtgcgggaccccgcccccgccccacacgtggggcctgcgcccggtcgggtgggggtggggtttctgggacgcctctccgcgagcacccccggggattcagaccccagcccaaggggagagagccgccaggtttgcaccgcccgccctcacctcgcgcggggcgccaccgggaccggcgccagggccaccgccatcccgggcccagcccagcccgctccggccgttcgcccaggcgcggcccggctcagcgcctctgctggctccgcccccaggcacgctggccctttaagactccagtgcggaggtgggcccgggattggacttgcggacggggcgggaaggtgtggtccacctttctcggtgccggtgcctcgtttcgggctcgaagagccccaggtcctctgcagagggacgtggccgcccatttaggaccctaatgcccctctgagccgggctttctatgggagtctcagccacgagcgccagtcagcctgaaatgtttcccctgcagcccgaggccggtggttcagtcctcccagctccgcggcgccgccagccctttaaagagacagtgtgagggacaaggcagggggacgggaagggggggggggggaataggaggaggcgttgccccgttcggccatcaggaggtgctgtggtactccgaggttggcagggggcagcaccagatctggctctgcaccccctaacgtagacgccagccgtgggtcccctttgtgtggaaaaagggactttgacctgaggcgacctctggtctcctggagagtagtgccccgcctcccacgaatcaggggcccccttctctggtccgccgtctaaagggaggccccgccccctgccagactgagggaaggggccaagcaccgcttcttagccggcccaggaagggccgaggcagtcgttatcctggcagcccggctctgggtcgcggcgtggccgcagggttggggtcagggaagctcagaggggtctaggaggttggccgcccctctccctgactcgcatcagggcgggacagtcatccctgagatcccgtccttttctgcccagtctctgaggtcctttgggagcccggctccctctcaaccccgaggaggcctccattccttgcagcagtttctggctggacctccgagaaagccagcaagaggggtctcccagggcctccatcccgtatccagcgccccctacgctccacaggcctctcccggtggggggcaggcttagaccctggcgagccccgtgcgaaaccacctcggctcttcctaggtccgctcccttgtgcgagactcaactcccaaaagggcccgcgtctgcaccaccagcccctaaccctcccgggcgccaggagagggagggagtgcaactgcgagcgcatctgtgggggtgcagaccagccgtctgctctgggctcacctgtgtgggagtccgtcggcccagtaggtcggtggcctccctccttcctggggtgagcctctccagctaggctacttgcgccagctgctgcccgttgggcagctcgccgaggacttgataaaccccattccctcccatccgctcccgcctcccatcccagccctttctcctcacttcctgctgccccctgagaggaaagggccaggaacaggcgtgggggaggagatcgccttgaccctgtttccctccagaatgccctgctggctggctgccctccccacccttcccgagtaggatctggccccgccagctgcgccaggtgacaggaaggctatgggctcaggatcaggtgccaatctcccccacacccacagcttccaacactagggaacctcttcactccttccctaggattggggcccatcctcaaatccagtagggtgtgagaggatggggtcaggtggtggtgcttttgggagtcaaaatacttgggggtcgttcagctgatggtcccccagagcaggtgcccaagaagggaactagccttggggggagggtcggggggacttccagtagctgagtccgtttttttccactgagagcttccgcatcctgtgtgacaggacaatgtgttagtgagtgtgactgtgtgggttggggaggaggggatggactgggagggttctgcagagtgctttcctgctggagttcattcctggatggatttcagagtccactatacagagtagggggctccttacaacatggatgaggaaaggggtatactcctctgggaggggtgttcctgtggctggccctagggaggactgcagcaaggttccagcagacctctccaggggtgcaaatctacctaccctcaaatcacccagagccaacccctcaacaacccaatggcccaatgcccaggagcctctcccccaacagaaggctgtgtgaggggtaggtgaatacccaggagtctggccctgaggaccaaggagtccaagacatggtaggggaaggtgcagtgtccctgtaccactgtgctggcttcacaggggccagaagccttgaaagctccatgggtggggacccccggggaaacaaaggctaggccagactgtcccagggcagggacacttcctcaggcagccagcaggaaggaagtgagcacagcccggcgggagagagtggggaagtgttgcctgacccccattgtttccagcgatggggtcagctgggtaggcccagcacagggagttccctcaggctgggacagtggtggtaggagacaggatgctatctggcatgggagagccctgggccttgaacagccagtagagggggaccatggaggatgacagggcctcatgtttggcatcttatgggggtatggggaggcaccccacagaactgcaagtccaggctggatatggtgatcctgccctagccttgacaagttcaaacctccgaaagactggcagaccagctccctacactcagaagcctgtccctgaaatctcccctctttaactgggagttggactgatagtcaaagcctaagcctagtagagaatctgccttatagcagcccctgagaagtgcaggcagaatgaccacagtgggcaggctgcaggtgatgagaagatgggggcaacagacagcaggggcaatactagtgggccgagccttgcttgctgaaacagcagcctgagctcattctcccatggtgtccgcaggcaggcctcagaggaggcacatgagtttgggttgctgagcctggcagtaggccaaaggcgtggggacacctatctggctgctgtccattaaagctgggcctttgaggtccatgggggtcaggccatgaccccacttaggatcagctggcgatgctacagctaagacagatattccagaactatcttgggtcacactctctcaccttagatcaggcaggtggggccaatccttagtgaagtatcccagggccttctgattccaagggtcaccaccacatggatcacaacagataaatgagtgccctcccaccctgcagggggcctgcagtgaggtctgtgtgaacacacagccacctgctggccacagttgggatggccacaggctgggctcagacttactcttgggctttgctggtcatagggggcctgccagagtcctgtgccaggcctacctattgaa

SEQ ID NO: 315783 - DNA, 4001 bp, Homo sapiens
tggtgaagaccaggccctgcacaggctcacccagctggtagcccaggtgggtatagaagtgcacctggtcatgggtggtgagatgcagcttgcggaagccccgggcccgagcaaagacctccaggccctccatgaggcggcggccaaagccacggcccctcagggcccgggccaccaccactgtctccactaagaggctctggggctggttcagcacccgtgacaggcgggcatggcccaccacaacgggtgctgcttcaagtgtggggtgggggcttagcagcatcaggcagagggggaaggcatctgaggactggcccagggagtgcaggcgggaggtgcggctgcggggccactgatcattgatgaggtcagcacaagcatccaggagctcgggtcggcggtgcacaggctccagggtcaactcagccaggctaggagctggggtctcctctggctggtgttcaggatccagggtaagctcagttggaccaggattgaaggtcatctctggttggcatgtggaatccaggggcagctttggctggcacgcaggatccagagtcagctcagctgggctggtactcaggatcagctccatccggtgtgtagggtctagtgtaggggtcagcttggctgggccagggctcagagtcagctcttgcctatgcacaggatccaggttcagctgagtcaggctgggagccaaggtcacctgctgctaggttgcaggtggctcagtgccaggctggaggttaagaccccagtctccaggcagtagcatctcttcagaccacagtggctctcctcctgtagataacagccatgctgggctgtgccaggagggagggtggggttggagcagggaagggctgacagagtgcaggggggaccatgcatactggaactggggagtggtgggctgcactttgtcccacactcacctgatagcacaggtgacctggaagagacccatcccctatagagcagggcagatagatccaggtgtctaccccacattggagggaggctgggagtgatggatgagctgcttaaggctggggcagaacctaggagtcctggccccagcctgctctggctacaaatttgtcctcctcaggacctcccctcacagggggtctgtaaccaccaggtctataaaacagccgacccaatctacttgctggccttctgtcttccagtagtcctcctagtccaccactagggcatgggatagaagatgcaaagcagacactataccccctgctcaaacctacccaaggttccctccataggaaaaactgcccgggagtcttcctgtccctttcttctccctatgttccgagtctcctccagctcccagccttttcaactacctgggctatgcccactgccttagtggatcctggggccccactcatgcacccatcaggctgagctttggcctgtcttgactgccttccccacctggagcccatggcccccttcccaactctgcccatctcaggacactttggatatagacccaactgtctcctcagatggggccccagcagcaccagcactgggcctggcccacagtcacacagcagtattgcctctgcaggcttggttccccactggcttgagtttcgcaggcaccctagataaggaccacagcttccttcctatatccacagggtgtccaacggtcaccaggttgggggcccagacctcctgtgcccaaaccctactgttttcccatcttaaccaaggtcctgccgtccggcaggtctatgctgggggttttctagtcgtgggcgggcagctgagccccctccttctactcacctgctccagagggggcctcctggctccccttacctctcctgagcttgaggccaattaaacactggtcagtaacaggcacccccctcccctcacctcccacaccattcacagggctgtaagcccctcacctgcatcagccacctctgcagcagccgcaccctttggtctagagggaggaagccccaggatccgcccctagggctgagcccggggcttccccgcggccttaaccccttcagtgccgaccccacccactgtgggcggggctccggggtcctcagagagtggcttctccgtctctcccgggcctcggtttccccctccctcctagtgggtcacaggctgtggagcttttgggaatgaggacttcgagagctcgactctgtgggcaggtgtggctcggcatggtctggaaacgaacgactgacgcggggagggcgtgcagggtggcatggccacttggggaccgcacgcgcggggtggacctacaggcagcaaatgggaagggtgcggtactgacatgttgatgctggcctctgggatgttccgcgtcctagctccgcacagctgggtatctcactcagtcgccacctcggactcctcggtccgacaacgttggcccccagcggtgcggcggatgttctgcagccgtcgcgtcctgcggcacgccacggcgttctaaggcctcccagcacccgcgcgtcgccgcttagaacccgcccctggtttgcgcgtcacaacacccgccaggcgccgactcagtctctaccctggctccgcccctgctgagccccaccccatctccatttgagtccgcctcctccccacccggccccatacaggcccctcctccttctccttgcgtcacagcttaggtcccgcctcgatttggcttcttccaggccctgccccagcccagcacgtcacttcagccaggcgcaggccccgcctccagctggctctgcctccgccagccccgccccaggctctgacaagtctagcttcggttcccgccggcctcctgccccaggacagcttggaaacggtccgatcaggtggggcttcctcttgaaatttgggccccaccctgggaagcagccgcccttagactgacgtcagatctggtgagagtgacaagcctttcctgtgccctttggataccggggcctggacattttaggcgctcagtaaacagctaagtaaatcatgactgctttatttgctggactggtgcctctcagcagattcaggggtcgtgcagggctggttaccacaaactcagtaggagtgcaagggctgtacccccggagctagacagcctgggtttgaatctcaacttctcccttttcttgctgtgcaaccttgggcaacgtgcttactctcaatgtgagtgactcagtttcctcatagcctcattgtgaggaatgaataagtccacataaaacgcttagcacggggattggcaaagagtaggcactcagtgaatgtcagcctttgtgattgctgcagttcaaagactggctcagtgtctctggaggaattgtctatgaccttgccaagtagatgcatatggacatggaatgaatggtgtctgctgtggttctaactccttatgccactattccagtctgtaagtatgcatgtgtgtgcagggaatatgcctgtgacagtggctgagtgtactctttactgtgaccatgacttgtatgactgtgcatgtatttgaggaagccctggccagacccagagtgcattaggttctcaatatgtgcaactcagtgtgtggccaatcaccacatgctcttccgctcacaccacggtgcctgccagccagggtagcatcgacatttgaactccacagccatctgtgcctgatcttcaagtgagagggcaccccgcaggctcaggggcccaccaccaggcgtgagctggatggagaaactggcagggttaaggaggaggagggctttggggtggctggtgcggcggacacagcggccatggccggagcacagggcttgactgcagagaagggccccactggtcacgttcaggatgaagggccccagtgtagtgtccatatactccttgatggcctgacatgattcctaggtgggaagggaggatagcgtcagggacaccatggccatgtatggacccacccagggcac

SEQ ID NO: 315784 - DNA, 4001 bp, Homo sapiens
gtgtagggtctagtgtaggggtcagcttggctgggccagggctcagagtcagctcttgcctatgcacaggatccaggttcagctgagtcaggctgggagccaaggtcacctgctgctaggttgcaggtggctcagtgccaggctggaggttaagaccccagtctccaggcagtagcatctcttcagaccacagtggctctcctcctgtagataacagccatgctgggctgtgccaggagggagggtggggttggagcagggaagggctgacagagtgcaggggggaccatgcatactggaactggggagtggtgggctgcactttgtcccacactcacctgatagcacaggtgacctggaagagacccatcccctatagagcagggcagatagatccaggtgtctaccccacattggagggaggctgggagtgatggatgagctgcttaaggctggggcagaacctaggagtcctggccccagcctgctctggctacaaatttgtcctcctcaggacctcccctcacagggggtctgtaaccaccaggtctataaaacagccgacccaatctacttgctggccttctgtcttccagtagtcctcctagtccaccactagggcatgggatagaagatgcaaagcagacactataccccctgctcaaacctacccaaggttccctccataggaaaaactgcccgggagtcttcctgtccctttcttctccctatgttccgagtctcctccagctcccagccttttcaactacctgggctatgcccactgccttagtggatcctggggccccactcatgcacccatcaggctgagctttggcctgtcttgactgccttccccacctggagcccatggcccccttcccaactctgcccatctcaggacactttggatatagacccaactgtctcctcagatggggccccagcagcaccagcactgggcctggcccacagtcacacagcagtattgcctctgcaggcttggttccccactggcttgagtttcgcaggcaccctagataaggaccacagcttccttcctatatccacagggtgtccaacggtcaccaggttgggggcccagacctcctgtgcccaaaccctactgttttcccatcttaaccaaggtcctgccgtccggcaggtctatgctgggggttttctagtcgtgggcgggcagctgagccccctccttctactcacctgctccagagggggcctcctggctccccttacctctcctgagcttgaggccaattaaacactggtcagtaacaggcacccccctcccctcacctcccacaccattcacagggctgtaagcccctcacctgcatcagccacctctgcagcagccgcaccctttggtctagagggaggaagccccaggatccgcccctagggctgagcccggggcttccccgcggccttaaccccttcagtgccgaccccacccactgtgggcggggctccggggtcctcagagagtggcttctccgtctctcccgggcctcggtttccccctccctcctagtgggtcacaggctgtggagcttttgggaatgaggacttcgagagctcgactctgtgggcaggtgtggctcggcatggtctggaaacgaacgactgacgcggggagggcgtgcagggtggcatggccacttggggaccgcacgcgcggggtggacctacaggcagcaaatgggaagggtgcggtactgacatgttgatgctggcctctgggatgttccgcgtcctagctccgcacagctgggtatctcactcagtcgccacctcggactcctcggtccgacaacgttggcccccagcggtgcggcggatgttctgcagccgtcgcgtcctgcggcacgccacggcgttctaaggcctcccagcacccgcgcgtcgccgcttagaacccgcccctggtttgcgcgtcacaacacccgccaggcgccgactcagtctctaccctggctccgcccctgctgagccccaccccatctccatttgagtccgcctcctccccacccggccccatacaggcccctcctccttctccttgcgtcacagcttaggtcccgcctcgatttggcttcttccaggccctgccccagcccagcacgtcacttcagccaggcgcaggccccgcctccagctggctctgcctccgccagccccgccccaggctctgacaagtctagcttcggttcccgccggcctcctgccccaggacagcttggaaacggtccgatcaggtggggcttcctcttgaaatttgggccccaccctgggaagcagccgcccttagactgacgtcagatctggtgagagtgacaagcctttcctgtgccctttggataccggggcctggacattttaggcgctcagtaaacagctaagtaaatcatgactgctttatttgctggactggtgcctctcagcagattcaggggtcgtgcagggctggttaccacaaactcagtaggagtgcaagggctgtacccccggagctagacagcctgggtttgaatctcaacttctcccttttcttgctgtgcaaccttgggcaacgtgcttactctcaatgtgagtgactcagtttcctcatagcctcattgtgaggaatgaataagtccacataaaacgcttagcacggggattggcaaagagtaggcactcagtgaatgtcagcctttgtgattgctgcagttcaaagactggctcagtgtctctggaggaattgtctatgaccttgccaagtagatgcatatggacatggaatgaatggtgtctgctgtggttctaactccttatgccactattccagtctgtaagtatgcatgtgtgtgcagggaatatgcctgtgacagtggctgagtgtactctttactgtgaccatgacttgtatgactgtgcatgtatttgaggaagccctggccagacccagagtgcattaggttctcaatatgtgcaactcagtgtgtggccaatcaccacatgctcttccgctcacaccacggtgcctgccagccagggtagcatcgacatttgaactccacagccatctgtgcctgatcttcaagtgagagggcaccccgcaggctcaggggcccaccaccaggcgtgagctggatggagaaactggcagggttaaggaggaggagggctttggggtggctggtgcggcggacacagcggccatggccggagcacagggcttgactgcagagaagggccccactggtcacgttcaggatgaagggccccagtgtagtgtccatatactccttgatggcctgacatgattcctaggtgggaagggaggatagcgtcagggacaccatggccatgtatggacccacccagggcactgaggcactcacctgctggtcagccaggactttgcaggtagaaagggtaagtcagggtctaccccgtcagcttaatggccccacccctcccccacccccaccctcatgccaggcctaagctcaccttggttcttgtattttcccagctcacccagagcaccactccagctgccccctgggccgcactctcccccaggctgtgctccagctcatcctgggaaggagacagcacagctctgtggggcctccttcccaccatgtggcagactgctggaacaccattagatgggacaaataattcataaccttcacctggggctgctctggccatgggaccagaggcaaactgcttcctcctctagcctatgaattccatgcagacagggactacatcattccaataaatgttgaattgcctgtgcctggcacagaacttggcaccaagtgcacactcaatggatgtgcccatgcgccaggcgcggtggctcatacctgtaatcccagcactttgggaggctgaggtgggaggatcacctgaagtcaggagttcgagaccagcctggccaacatggtgaaaccccatttctactaaaaatacaaaaatta

SEQ ID NO: 315785 - DNA, 4001 bp, Homo sapiens
ggcattcactggcggtgctgcgggcctcactggctgcctcatcgtcactggaacccgagtcagcttgggcactgctccgggcacctggagaaggtggaataggacactcaacttgcctctactgatgagggatggctgggggtacctcactcgacctcataatcccaaaagatagaatggtgtccctctcagagatgaaaaaccaaagccaagggtcagttcagtagggctggtgcactcctgtgtgtggggtctgtccagggccaagggctgacattggcaaggttggctgctgtggcagagttttggacagggtgtgatcaccaggctggccctacttctaagaactactcacacccctcatctgcaggacaaagtccagcctgcgcactggcctctgctccccgccaccttttttttttttttttttttttgagacagagttttgctcttgttgcccaggctggagtgcaatgacgccatctcggctcactgcgacctctgcctcccgggttccagtgattctcctgcctcagcctcccgagtagctgggattacaggcatacgacaccacacccagctaattttgtatttttagtagatagggtttctccatgttggtcaggctggtctcgaactcctggcctcaggtgatctgcctgccttggcctcccaaagtgctgggattacaggtgtgagccaccacgcccagcctgctcccattttatcttactattctacctgccggagcagcccagccttccctcattcactccactgcgctggggtccctccagctgccaggtctttgtacaacttgctctcttctccatcctctcaggactcacccagaagcacttccccccaggcctccctgagtcctaagtctggggctgacaccactcagtgaacatgttccacaccctattagatgtcccccacccaaaacccaccatggtggtgaccagtttaaagttgtgcctaggtattttcctccttcctgtgcccggccctcctcccttccccctcaagaataaaaataaataaatttgtgcgtggtaggcaccccatcccagcagagtaaacatatgtgtttaacgcattaagataggctcctggtctaagctgataagcgagtcccaagactgcctcaggctccaggatactcagctaccttgtggagtcaggcctgccaagctgccaaggccctaaccaggtagcttcccaacagagccccctccctctcttcaccggagcaggccaggactcccgccaacttccttgaccagtccaggaaaggatcagggtttggcaagaggactggcttcctgccctgtccggtgagtttgtccacccagcaggcaactgaggcccggaggggctggccgggtcaccgctgggagcgcggactcccaacaggcagtgggcagcgagctcaagttgggcacgcacgtggccaatgactgctggggcacgtgccagcctcggtagagttatgggaagctgcgtggggctggccgagggggttccccacccagggccctcgagaacaaccaaggggatccagcaggacccccgcccgccgctcatacagctgtcccgcgccccccaccccactcacctcctccacggcgctgaccacccttccggagcgtgttgcccttacgggcgcgaggcatgccgggaaccgggcgcggggggcgcggggtcagggacccggtgggtgtgggctccaggccaacgagacgccggccggtgcgctgcgctgagacttggccagacgacgggagccacacgccacgcgcgccaccatcttcgcgaggcgccccgccctgccaaacaggtcgccgggaaggcgagttccaggccatccgattcaggcccacatccacgaggctaaaactactaatcccagaggcctgagcgcgcaggcgacggcggctagctgcgcgtagagcaccatgggaatggtagtccacgcctggggcccaccagccgacgacgcgctggctgaactatgcacccacaatgccctgcgcgcgccccagccccgcgtcgggaacaagtgcacggtggttaactccgaagcgtccctcagtggagcaccaaggcaggactggcttctcagggcacttggcagcgggacactccagacgagacctacccctgcctgggtctggggaccatgggaagggcttagagcttgggataacaggagcaacagccaaacctcaggcagtggaaaaaagtgactttatgatgaaagagtgcagacaacagcttagcactttaccgaccttcgccaagattttttggggcccatctgcccgtgcacggcccatctgtgacctctccatgggcttagtgaggtgtaggcacaaagccctaggctggcagccctaactagctggaacctgactctccctggaactgcttccttgccatggaggactcacatgatctcagagggcctctggttttataagcgttttttctggccccttctacccctcagggattccaagggaagcggggtgtgtgcttgggagggttgactgtaaactgaatagagcaagagtgggacagagtagttccaggactggaaaagtggcagcagggaaaagaagaggcagtggcaggggccctggctttatactgcttctttaggcccaggcctgggctcctggcaggtggggccagcccagccccagtaacagtggcagctgaaggacttccaatctccaaggctgccgtctggccacaggtgtagaaaggcttccatctgtcctggatctcgccgggcacagcgcccgtggccatggcaccgctggtgactgcaggccatcgctgccctggtcacattgatcacataggggcccaaggtgtccaccaggtagtcatggagatgccagcactcctcctgaggagaagggaagatatgtgtcaatatgcctgctctataatcttgacatggccgtcccccaccctgggaccccagcatgtgctacatggcaggctcaaaggggcaatgatcacctcagagctggagaggctcaggtccccccagagcaccacgccggctgcccctagtgctgcactcacaccaatggactgcacaaggtcatcctggaggcagagagctgctaagccagtgctgggctggccagatccatgtgggcacacatccacattcaagaaactcttctggttcactgtcacaatctgattctaactctacagtagggactctctagtttggtttggttttagaggcggggttttactctgtcatccaggctggagtgcagtggcatgatcatagctcactgcagccttgaactcctgggatcaagtaatcctcccacctcagcctcccaagcagctgggactacaggtgcataacacctggctaataattttttaggctgggcacagtggctcacacctgtaatcccacactttgggaggcaaaagcgggagaatcacttgagcccaggagttcaataccagcctgggcaacatgacaaaaccccatctctacaaaaatataaaaattagctgggtgtggtggtatgcatctgtagtccagctattcgggaggaggcttaggtgggaggatcactagaaccaggaagtgaaggccgcagtgagctgagatggtgccactgcactccagcctgggcaacagagcaagactctgtctcaaatgtttttttggtagaggttggggtctcactatgttgcccaggctggtctcgaactcttggcctcaaggaatccttccatctcaggctcccaaagtactgggattataggtgtgagacactcacccagcccaagtagggcccctttgtatcgagtctctgagtggcttctcaggccttccactcagaatatctcccctcaggccagcactccaaaggctgggcctccctacccctcaacatcttccagggcaaagccatgcctccctcatcagatgctccaggacagggccttcc

SEQ ID NO: 315786 - DNA, 4001 bp, Homo sapiens
tctggtaaaaacaggaagagctgagcacactaggccaaattcctgcatggtggtaattggcaggagctgagcagcagctgccccttttaggccgagcatgagctctgcagtttgccacactctattactctgacattgaagccaaatgttcagttgccagctatcatcagcttgtgctataggtacgtttataataaagttaaaagtaaaatgattttttaaaactcaaatctctattaaaagtacaaatgaaagattcactgatacggctgtgtttcaagaaaaatggggtacagaatacaagactattcctagggaaaacatacaattcctagtgttgaagatgcaaataaacatctcccatttatgttacctgcctgtctcctgcagacatttgagtttgccacgtctgtaacataaggaaaaattaatgtagtggctgagagcgttgacgttggagtgaggaagacctgagcttgaaagctggttccacccctcactgtgtgacgctggcaaattatccaccctctctgggcttcagtttcctcatacataaaatagaggaaattatagtacctaccttagagagtggtgaagacacaacgagataaaggatatgaagtgcttagccagcacctggcacatagtgtcagctaccactagtgccgaacacaaaagagaggacccgtctccaacgtgagccttgaaggatgttcaggatttccgtgtgagatgaggagagacggcatgctttacacagagaaagatctcagaagggacagaaccaaagacaagtaacctgctccagtggccagaacagaggcttcacaacaatgctgaatgattttcaaagtcaggccaagacctatcccataagtaagaatatgacaaaacagactgctatgttatagatttaggcgataacaatggaataggacattaaataactgaatcaaaaggtgacaaagtcattccccttcagttctttttcagacttcccaattaggagagcttgtgtttggtgctcattttgagcacctttctgatcatacctgcccatctccagttttagagaaacgagatctcaggtttaaaggctccctagcaacaatagctagctacagcttgttcagttttgtttctccctactttaagttttacttttacacttagagcaagcgacgctgattttatcttaacatttagagcaagtgacactggttttcataaatggagtaataaagtttccttgtaaaatgtgaaatcataattaaaataaatgagacaatttagagaaaaacgtcaagaaaacaagagtatgggtactatgtggatgtggcaagaactgtgaagcttgagcagcttcgtgctgtctcgtgggtgtgagatgaatccaaggcagcgacagggccagaccgtgagggaagagccgcctccacccgccaccacctcaggcgcggcacctccctttgccgctctccaaccctcgggagtttctccaaccgccaaggggcgggagggcgaccctgcagtctcccaggccggggttcagtgccctcggcccaggcagcaagcccgctgcccccctcaaacacgctgcagcggctcgcgcactccccgcgaggactcgacctcctgctcttcgcgaaccgccccgctcctcaccagtgctcggctttatctctccacgtcaacacggccctcatcacggcttcccttacggctcgggctcctcctacccgcctcagcgtctgtctcagcaaccgcctcactaacggtcgccactccacaagccactttggctacctgcgttacccctggcaacgtacatgcgcggtaagctgagtgcgagggcgccttgctccgagcgcgcatgtccgaaagggaaagccagaaaagcagcaaaagcaatggtggcactggagcccctaaggcgccagcgcaaccagagcgcgagcgattggtcggggcgtgtgggggcggtgcgtcttcctcgagaatggatttgattggtggagcgtggaaatggcggctgtagccgagggggcggccggaaagcagcggcggcgtctggggcgctttcgcaacattcagacctcggttgcagcccggtgccgtgagctgaagaggtttcacatcttactccgccccacaccctgggcgttgcggcgctgggctcgttgctgcagccggaccctgctcgatgggcacgactgggctggagagtctgagtctgggggaccgcggagctgcccccaccgtcacctctagtgagcgcctagtcccagacccgccgaatgacctccggtaagttactgtccccttttgggcctcagtttcaccacctgtaaaatggtatcgggagagtggacagtgtgtgggcctttctaacctttgacagagggtcggcagaaacctcgaagcccacgggtttagttactagggtctggagcccaggtgctcttcctgtgcgatcagccctggggtgcgctcgacttcctcatctaagatgactagggagactgggggggagccgggaggttttgtgaaagaggtccccttggggttggaggatcctaggaagtcattagactacgtgtgtgataggaggttaagatttacctacttttttcaaaatttaatactaagaactactttgaaagaggcatcaccttctttttacagagtcttttaccgagactttgagatgttaagtaacttgctgctaaacttacagctggtagagctggaatttgagccccagtctcttaagagtttgtgctgattccaccaggcttcagtatttttatctctaaaattgtaaacaatatcatttcataagatccatccagctcctcaaaattattttaccccaaattacatcagaaaaccttgattctaattctagttcttgcagtttccctatttgtagaaaagaacttgggttaaatgatctctctagacccatccaccttttacaatctgtggtttagtgattaggatacactttactgaaattttttttttaattttaaaagtatgttttcatcatagaagacacattggaactttaatgaagttttagtttagtgggtttttttttgagatgaggtctcgctctgtcacccaggctggagtgcagtggcacaatcatagctccctgaagccttgacctgccggacttaagcagtcctcctaccccggcctccttagtagctgggaccacaggtatgctccaccacgcccggttgcttgtttttttttgtttttttgggttttttttttcattttttgcaaagacgaggatctcactgtgctctccaggctggtctcaaactcttgggatcaggtgatcttcccacttcctcctcccaaagtgctagcattacaggaatgagccaccttgccttgccagcttttttcaataacagtatgggggagaagtattagaccaagatttggtagacttgggttctcgtgtctgttctgcaagtaatttaacctgtcactcaattttatcaataaattgagagtaaaccttattgtacctacaaggttaccatgaggatcaagaatgaagaagattcaaaaattctgtatcaaattatttaccttctggaggattacatctgatgaaagtgatacacactctctcccagaaattttacattatgtaaaacttttacctcatttatttgcagagaagacagtgtaactcactgatttatttaagcattttctggtgcttaagagcttagctattggttcatattctcaaatttatggtaagtgcccccagaaatctttataatagccctactcagtgattaatccgaaaagtttctagcttgacttttttgttgtgcagagatttccaacaccttttaacctgtgctagaggatatgggaagcttttggaagacaggaaaatactcccatagcacaagactggtccacactgactttaatctccctcattttaatatggataatctatgtgg

SEQ ID NO: 315787 - DNA, 4001 bp, Homo sapiens
cccaccaaaaagtcatcttttccttatcggcagataactcttctagggcagaggaatgaacaccaatagatactgtaaacctaggacagtggttcccaaacattagtgtccatcagaatcatctggaaggcttactgaaacagatgctaggccccatccctataattactgaaaaggtagacctgggaaagggcctgaggaatttcatttctagtaagttcccaggtgatgctgatgctgttggtctggtgatcacattttgagaaccattggactaggatatccccacacaaatccatgattcaaagtatcctgctgaacccctgaggacacagtgcaagagatgacatcaacagaaccttaaggacattttgttttcattttaaaaatatacttggaaaaaaatgcatttttattaacataggaaatgttggttgtctatattatcctgatcaattcactttaagtaataatcccaggactaccttttctaacatggatcaagcaacactactttttcctttatcttttctccgaccatggactaatttaatatgaacagtttatatcaagcctacatatctttcaattcaagttattggaagacagcagtggaatgagattaaaactatcaagggaaattatttgagcctggctgtagacattaagtactatagattcttaatactgattgccttttatggaataaaatatacaaatgtaagtattaaagtgaaagaaaagctataaaactgatttatctggctactgctaagctacagtgatttgaggagaaggtcctagctgaccactaccctcagcaagtaatggcattgctttcaggatatgttggacttttcccccaccggaacaagggtaaaactttaggttctatgatagggggacaattcaatagttgtcattcgtcttttccacttttcagtttctgagagtatggttattacaaaggcagaagtcttttaaaccatagcaagtagttaacaagtttactaaccgcatttaaagtgctccttaacaggatcctaagtacccacggtccccagttgtatgaacagggtcttaaacaacaacaaaaaaccccaaactagaaaaaaagccttaagtgataatggcattcctctctggaggcgaattttggacggtcttataatttttctagacatttacttgtgtttttctgagttttcttcaatgagtatttgtttcatctttacaatcagaaaatatagtttgtgttttctggtaatgcgtgtgtgttggaaaaaaacaggcaagctgtcttccgatcctttctgccgttccaaaacttatttattctctctacaaaaataccaagtcagggctgcgtgagctccacggacctcccgggagtttggggtgaagtgcccttccctggctaggaagacggaggcaaggaattgctaacccgctctcacgaaactggttcccagcaggaccaaggagggcatctccctgggggctagcaggcacccgggcgctcggggacgccggcacccacctggacggggccttcaggttgctcttccggaggaactcctcctcgtagcggagcagcttcagcttctccaccaagtcctccatcaccacgaacatgtggtaggccgcgccgggcccccgctccaagaccacttccccggtcccttcgccacgggacctaggcaccccatcttccaaacccgacgtcgtgacgacggccagagcagcagtcatcgcagaacggacagagtccagcgtgggctcaggcccacagacctctgcggcctaagccgccagccctgccgccgccagtacagccacgaccggttaccaggcgaccaccggacaatccgtcaccagggaaactagactccgcctccttccctccaatcagggcggctttcctgaatgacgtcacctgtggccctcttcttgccctgcctctgtggaaatggtggtcgggaagcagccccgcccctcatggaggcgtggcgttcgcgccccactgccggctgcgtcttctccctcgctgaaagtctgaagggagccggcttacgtttctgctccgcttgcctagtgagtcttgagctggcttgaggtgtgttggacctggtggttgctaaaagcaattaagcgggcatctgggtcagctagtagctgttaaaaagattaaagggaggtgaagacgtgtagcactgaaggctgcactggctcactgatacctttattttctcagaattgaaaagtttttcatagttgtaaagatagtcaataccataggtttcacttttactgcaggaactttccaacgagaggtttctctcgttctttctttaattttatctttctctcactaggcaatgctgcacttaacagtatattgtaaagcttgaagtactgtattacgttgcctggctgttactccagtgctaggaaagtggttggaaggatgaggaagacaatgaacaaaaggaggcatttggaaggatttgttttacttcaaaaacaagaatactaagcttccatcctgctgcttaatctgtttcaaacccattacatgtagtataaagtgtttgggtacttcgttaaatccaacagaatagagatggtcttaaaaggaatttccctgccctaaagctctaagggtggctaaagatagggtgttactactgtattctgcagttattgacctagaaaatttaagaaaaggtacataactgaccacagaaatggcccagctttacagttttcaaaaggcttctgtattaggcaattttcttaacagttgcaaaaaatgaggtaagtggtggatgcctggcagtttttgggaagaaaacttagtacaagagattgaacatatgttcatgtttataacgtgacttttaagggctctctgatctcttgtatctgccactacaaaatatagaagggctacatttttggacaactgaaatttgaaatgtatctacaatatcctgtttttattagaaaaaatgagaacacttttcattgtaatccgtctacagctaacttgtttctgatactaataaggttatcaaagtgaaaagtcagaagggcaaataccattttttcattaaagaaaggaagtacataaaattacagacttatgtagagaataacctgaagggcagcccactgagaattgctttttaaataaataacattgcttgcctaccacaagtcatgagccagctgcttttaataaagttgagtgagaaaattggatttgatgttaccccactaccaaattgatctttcctggtctttgcctttttgaaacagtgattctccccgataagtccataccccaaccaccaccacatgtgcagcttgggggtgttatatgtatgtataacagtcacagtagtgtaagatagatgtatggctttataagactgaaaaatgaaagcttagatatgttttggggtcctaagttaactaacaagcaaactggggctttttacatgactctgaaaaagctctcagactttggaagtaaatttattacactcagggagggagatgttcctgccaggcatgctgcctacttaagatgttctgacattttcaggaagttacgtaacacagtatgaaatagtcaaacgttgctttttagctgataaatcctccagcaacgtatgtattttaacttgggggaaacaaaacgactcccagggtcttagccatttccttcccaggtaaaatactgacacagcctggcctgaaagcagtatacagaataatttccccccttaattgtgaagaagaaaaaaacccaaaaatataaagtatttccagtaattgtggcacaaagagaacaaaaaagctaactgttcaatactgcatgtttccccaataaaaagttttagaaagaacactgaaatttcattgttttgtaaagcccagggattatttttgctgattccttgtttacctgtaatagtttgtaacacatcaaaaga

SEQ ID NO: 315788 - DNA, 4001 bp, Homo sapiens
agtatgatgagacaggtattatatgctagtttcataaataaatactctcaagattgacaaactgaggaaactgtcaagcatatacctaaaaaatgatggaacttgggattctgttttctatattacatctttccactacattgtgctctgttgccccaaatacaccactcaatttggtctatacttttttttttttttttttttttgagacgcagtttcgctcttgttgcccaggctgtagtgcaacggcactatctcggctcaccgcaacctccgcctcccgggttcaagagattctcctgtctcagcctccctagtagctgggattacaggcatgcgccaccatgccctgctaattttttatttttagtagagacggggtttgtccatgttggtcaggctggtctcgaactcccaacctcaggtgatccgcatagttgatacctccccaactcaggttttgtagtgttttacaacctttggaaatgcaaaaattccagaagccctcaaagataatccttatatcttcttggtatgcttaccagccaaaaaactttttttcattaaggtttattttctgtagcttgttttatgaaaacaacaattcgtttttaacttcaaacataaagatatatcacgatattgagtctacgcttatgcaatacacaccagtctcccaacctcaccaaattcttacaattggttgggaggggggtggctctccacacctttttgagaatcactgaacctgacttcatgctcttccagggaagaaccataatgtatttagagtgatcatgtaaattcattcaaaagggagatttaatggtgatttaacatgccagaccctaagtaagcaaaagttaaagaaaaaaaaaggaggctagtagttctcaatgtcaagtacttaagagttgttgcatgaatactggagatagtcaaatgagccagtggctctttaacaatatagggaattaggagcaagtatgagattctgattataaagttgtaggaaaactaacttcccagaaaaatgcacatagaattatgtatacaatgtcaggcgagttatgaactctgaagcccaatcacctaccaccagatccacagacctcaggttaaaaacccactaaaactaagttctcggggaacaggaatcgccaaacttgcttactaattctaattatgccttacccagggcaatgtatacaaacactacttagggaatatttgctgatcgataatttcctcataaaaataaccataacactggcgagtcgttttttccactaaagagccttttagtcaaattattttaaaagtcctaaacctttcactagtaacaccaatgatctcgaaaatcattattgcgctattcacatgtcgactaagctatcacgaatccaggtcttccagttgtctctctactcccttaaaatttagggcttcctccttcgcatcccaaaagctacacccggagccccgctgccgccagggagacagaaaatgatgctccacgaagcacacagcttcaaaacaggaaagatgggatccagtgatggctacaacttccaaacccttttctcaccaggtccagaggtgaagggatttacctcaagttccaggaaagcggtggcgattgctctcaaatacctggtacctccccgtcaccatagtgacttctaagagttacgctcccttcctcttcccgcgatacttctacgcggcacgtcatccgagtgggcccgagaccccgcctctcggcgagcccgccctcttctgaagaggcgtttctggaccactgagccccgcctcccactgtgagcggaaccctaccgtttttaaaaaaatctttttcaaaacttgccaggttgtctttccaaatatttttaataatagtgctgctgctgtagaccacagagaaaagaatccctcgctcttccttttcacttagtagaaacttctaccgcgtaggtcccgccaggagttcgcgcatgcgcaggagcgacaataagatggcggtgataatcgccgcactttttttcaaattagtggatcccagaaatcattgcgcgcatttgtaacgaatttccgttcgagtttgtattttaggcgccattttcgagtgaaggacccggagccgaaacaccggtaggagcggggaggtgggtactacacaaccgtctccagccttggtctgagtggactgtcctgcaggtaaagtacttctcttcctggtcaggttgtcacgctcttacttcctgccttgtccgcgagcgcctggaaaatagaggccttgagcccgagcggcgaagtccgggcttgaagctgccgctgggagatttctcttgctgtcacccctcccccctcggccgctccccggcggcccgggctcccgcgcgcagctcccgggcgccacttttccaagctactcaaatgtctcggggaggccctgagcctcgcagatcttttctttaaaaaatcctagtctctatctggaaaagggcgtctccccctacccctcttccttctgccaacggactagtcaccgggtctcagccttcgctggtgacctttcatggtttactgtccaacgggactccgcctggggagctggagagacaaactcttgccactccaaaattagcaagcgctgccagcgtccgacttgaagttgctagtggttagtcccagccttcgcccttcgcggtccgaccgctgagaggagggagacttcgttatgccccgggccgtcaacggcgccaggagctaaagggcgggcagacgaaagcgggcggcgagtcgccagttagtcttcaccgctctggagagagttgctagccacgggatcctgacccggacacgaactcgtttctccacgtcggtgcgcgcttgcatccctggccccgaaagcgtgggaatgtccggaaatgctggcgtatgggagttccttaattagaaatgcgttagcgaatattatacgcttatactatgggcggacgggtggagagccttaaaaacaacaacaacaaactaagcagttgctcaatcgttgattgatcctcaggcacgtctagattttcccacttacataggtcttgttaagaaaccagtcctgccttcttgccactcgtgtctttcgatggctcccttcccgaagtcccgctgcctctaagcggagtgttaagcggggctctcggaagccggtggaccgagatttccccgggtggggcgggcgcggtgtagcggcccgcgggctgacttgctcccggctgtcccccggccccagcgaccatgccccgtaaaggcacccagccctccactgcccggcgcagagaggaagggccgccgccgccgtcccctgacggcgccagcagcgacgcggagcctgagccgccgtccggccgcacggagagcccagccaccgccgcaggtgagtgacccgccgcgactcggcgggaacgcgcgctgtgggactggcaggcaaacgcgcccagcccgaggctggctggggttgttgagcgcggagttgacatctgaaggtccggtgtcggtccggtagaggctcaggaaagccatttggcaactttgagataggattcccgtgcaattttggtgtaacggcgctggaagggatgggggcgagcaaacgggttcagttgtgaatttttgtttgtgacctgtggaatggtacaggtcacaaacaaaaattcaatatctttattgtattcccgctaaaatcgagacggtcaatcaagagagcaagtggacttttttcccagagacaatcaatatgactatgtgagcatgatgaaaagttttttgaccctaacctcacctccgtggtgttagattgccgttaaagagaagacgataatttatttgaagccactgtagcttttgtgagtccaggagttgggtgacattattaaaccctcgtggcagtgtcgctgaagttcatgagtttccaaaatgaaggttccaggtgctcagcggtacgg

SEQ ID NO: 315789 - DNA, 4001 bp, Homo sapiens
aatcttaatgaataattcacagatgcagattataaggtataagtaaaatagggtcaaatggtttcaagattctaaatgtattttccattttatgactggtatttttttctatataaaagaaaataagcatctattaaaagaattgtaaaaatggaaagcaagaaagaaatccagatgccaaaaggtgggggagaaaagatctgaccacatgaaaatttaaaacttgtgttatacaatattctatacacaaagccaaaaggtatacaaaagagacttagtagatcaaaaggtatcaaagaatctacactgaactgttgggggataggtagggagcaaagggaactatacttttttctttatatatgtctgtatcatgtaagttattaaaataagcatgtattcttttgctaaggaaaaaataatcaagtgtcaaaacaagactgaaatctaacagtaggctatccttttcaatcacatattatcataacaattcacctaggaaagaacttatggtttaacagctgaaactaaaatcttaccaaactttttttaaatttttcattttatttcttcacttatttttaattgacaataccaaactttcctacattaaaattaggaaataattcaattataatttacttcacttataagatgcatagtgctggatgagatatgatccctcaaatttttactttatttaacccattttttcagctctaatttatcagaagaatttctatgtaagctgagatgctcaagtagccctcacttcctccatcaggacagggtgattaccctagcagaattgtgtacctaaaaggcatttcagtttgttatttacaaaggatgttttctcttgctacgtctggatttctatattgccagattattcctggttgagttgtttgttcttattgttatgatataatccttttatttccttcttttctcaccaatacttttactgtcttatctgagcaataatacaattgctttttctaaggaaatgcagacaatgcgcctaattattctaggatgttccaagattttttaatacttcaaaatacaatagattaagcagaaaccaaaaagataaagagagattatagaaagatcttaagagtctgcacaaaaaggtaataaagagacaccagaatactcaaaactcaaaacacaatctaaacaaaaggacaacagaccattcctgaaaaaactgttgtattattattgctgtcgcctaaacaatgttaggtaaaacctaaaatgggagaagcttaggtaaaacctagaaaggaagaaaactcacacaaacaaatatgtacacatctcaaaccaaaaatcattagcttatccttatataaattgctataagtacatgccagacgtccatgacattatcttcaaactcacaggtcaactaaaattatcgtagaaatgagaagactgccagatcaagaaagtctaaaaacattgttattctttggcttgaaaggtaaaggcagacagtagacatggtcaaaatctataaaattgtgtatggtgtgaactcttgaaagcacattttttttgaaaagacagtaaaaactatttaagggggaataaaaataattacatcttcacttaatagttaaataagcaaacaagataatataaatgaaaacacctaccaatttaaaatgtctgaccaaatgtttaaatcagtgctttcctagttctgatgaaggaccagatttttctttatttcgaatccattgcatatggatatttcgtaagatacaataaaaataaaatattagaaaaattggacattataacaatgtcaaattgctacaaaaatttctcagcccttactttcaatttatttacctattctttcacagacctgcaataaagtctacaaaggatactttgagcagaattagtctaaatgtctaagaatgatgatagtggggcctgtcatatctccttgacacataactggggactcttgctgacaaaatatagggtcatgtgtttgagaaaatattattaattgccaccttcccatgtgaaataatgaggatctgactgctcagatttccccaacttgtccttcactttatcatgaatgtaaagaaatagagcacagtggaatgaatacatgctagatcacactagcaaagaaacagtttggtttaaaaaatgcttcattttggccaggcgcggtggctcatgcctgtaatcccagcactttgggaggctggggcgggtggatcacctgaggtcgagagttcgagaccagcctggccaacatggtgaaaccccgtctctactaaaaatacaaaaattagccgggcatgttggcgggtgcctataatctgagctgctcaggaggctgaggcaggagaatcacttgaacccaggaggtagagggttgcagtgagttgagatcacaccactgtactccagcctgggtgacagagtgagactctgtctcaaaaaaaaaaaaaaaaagcttctttttaagatcctactaaagtaaacaaaaactgctttttaagtatttaagtatagtacttaagtagagtaagaaaaacgtcagtaagaattttaaaataagatttatagcaaacggttcactttggagaattacttacaacacatgatcttaaatactttaaaacaatttaggtaaacagccactaaaggaatgaaaaaaaaaatctattcttcaactaggatataaaatagagaaacttttaacaatactataattaagaaaatccaataagatttataagcattaaaaggatatgctttggttcttttaaaagagatatctttagtctcatgactccacttccagcaaaaatttaagatgccacttgattgtatttactgtaaaaataaaaggagagaaaatataaagtcagcattaaaaacaaatgtacgtatacaaacacaaaaggcaaacaaaacatcattgcaccccaacgagcaccttcagtccttctgacatcaagtacatggaaagagaaaaaaaactagtgggtgtgccaatcctaacaagggatgacggagagctttgggctgaaccccaggagtcctctaaacctgcctgagacagatctacgcagaacaccactaggtaaatctggtcaggtaaagaatttccatgtcctgaggccaaataaaaagattccacaaactgggaactcttcaattgcaaatcaattttggtcctgtctattggatacaaatatccaaggtgtgattgagggctaagctacaattctagaatccatgtggaaaaatacaacatcataaaactagtggcccaatctggggttgacattctgcagtggggcagatacactgcccaacagttacggttaccacagtgacaatgtgaaaaataggtgacttatttaaggaagaggtaataaattgcttataaaagttatgtaaaaatcacagtgtaattgccacataaaaacttaggaaaagaagaataacattccccaaacagccatatcatcaaaagacacaaatcattgctatgaatatagttgttgtataaaaaaaagagaaatcaagaaaatgctaaattgtctgagtccgatttacatttacagaattctgagtaacatcactaacctaactaggcaaatgtaaatcaaatgaaagtgtaattaaagggaaaaaatcctctttactaagttgaaaattactgctaactacatcaaaggaggtactgactatagataagaattcagtaggcctctcttagataatttctcattctcatgaatccaagaacctttagatcagcaagctactaaataaagctgtatttcaaagcactcttttcacttctttctcttccagttctcttaaggtgatttctgttgaacttcaaaagtatgaaactatgtggagcacagccagagctagaatacaacgtctcccaggcacacttcttaagttcacttttttggtctttaggagttctccacctt

SEQ ID NO: 315790 - DNA, 4001 bp, Homo sapiens
aaacaaaagcccctttaaaaactaccaagagcacgttttttaaagctgtgtgtacgttttttacttatacgtaaggccaatcgcaaaaaaaaaactaagcaaagtatatttaccttagctttttagagactgagtaatcaacttccatgattttcccatgcaattccactttacctttaaaacagaaattaaagcactcagaaccttgcttagatcaagcccgcgggggtctagggggggcacgcacggaactccacgctcgggctccgccttcgggcgcccccaaggggtctcctacccggatcgagctgggcgaacttggttcccagtagaaagaaaggtgggcgccccgtgtctcgggacaaggcgaggagggtgcgagcccgggtcggaccccaggtatagccgtgggtggcattaccggaaaaacaaatttaataaagagcggcgccaatttgaaaggatgagctcatttgaaactcaagctgcagggctggcgcggccccgctgctctcccggcccccacctctccattccgctaatccggggcccgaaggctccaccgggctcccctccctgccctctcctcccggtggccccgagaaaacgagccgaagccccccggagtccgccgcagcgacagccctgtccctgcccgctcctgggtgtcaccttggcctcgccgccgccccgcccccactccacacgccggtggggaaggggctcccgccgggccggggttcggggggcgccggccggggcccgggggcccgcgcggctgggagcggagcgtgtgctggggagagttggggagtgcgcgcgcgcgagtgtgtgtgtgtgtcgctctccgtctcctgtctgggctccagcgcgctcgcgggccccccggtcgcctctttcccggttctcaaccctggcccccaccgagttgagacagggcacctcgtaaaaaggtgcttctggccgagcgggaggcggggggacgggcggcggaaagcccccagccccgagttcttctcaataaaatcggacaaaaaattcagagaaaaataggagcgcttgagagagcaagcgagaggggactgaggttcgggaaaggaccgaggggatgtgccgtcgtgcgagggctggggctgggggagccccgagatctcgaagggggtcaccagggtggcgccgagggggtgccaaaagtggggggccgtggggcgaggtggggagggggctcgaaaggagagtgcggctcaggagacgccagagggcgagaggttctgggcacgaggcactggaagagagaaggtccggccgggggaggaggaagagacgctggatttggggaaggggggaccctgacaaagggggtgacaggaaggtcaggggagaagtgagacaggggacgctcaaagggtggggggcggggaagctcagagcagcccggggcgccaggcgaacgaggggtgcccctaaggagccggcgagcctcgggagccttcggagcggcacggggggcgccccaaggctgcggccccgagggcgagggcagagtccagagctgtggggggaggggagcgggccgtcccaggagcgggccggcggcgagagttgagggtctggtgcgtggaagtgagcgtgcgggcgcgggagccgccgccgggcgccgcccgccggactcggcctccctcccggcgccgtcccggcctgagcggggcgaggcggggggagggggccgcgctgagtgctcacccgagagggtctcgatggcgcggatggcccagttctggtcggggtagtccacgaaggcgtagccggacttcagcaggacctgtcccgccaggggcagcttcctgtccccaaagagctgccggaggtcgtcggcggtgacggcggggctcaggttcccgatgtaaagcttgttcatcatccgtctcttccccgagagcccgcggctcccccggcccggtacccggcgctcctcgcctcctccgctgccctcgtctctcctcctcctccgccccccctccccgccctccgcccgcccgccacccacccccaccctcagcctggctccccccaccgcggccggcccggcccgcccgggggcagaggcggaggcggggactcggcgcggctgcctcctcggggcagagtcccgggccgggcggcggcgcgcggacaaagcgctctctctgcctccctctctctccctctcaaggcggtggcgggaggaggagcagcggcgggcggcggcagcgcaccccgcgtgtgtctgtgtgagagtttgtacgggcgtgtgcgcagccgagagggagcgagcgagcgccccctccccgccccgcgccgctgcgcccctcgcctcgcgcccaccgcgctcggcagtggctgctcgggctccggccccgcgccaggcgggcggaagcgggtcgcggccccgggctggggctccgggcgccggaaccccgggcgggcgcggcgccgaggccgggcgagcggcggggcggggaaggcgcgccccgggcgcgggtgggagcgcgcgagggggcgacggggagccgcgggcgtgggagggagaggggctgcgagtgagcgcggagaggggtgtgcgcaaggtggaccggatgtgagtgcgctgctgccagggcaagcgggaaggtgtgtcccggaggtgagaggcgagggcaggctgggagacaacaactttcgcagcgacttggccggggctggcgccctgcgcgttcccgggccgtgcgctcgctctgagacccgctccccgccacgctctctgaggtgaccgagcggcgcgtgtggtcgaaggatcgcgcgcgggagtcgggacgcctaggaccggggttggccgggccctcgcggaccgtgctcgcggggaagtggttcccggtcccgggcctcagtttcccgaccggggagggaaggcggaaggccagcgcggagtcacgtcctctccgcccagaccccgcgtgtccggaaccccgcggcaggcggcagcctgacgttggcagctgctctctattctgggaagtgccgagggcttcccgggcggcggcggcgaaagccaggtggcgggtggggaaacgaacgccgaggggccagggactgcggcgaggccggagcgctggggtcagcggccgggggacggatggtcgccgcccggctgcgcggccggttcagctccaaagccagggtggtgggaggcgagggtggctggaagcggaggagcgcaggctgtgtaggagttccccgagcactgggaagggcccggagaggaaagaggtccttccaagcggaggaaacaacgtgaccgacggaagaggcagggttgggatgagagcaggctggagccgaggggctcgggcaggagccagacaggctagagcgggctgcaagttccggggcccggctggaagcctgatggttagagcctggtcccagccaggaaatgaaattctacaggagggagaagaatggcgggattcagaggtgaggaggcagaagaagattccaagctctggacctctgggggccactgggagagttgaaggtttgatcgcggatatgttgggttttgtgaaggcgttggggcgcgggtgcggggagtgtccttgggtggagaagtcacgaatgtaggaatggaacaagttcgggtctcctgactgggtcgtgaagtagtattgtctttcccaagctttcctgttgatgagcggcgtggagagaatggggcttgctggattttgtattttccgcaagtactcccaggtgattctggtctggtaaacactgttggagtggaaggcctatctgccccggactcagaccttctctctgcccccatctttgtgccctgagatgttccagcattctcgagcctaagtttcttcatctataaggagataaaataaccagtcctcgcagggctgttgtgagggctacaagaaggataactgcctagcgtgttgagacatgggtggtcagacacttaatgcctgttt

SEQ ID NO: 315791 - DNA, 4001 bp, Homo sapiens
aaaaacaaaatgcttagaacatctcttactggtcatcttatacctggccataagtataaggaaacacatgaaaagcaccatttgacagctgcactacatatcacaaatcaccttttggaattaatgtttaggtgtttagccattaaacagttttataaattgttatattacaatttaaaatttttatgtatttggtgaattgaaaaaaagcaagcaaaccataaaatctattttgatgtataaatctcattggtttctaatatttaattaaatgatttaaaagcatcaaataaccagtcttttaaaaatgtaaactagaatttttaaccaatatcaccaagttcacttttttctgtattgcttctattttaactctaatacttatctctttgaggttacaatatgcaactctctagggtattacctagcaccatgtgaaaaaattactaacttttttttttcctgggaaactaaaagtttaactccaaagccaaatcaaaagtaaccttacagtttaatatatattctgtgttaatatatgttatatctacacatggaatctatgtaagtaaatgcaggtattaatttctaagtcaacaaattcttgaagtaggaaggtaccacacaattttaacctaataaaagtcatttctgtttctagaaaattaaaaattgatgcagcaaaagactgcagcagggagggcctgagattggatgtttttttcttctttttggtatttaattcaaccatacacaatgtagtacatacaagcaaaatacaattgagatactgttttctttaacattcctataggagaccaaattcatttgcattggagtgaacacaattactgatttttaactcatgaaagacaaattcatagctttttcctacactatctcatactattcacaccatctcagtgaaagaatgtctagaaccacttagttacttcctagaggtgggcagaaactgcatttttcaaagttttgtttctcacagaatcattcaacttgaggtacaaaagcacattcaagttagcatgtcttagttcaaaacaaggcatgcagtatgtgtgtgtgtgtatgtgtatatatacacatacacacacacacacacacacacacacacacacacacacataatttttaagttaaccttcaacaacaccaaaaatgaaatttctgtcaaggaagtttccaaaacttttaacagcattttaaagcttaccagttttttcctctttaataaacatttgaccatatgtactaccaagaaatattaatagagaaaaaaagattcaaacacttttattcaacagagcctgaaaccaacttacaaagagaaataaatgctttatgtgcggttgacattagaataatttgcatttaataagaataaaacatacgctgcaaaaagaaaagagttttctatttctaagtgaccctgagaaaataatggcatctagtctattatgctattataaaatgatgccagaatatttaacaaaagatacaactggtaagcaaatggcatgccaataatttcataagataaaaacatctcctcccaaactatcattaaccttaaaaaatctatttgagatacagataatcaaactaattcttgagaaatcaaagaaatcactacaatacaaagaaaatgcactcaattgttgaatgatttttaagtaagcaagcaatgaggatgaactattttcttcccattttcatttcaactaacacaaaaaccacatatagaattgacttaacactgccaaatttacttctaacttgttaatattcacagaaatgcaacacaagaacaccaaaatagtctccatataacataaaagctttggtttcaaatgtcacagtaccctggatttagaaagccatcaacgtggtagtgtccaggacatgagaacatacagctgcttcatccctgaagtctgatctcagtacacaataccggtcattagctatctctcccttagcctgcagtacaagtagctaatttctgcatttaaactaataaaggaaaggaaaaaaaaattaaaaccatccaatcagaaatgatgtaactcctctagagcagcagcttatgcatacatttggaatgttaaacattttcagtgtagtgaatcatacacagcgcattttaatctacctcctgggtatttcacatcgcccacatgttcaaagaaatcatcaactaatagggctgtataaatcctagattgctctttatttaacttatactaaaaactggggacatgccttcaattctgaactcttaaacagaacaaaattacttaaatgacactccggctaacagcaaataatctgcattttgaaagaaaaaagataaaaagtagtacatttgtgagaagttttaggagctgttaataactttagataaaccagtatttcacatataccacaaaattaaataatgcacactgcaacatgaaatgagacaccaactaagataaaattctagtaatttttttttttactaattataacccccaaaagtattcacaaccgcaaacagccaacagaattagacatttatagaaacatactgtatcaaatacttggggtagttatttcactgttcaatatattcattctgcaaattttcaagtgttgtgagatagtaatttatatttgttgtaaatagttaatatatcagaaagcttcaacttggatttctcaagcaaaaaatattattttaaagaaaagtatacaaatttagaataccttattgaaaaccaattggttacacgttacatctttcccaatagaggaaagaactagcttaatattacacatgaaactgcaaatcataactcaccttttttaaattaaaaaaaaaacaggatttaagtaattttctcatatgccacagagattatttgcaaacaaaagttattctgttgcttacttaaaataaaacatatctggaaatgtggcacacaatttttaaaaatcccttcagcaacacatctaagtatttataaaattagggtagtttgttttaaaatctactcaatcctgacaaaaatcaggtggttaaactattgactgataaactgtaaaggtggtcatcaaaaacttcattgaacagctccagtccagctacttaatgactaatggtgaagaaatgtatgtgaatgggatataaactaagtttcgacacacagcagaagaaaaaaatttagaatgagtaataaagggcccaaatttaaagtccacaataaactttaaacaaagatgttttctcttctcttctcatgttagcaaatcactgtggagaaatccaacctccacaaaacttgttactccgtcattaacaacagtgcacttaaatataactatagatttcacaagggtatttattttagccgcaaacatttcttacaagcaacaacaacaaaatgctcagaagctatactcagtagtctcagtgactgaaaaagtccggcttttaactgccatccaatccaaacaacccacttctttagaaagctatgcaaaatattgaccccttactgaattattttactattcaacattaaactatctaaaagagaaaagtaattaatcgctaagtttagttaagcaatttagctgacatagtaaatatttactcttcacatctcacaggaagtcttgacaagcatttgctgctattctgctgggggtaggggcgggaggtgggggtgggaggcaatttttgataaacaagttacagggtcccagcgaactgaacatagctggtgttcgccaccccgacccccaattaggcaccagatattttccaagaacagtaaacaccttatataatgaaagtaaaaaaaaaaaaagtagctttctaaactatgtatctccactaacaaaacaaacaaaagcccctttaaaaactaccaagagcacgttttttaaagctgtgtgtacgttttttacttatacgtaaggccaatcgcaaaaaaaaa

SEQ ID NO: 315792 - DNA, 4001 bp, Homo sapiens
atatttgagatatatatatatatacattttgagatatatatatatacacatacattttgaggtatatatatatatagagagagagaaatgaccacgattaactagcatgtccatcacctcatagttacctgtttttgtatgtgtgattagctttaaattgttgcaataaaaaaataaaattactaccagcttattgtcttctaagccatttgctgaaagatgaaattatctaattgaacaggtataatttagtgcaagtaagtatttctcagatggaattcaaatgaatctccgttacatagtaattttttaaaaaaaatcttaatgaagaggcacatgctagaaatatgggagttctagacaccatgacttccttgaccatttcacataccaagtaaactaattggatccacaaacatggtgattttgtaatatatataggtaaactcagttgctcagaaaagatgccagatgatactttctaaacagttattagtaacaaaacaattactgaatcatttggttagaaaattctactttggctgggcacagtggctcacacctgtaatcccagcattttgggaggccaatgtgggcagatcacttgagggcaggagtttgagactagcctggccaacatggcaaaaccccatctctactaaaaatacgaaaaattagctgagcatgatggcacatgcctgtgatcccagctactcgggaggctaaggcttgagaatcgcttgaacccaggaggctggggttgcagtgagccgagatcacaccactacactctagtctgggtgacaaaaatgaaactgttttagaaaaaaataaattttactttgttagaataccaacgcaaggttccttagaaggttgttgcagcatctgccctctatgggcagctgtacagtgactagtttttgcactagattgagctgtgtggaataccatttttctccagatgtacagtggctgcacagcctatcattaccaaatttaaccaccagatggcagatctttcctggtaaaactaaatctacttttttagaccagtggagactcaactggtgctaaaagtgctatcagggatacctatatgagaaaacgtctttcttatttttgggcaacatgggctaagcaggtagataaaacgagaggaaagtaaaaactgttttcatagcataagtgctaaccaagtcaaacagcctcaagtcatttctctctctcctattttctatttactttatatttttttgagacagggtgtcactctggagcccaggctagagtgcagtggtgagatcacggctcactgcagtctcaacctcccaggttcaagcaatccaccaacctcaacctctgagtagctgggactacagacacacaccactatgccctcctaatttttttattttttgtagagacagggtctcactgtgttgccaaggctggtctccaacttctgggttccagcgatcctcccgccttggtctcccaaagtgctggaatgacaggcgtgaaccaccacacccagtcatcaagtcactgttattctccagcaaaggtaagtatggaaagtattatagtaaaatattagagaaaatttttttttccccaagtatggaaggaagttctctggcatataaaccaaagtaaaatcaatacaaatacacctaaaggaagggaaactgccaggtgctttgcactggttgtttaatcttgaagtaattccctcactatacagctgaaaaattggtatttagagagatttagcaacttgccttaggtcacagggctggttctcaagccttacgctttccaccatgctatactggcattctttcctaatgctttctaaaagtattggttcttaaacttggctaaacattaaaacacttgtggagtttaaaataataatgatgtctgagtctcacctccagaatttgacttaatatgtgtgcagcatggcttgggcatcaggattcttagaattttccggattaaaggtttccatgtgcagcaaagaaccactgttctaactgggttctcaatgaagatccctcatcagctgcattagaattacatgggtcgagtttaagatgcatattccccggctttggtttcctgaaattctgcttcaataggtctcgccaaggatgtagaaacccactctttaaaaaacttcccagctaacataaataattaagtttgaacacaagtgtcaaattttagcaacaaaatcacctggagggcttttaagaacagattgcttattaaaacaaaatcagagctcctgattcaacaaattcccagacaatgctaatgctactggtagggggtcttcccttggagaaaaactggcttagagtgatatcccctgcacccaagatctgatgcaactggagattgtgacatataacagacagaactattgatgtttctttttataaactaatatttttgagagagataatttacttttgaaaatagaaggtttcccagagtggaagacagaattcttaataaagattaatgcagaggcatcttcagcctctccaaagcacaaaactcacatttcataactcagcatttaaaaattctaaatctaaacaaatttcaatttaatttaggtgatttttgatgacatttgaaaaacttgagaattaacatttacttttgaactaaagatcacaagttaaatttattagctgtattcagtatcaactcgtgtcattagaagaaaatcttcaactcctaagcatgagtacaaattcacatttactatgtgtaatttttttgcatggatgttttctattaatgaataaacagatatataagatggaaattctcatcctcattttttgtcctgtaatggaaaaccattgtgtaaagtcatgccacttgcaaaaaaaaacctcataagctataattattgatttttgaagatataatttatatagaaagccagctataaaatgaatattgaggccaggcacggtggctcatgcctgtaatcccagcactttgggaggctaaggcgggcagatcacgaggtcaggagatcaagaccatcctggctaacatggtgaaactccgtctctactaaaaatacaaaaaattagtcggatgtggtggcgggtgcctgtggtcccagctactcaggaggctgaggtaggagaatggcgtgaacctgggaggcggagcttgcagtgagcagagatcctgccactgcactccagcctgggcgacagtgcgagactccgtctcaaaaaatatatatattcatatgcctataacagaccagagaaagtgtgtatttgtatatatgtgtctcatcacatcagaatgcgggggccctgaatatgtttcacttggtggaggtcttaatattgtgactttcacaaagtgctttgtaattttaggaaagaaaaaattaagtactgattataatgaagtttaaaatgtcgaataggggactcagacgagtaaaataacggagtgtctctctctagaatctccactgcatcataaaaattcccttctctgttttgtttacagagagtgtgaatatatttatacaattactatttttttttttttttttgagacaaagtctcactctgttgcctaggctggagtgcagtggtgcaatctcggttcactgcaacctctgccttccaggttcaagcaattctcctgcctcaacctcccaagcagctgggattacaggcgcccggccaccatgcccggctaatttttttttttttgtacttttagtagagatagggtttcaccatgttggccgagctggtcctgaactcctgacctcaggtgatccatctgtctcggcctcccaaagtgctaggattacaggcgtgagccaccgtgcctgtcctacagttactattttaaaactgtgccaagtatggagataaatgagattttttaattctgcctaaaatataaaaaccctaagaagttgaccctttgagttaagc

SEQ ID NO: 315793 - DNA, 4001 bp, Homo sapiens
gaaccacattcaattcccagataaacatgactagaagtgtccttttaggattaaattttgaaggtttatcgtctctgggtattgattttttttctattagcttgaggtagtagaaaacttgcctcagagttcttattattctaatttatacacacagttccacagttaaaaatcagttaacattctccattgacgtctgcttctaatttacagaatgttgattttcgtattgtgtagagataggcagcctttgaaggtctatctcacaggtcccaccttacctctttaacctgccccctctctccatcagtctcacctgcaaggcctgcaaatctgagaaggtcttgtcagggattgtgtgaatgccattgctgtgaagcatgagtaactccagtttggtcaggccagaaaaatctgtttccatcaatctaaccaagctgttgtatctgaaataaaaaatgacattctaggcataagctaagtctgtcaactaaagttcaaatgtcataaccaaaataaacacaagaaaactcaatacctctctttataactgtactctattgagacaatcaaatgcttcaaaaactgaaattcaccagatgccacagaaggtcggctctctacccagttcttgccatttcagttacaatcacccccctcatattctgggaacttgtcacatttcttatcattttcaaacttttatatatatgctgttccctcaggttggaatgcccttgacctcacctttttctatttgtgaacacttaatatctagcccattctttcatgacactatctcctcaccactcccccaggtggaattcgtcagcagtggttaagaagcctgggctctggaggccaggcttgggcgtctcgtttgggtatgattacgagctcaggctcaacagagtagtggtacaaccctgggtaaaatcagcaggctttctgtgcctcagtttcctcatctataaaatgtaaataatagaactcactccaaaggggttatgaggattaaatggatgcagtgcttaacccaatgccagcacctactgagcacaaccttaatgttagctcttaatattagtgactgtctctaaaacactttgtatgctctattagtttttattaattgtactgaccgtacatttgtctggtctttttaacgatcaatacacatcctagaagtgaatagtatatcttaccattgtatccccagtgcatagtacatgctcactaatgtcaaataaacgatgctaagtccaacatgtgtattcagacacacacagacttttttttcatgaacgtttaaaatacagtcatatttttaaaaatttaattaggcatccattttaaataagtttgtatggaaagaaaccaaagggcctataaaaaggatacatatatatatatatgtatgtatgtgtgtgtgtgtgtgtattatataggcagacacttccagttaccctgtcatctcttatgatgaatgatcataaccccaatagttaacagaaactatatcattttccagcaaaaatgtagccagaaagaagctttttaccgtcatgagtctcccaacctaccaagagggacttcaaattctagaagaactttctcctaataaaagtttaccaggaaaagttttcttattgcccccaacaaacaaaattctcatgagctcatttcagaaaagaaatattgttaaaacaattgagattcatctcccaaagtcatagatgtttgagggacaagtcactgctgcgactgatccctctttgagaagaggaaacatgaggtctcacacaccctaaattgatgcgttccacattgggcgggatgctgtctgggatggaagtcaggtaccgaaatgtgcagtgtacctccgtaggcatataacaggcacagcggcgaggacaggccttgcccccaggggtggcgaccaggcagatcacagcaaaggagaccagcaagcaggtgattcctctgccttttaccttcatcctgaaaaaacatcatacctcagagttataaagagtggtggagcaaagtcccaggaccaccacacactcactctgggaatctgggagaccttctttaagggtcgtaagtggtcaattccattcctaccctttgtggtcatatgcactctttacaaaactatagtgtgtgctgctggcctcacactgcgctttatgatcaagtgggatatttactgttgtgaaaatttcttcacagcttctcacttctttatgaaaaccagcaatccctattactcaggcattcattaaaagggaaactggaaaccataagaaagattgtgacaactaaaatatatagaatttagtttcctttatatacattaattcttttagagtaactttcaagaaactgattataacagtaatatctgtgcataataaaacatttggaaactgtaattaagcagtaaaaaggaaaaaaattactcaatctcaccacttatataatccttaaacatgttgttgtattcctttccagcctttttcatctattgtgtgtatatgtataggtgtacatacatttacgtgtatatgtgtacatgtgatcaaactcaattttgtaacacattttatcatttcatatataatgttttttcattttattaaaccttcttcagaaacattttttaaaggttgtaataatccactggaagggagaataaatctctttctaaccggttttcaagtccctgccaaaaaaaaagacacattgaacacttcactgccaagtaatgaccataagcaacagcgactgaccagctgagagggcttgagccatgctgaccctgtgcaggcatgatgctgtctgcttttgctcagcttcggacatctctctgcctttttccttggtccctcctccagctcatggctgccacaggaggtggggagcataaccagggaagaaatatgctcagcttgtcagaaaaaaaaaaatggtatctgttacccatatgtggggcaagcccaggaattcaaacctaattctctcctgaaatgcaggattgaaataaactctttattgtgcttttccaagcaaaatgaccttcataatttgtaataaatcccaccgttctgtggaacagcatgatgttggattccaccagcaaccaccctttagctacaaactacactgagaaataacactggggctgaactgcttggattttcatacagataaaaagatgatggatgtattattataatttagtccaaattaaaatttaagataggattaatcatatgaccacttttgccatcgtaaccacctggttacaataattttaaataagctttgtatgattggagacagcatttccaccttatcattagataaacaaaggaaggaacagcaggatgaaggtaattctctcgttcagcttaaataaaagttctgggtatgcccacgttcaaattatttaaaagaggatcaatagcataagacaacacatgaataagggattctcacaaacgtaaggctgaaaatgtacataatgaaataggaattggcaatacctgagctcttctttcaggtcctgagtcctcttgtgacataggcagagacagaaaatcttcccaggaaatggaaaattgtgtccaaacctgagggaggaaaagttctctgctccaaagtgagcaaaaagccttattctttttggcttacagccaggagtaatgctcttcagggagacctggagccgcttccacagcttcaaagttctataactcataaccacattaacccagaagcgttcttttattatgatgcttgctgttgcagaaacaaaaggctaagtggaggtttttaaatttcctttctcctccctcagtagtgtacttaatactccttaaagttatcacttgaatattaactactactaatcactccattttgctccaaagtcccaagagcttctcctcaaattgtcttttttggacaaatctgtcacagatgtctccatctat

SEQ ID NO: 315794 - DNA, 4001 bp, Homo sapiens
acgggctgcagacactcacacgcgtctttgtattccaccaccacctttccccaccagatactcaaaagcacagagtgatggctctgtaaatatctgttgaacaatgaacactgtttttgaaagtggaaaatgcctctacataacaggttattgccaaaactgagaagtccttggaagtctttaaaaacatttttctatggcttgggaatagttttgctgaagaaaaaagaacaaatcagatgaccttgcaaggctgagtctgcgaattgtatcaactcttttaaagtactgcctaataattcaaaaacaaactatacacaaatgctatttacaaaaagaggagcatttattataatatacaactttaataatagaatgttctaccaaaaatttgagctgttcttgtaatattggtaatatttagagctgtgtccaaggattgcataaaaagccgatttactctcttatttcacacttaaaagtagtaggacagagagaaaaactggccatctcaaactagtaacagtacaagatacttggaagcacaagttcataacatggacatattgatgttattgtgtgcacatcatcactaaaaatatacctactgaactctagaaaagttaattttgatgataacagcttcattagtttctacggagaagacatacaaaaagttttcgtattctcttctcccctattcaatgaatctgcacaagttaagttggctagtattaggttacttcaaaatcagttcgaataaggccatgaaatgactggaaacatgctggtgtctccagaaaaaaaacagggttaaccacaaagttccaaaatcactgaacccgctttttaaataacatccttcagaaaaaaaatctcagtaaatctcagcaataaatgggacagaaaactggattccacaggagaatgcacacacaaaaacaaacagcactgcataggatgaaaatcaggatctaaattaatatgatggctattcaccgaaaatgtaagaaagattaagcagagattaaaagctaaatttataaacagatgttttaaaaaccgttaacaagaaatttaaagacatttatttattttgttctaatattgttatattctatgtattgttgagagccaacttaagtcctttggagatgaagctagagtgtaaataaattcttgttttcgattgtagtatagcacagtatacaattagttttaaaataaagatcattttcggccaaaacgtgtataggcttctaaaaggttacgttaaagctataaagttttccaaatgattttaaaagcacttctagttttcctagggccgcctagtaaagacaactggttctaaatacagtttctaactggaccagtgagtaagggagttcgttatctaaaaaggatcctgcattccgcagagcgcagcgaggtgagagtcagggcccggcctgggaccggaggtagccggacgagtttagttacctctctgacaaggaacacctgggctgcgcgggcggcagaagcagccgctgcaggtgcgcgcgagcctcggccgcagcaacgaacgccgcccctgagaaagttggactcccgaccctcggcaaagcaaggaggctctttgccgtccccaaacagcttcgccccgggcccgccgacccggcctggccccaccgggaagaaagggctggagctactcaccgtgcagagagaggagcagcaaaggcgccagaggggaacgctgagaagtcatcccggggccgcagggagcgcgcctgcctcctacccggctcccggtcgcaacaggagaggagcgggcgtgagtctccgcgctcttggggcagcctggtcctcccacacccagcgccgggccgctgttccccgcgcagagctgggactgtcagacccacagacgagccaagtgcagctgcagcgccgcccggctccgcggacgctgagctgtgaccagaggcgttccgggctcgccagccgtgccacccagccctgccccaggactagccgacccctcgcgcagtccggggagccactccccccaactcacgccccgctactccagccgcagctcggctcctcgccgcgccgcccactcgccccgcttggtctccagggcaaccgcggctccagcgcgacgcctggcggcccacccgcggagcagagcgcggcgcgcagctggcgcggcccccgccacctgtgcaccgcgccgcccgctcccccgcacgcctccaccagctccgggaaccgaggggtgggcgccctcctcgccggagttagggcccctcccttggtctaaacccctccgcaaacaggtggtgtcggcctgatgcatcctggagagctctagcaatgacttttccacagccttcctctgagcctgcaagagtctttcctgttgcagttttcggataatttatatttggctttttcactttcagtcctctcttataaaacctaaataatctgaaagaacctgactctggcagaattaggaattcctaattttacagtgttttggttttgcgctgtttcctggatgccttttcacctttcttccttgaaaagtggatagaggctggaccatgcccctaactccccattcctatcagagagactgccatcttctcttgccccttttgtaaaccttatgtcaacttctaatattttaagttttccagcttaaacgttagtgctttcttaaactgaccttaagtatacatgttaactagtggggtatgtacatttattgtaatcgttgtttagttgggttttttgtttttgcttcttgtttgtttgggttgggtggggagaaagactttcctagcatctgaaattgttttacttaaatatctacctacatcttttcttgtaaaacctatctttattctcttatactgggctctgctctttattgtacagctcatagtcacttcctgcttcagcctccaaactgagccttctaaatttgaggacatacctgcccaggggatgccaacccattttggtcagtttctacagcagcataaattagggttctcggagccattcagaaattgagccctcatctggcaaatacaatcctcccagggaaactcagaaacaaaaataatatgcacagaagaaaaatatgtaaaatattttttaaacatacatttggacaaggattggaagatatatgtaaaattaaaatatcaagatggtggagttatggatgtacttctttttgaaaatgtggatattatatttttaaggttaaaaaaatgaaacatgttaagaaatgttaataacttttaacaagaatatcctgaaaggataaattttgattatgaagtagagatgcctcaactttgctcactacttccaacttgctagaattccctaccagatctctaatggcaagaaataaatgatatgacagtagagtttttcatattaataacaaatttaaatttccaactatgatatcacgaggctcattctcattcttttaaactccagggtaaggactagagtttcttttttccatccaattcaatccctcaccctctcttgtacatattcctgcagtctaatccagtcctaagcagggtataagagtaagcaatataagaagaaaaacaaggaagcggtcaagtgataggagctactgagagcaactcttcatgtcaccataatcccagatataaatatagaggcagaatatttatcctttaaataaatatcctttaaataacctaataatctgagcttaaagctctgataaagcaagttatctgatatatttatcgcatcaatttaacaactatttaccaagtacctacactttgtaaggcaccaggtttaaggttaaaccaaaaaaaaaaaaatgacccctgaccccaaataagttccaattgcatatgggctatatctgtgctatcataaataagcagatagagttctgcctctttgtcacctaaggatacttctgccttgccaggcaagag

SEQ ID NO: 315795 - DNA, 4001 bp, Homo sapiens
accccactttttttgtgtgaaatagggtgtcactctgtggcccaggctgcagtgcagtggcacaatcatggctcagacagcctcaacctcctggtctcaagcaatcctcccacctcagcccaccagtagctgggaccacaggtgcacaccaccacacccggctgattttttgtgtttctcactttgaataatgagtagaaccctagacagaaggccagtaagaaaatataggacttgaacaacactattgaccaattagacctaacgcatatgaagaacattccacccaacaaaagcaaatacacattctttccatggaatattctccaggataaaccatatggtaggccacaaaacaagccttaatatattttaaaagattgaaaccatacaatgtatcttctctgaacacagcagaatgaagctagaaatcaataagagaaggaaaactggaaaattcatacatatttggaaactagacaacatacttttaaacaaccaatgtgtcaaagaaaaaaaaatcacagaaaatgagaaaatatcttcagatgaatgaaaacataacaccaaacacttgagagatgcagcaaaagcatcagctcagagggaaatttgtaactataaaacagctacatttaaaaaaaagatctcaaattgataaatcatcattttgtaaaatatatacatacctatagatatagacacatagatttgcatgggggtatttccagaaggataaacatcaaaatgtcaatacaggttatctcttgagtgtttgggaatttttttctttacgctttcttttttatatttctatgattattacatttaagttataaaatggaaaaataaatctccaaaaccaatagcactttgaagctacaagccatagcccaagacctattttactctaaacacagtatccaatggtgtcatgcatttttaaataaataaggtagataattcataaagtgacattcaacaagcacttcttgagcacctattatgttctaggcactgttacataaatgactttacttcagtgtgcttagattcccctttccattcctaagtatggtgtcaagtgtatccactctcctttgtcacaagtatttgaatttggattttaagtctcatttctaattgtttaatgcagttaaatccctactaaaggaatatctggcatcacactaccaacccttggcctgcctcagtgatttcaggctttgcaaggtcaaagtaatttgtctcatcaatcaccacctctgtactggcctactcctgaaagtagacagcctactgactctgaggtgcattcttaaggttgattgcaaagtgggaggaccaaatctcaaaaactgggccccactggccaacactatcaaatacaaattctccacttgctaaatattccttctggtatctttctcccactttccttactcccttcctttctggaactctgatttggcctccttctaactcgcctctctgctgtaagaccactagatggtgcagttttagaacccattctcactggatcttctctcctctctctggctctcccgccacagatcacatgtctaatccagcaagaaaacaccttggggcaggagtttccactgccaagacagctatacccaaaggggatggcaatagcaacaacctctgttcagttttgtggtcctcgtgcagctggttgtgtgttcatctgttgacatttggaggtgcggtgggggatgttaatcagaggagcagtacctgagagagggcctctttctcacacactgcggagaacctctgtgaacaaggaagagggtaacactctaggtggcgatgcacggagccccgtggcctggttgctcggcagggtgaggagaagctgtaactgccagagcctgagaatcgccccttctcaggacatggcgtactccctgcgctcgcctgcacactgcagggtcagctgactgccgtccctccacttacaacagcgggacggccactctccctgacgcacgcagtgacccgaacaaagcccgtgggaatcatggggcgttcctggagggtcgcctagacgacccagcccaaccccacccacagtgcctggcaacctagaccagtcagggacgcggcaggaaatggaagagcctccgcaagaggctctggctgaacccttgaaacatgaaagcccagccgctccctcaagtgctggccacactaagggccaggaagaagacgaccagaagaaccaggccgaaaggaaggcagataaccacactgctcacagaatagctgaccagactgccctaagagtgcctagccaggctgaatccagcatatttagccaagctaccaacggagtagctgaacaaaatgggcatagtacacctggtcaggctggccgcagagcatccaaccctgctgatgtttctgaccttagagcagatgatcaggttaatcaaacaccgtctgaacagactaaaggcaaggcatctagccaagctaataatgtacagcatgaacagagtgatggtcaggtgtctggcctgacggaggaaagaactgctgaacagactgaacgaagattacctacccaggctgagagaagaacttctgggcagattgatggtagactggctatgccatctgaccagagaggttccagacagaccgaccacagaatggcaggccagtctgagagaagagcttccgagcagatggaccgcagaatgtctggcgaggctgagcgaagaacttctgagcagattacacacagattatccaaactatctgagagaagaccttctgtgcagattgacagtgggtcatccgtcccatctgaccaaagtccttctgtacagattgacagtggatcgtccgtaccatctgaccaaagaccttccgtacagattgaccgcagaatgtcagggaaagttaggagaagaagttctgagaagactgactacagattggctggcctggctgacccaggaacttctgagcagactgacctcagattgtatggcctcgttgaccacaaaacatctgtaaagactcaccaccaagtgtacggccaagccactgaactagctgaacaccaggctattgaccaagctcatagtaatgctgatcaacctccagttgacaatgctcactacactgaatctgaccagactgaccacttagcagacagacaagctaatcataaagaccagctgtcttactatgaaacacgtggccagtctgaagacagaatatttccccagttaggcaacagcaaagaggacaaagaggctgactacagagtacaaccctgcaaatttgaggatagccaagtagacctcaattccaagccttcagttgaaatggaaactcagaatgcaaccactatcccaccctacaacccagttgatgccagattcaccagtaacttccaagcaaaagaccaagctcttttcccaagactcccctccatctcatccaaattgaactataccagcagtcaagaaaaaactcaagccatagtaaccaaatctgtaagttaaatgggcatttgatacctacctgggagatcagagatctagacggggcctggagagtaaaaataggggtacaacggaagggcacatgttgcatcaaggataaagaataaacccacatgttgtggtatgtgtgacccataatttcaggaagggcaagagaaggatgggaaataaaagagaattattgccttctctactacccaaaggccattcaggaaggattaataaaccaggattcaggaaacctgcattttaagtcctagttctgcaactaactctgtgatattaagtcattttccctctctgggcttctaccaggagaagggaatttggagttgattagacatccctgtgaaggaaaaagtacttgaagttgattggcaatgcctaaggtacctcccaggacatgaggtgcattatattgcacctggagacctggaggattatccaagtctctct

SEQ ID NO: 315796 - DNA, 4001 bp, Homo sapiens
ctcttccctagaaaatgaaggctgcatgtgcactgtcatagtcctccctgagatgtgttgctccaagaaggaactgtgtcaccaagtagaagctggtgggcagcaggagggacaaggctatttcatctttgtacccctgccccccaacacagagtatgcacccaagtaactatttccgggattgatcagtggtgtggtgccagagaaaccatgtggacctgacacaattctatctctgttggcaggctacaggaacactgcaaatatccactttactcagtgtagacatagccaaaaccaacatcattataatttattactactcttgctttctctggagacacaatttcactaggactctttaacacttgggccatttgtaaagttccctctcctgctgttgacagctgctaatgaacttccacaatttctctgcagttccatcaggtaccagaggggaggatcagaggccccttcctcagggagggtgcaggtccacagtggagaggacaggaaaggctcaccttctggagcatgttgctgacggccctcagcaggttttgggagtggtgaaggcatgggaacattcctgggtctggagtggccacggggaggtttctggccaaactgaggtggtccaggaggaccagggtagccacaaggaggaggcctggaaggaagaggagcaggtggaggagcttcagcctggatggcctgcctgcaccaccttccctccattctggccaccttcacccatccattcatgcttggcacccacctccctcaacccatttccaacacttttccttcaacacctgagagatgactcgagttattacaaagcgccactctattctagggctagaagccagctccctgtgagggtctagagatgagcttggacaagggtgttgaacccaacactcacccagagaaagcctacatgtttttgatcagggaaacccagaccaggtggtgaagtggctgagtcagacttgggacccagtgttttaaaaacagtggagtgagaaagcctgactttttttgtttttttaagacggagtctcactctgtggcccagactggagtgcagtggcacgattttggctcactgcaacctccacctccgagttcaagcaattttccctgccttagactcccgagtagatgggattacaggcacccaccaccacactcggctaatttgtgtatttgttagtagagacggggtttcaccatgttggtcaggctggtcttgaactcctgacctcaggagatctgtccgccttggcctcccaaagtgctgggattacaggcgtgagccattgcacccggccaagcctgactttagaactggctaggatctgccttctgtttgtagctgagggaccctaggcaggaaagcaggaaatctcccacgctgggcctcagtttctcctctacgaagtgggcataatgatagctcatcaggctgtttcgagatgaaaagagacatgccctatttagcacacggtgagacccctattcttattcctctttgcaggagacggctgctgctgttccagtctctccttaggcagacttgagtttctacccactcttcccaagcagccgcccctccgcacccgagcgagccaaagacctggcgggctgagtactcactgcgcgctggacacatgctgagccggcactgcagggacacagggcgagccgctggatgcagacctgtggccgcggcaggtgagggcggtggctgggaggctgacccagggggccacatttttataattgtcccgaggcgcggcaggactttcccgggactctggtctcttgctttctgtctccttctgtgtctctctctacatcagcttctcggtgacacgtgcggtgcggccggcccgcggggcttgcggcgctttcggattaactcccggggtgcccggccgcagccgttccgggacggccccgccgcctccagctcggcccaaaatgaaagcgaaatgttcgcagttactgcgcggggtccacaggcgggcgggacaccccgcccaccaccctgggtccccggccttagccggacgccccgtgtctaagctaccccgccccgcagctgtgcagcgccccctgccgacgtagagagaggagtgcctcccactttgcatgtcctgcgtagggatgggccctaaccacgacctccagcctagtactggaaggggtaggcaaatcattcactcatcatcgttcctttagatggctcactagatgccaggccgacgttgcaccaggtgcaggacacccagggagaacaggacccttggggcattgccacactaaatcagactcaaggcgttttgttcacaggtcttttctgaaacctgaaaagggatgagagctggctgactctgcaattattactcttgtagagaatccagtttaacgataggatgaatacacagagtcctgggaggaaagacctagagaaagagcccacgctcagccggagcaacggggtccaggagtcagcaaaggctcccgggagcaggcaggggccccaacctgagtgttaaaaacaagcaggcattagaccgcttccagcgggagggcacgcagggtctagccaggggaaacagggatcagaagcgcagtcatgaagggttgagggaggtgggggtctaggtgtccttgcagggtgtgaggctggagggctggatggggccatgccatgagggcaggggatgccatactaaggagtgtactttctgtgctgagagtagtggggagtcttcctgggttttaggcgggagatgtggcagaatttgcatgatggggggatcccttcagccacagcatgaaggatggatccaggggtcaggagtagagcagagggaagagttgacaaggtgtggccaagtccttattcagtatggagaacacagggtgggcaggagggactctcagagggcttgtgggccaaggcttggtagctcctcaggtgagcgggagaggaaggccctgagaatggggaatggagattgttctagctttacagggattactgtataagaggactgagtttggaggagatggtgagaagttccattttggatgtgctgggtttgaggttcctgtgggactttttagttcagttgtttttcccacaggcattagtcaccctaggcgtgggtagtggggaggatgtgtttgatctctgacttggagcttccaaagggcctgactacacccaggccctaggacctaataactggagctgccttctgggtggctcatctgctcgaagctgatgaagcacggctgtagggagttttaggtgtgtgtaaaataagagaaatggttgatctctaaggccccttctaatgctgctgtctgagaattcccccacgggatacagagtaatccattgtcagaaacaattgcgtttagcagtttgtctagagcaaatgacaggtgcagagctgtgttgtggccacaagggtttagtgtggagttaaatgtacttaaagtcaggatgaagacaagtgtatcacaactgagctgtttctcccctggaagggccatctcctatacaaaagtaatttctgttgcttagatgagcacagggccactgttaaaaatggattattggctaccagacacagtttctaatttacatttttgtgaaatagtttcctgaagtgctccatgtcctctagctaagatgaaatgaaaaccttcttctaggaatacatgatttttctataagtgacagtcttagctcacaatcactacttcacagtgtgtagcattgtcgtggaggtctcggccaatgctataaggaaagaaaaagaaatgagagctttaaacattggaaaagaaaaggtaaaactgtcactttttacagttgatatacaaaaagaaaaaaaattaatagactattagaactaagaagagaatttaacaacatcatgcaatacacatatcaacttaaaaaaaatcagccgatt

SEQ ID NO: 315797 - DNA, 4001 bp, Homo sapiens
tttcaaagaaaagatgaactggttctgcttcacagcttaggggggaactaagctgtcccactgtaggctatgacggaccatggattagccatcagtatacctgatcctcaagccagtgcataacctcacttgaagaccacaggtgggtctccatctgtctctggatgtcatccttccctgctgcaagcaggggatgacttgggaccgatgtgaggccccttcacactctaatgtttaactctaggtttttaggacggcctagagtatttactgggctaccccaggttaaggagtagctatgctaaggagataaacaaaagaaagctctgaatgcagtccatggtactttcctcaggttctttaaaatgttccccttctaacacaaaaggactcactgagcaattcacgaaaccataagcaattattagtgttcaagaaaggctggtactaaatcgtttgaagttagctgctcgtgttttttcataagaaaaaataatttgtgctttggttctggaataaaatactgaacctaaaatattggggctttaggcagcagcaagctcaaatgacaagactcaatgtgatacgtccagcagctctggaatatgctgctgagcatccacatttccaaacaccttctaagatctccttttgatggtttgaatgatttgagtttgggcaaaattgtcaatcatttatttgtcttttaaaaaatgaactctaagggatatcatcagatttttttttcctttttctgagacagagtctcactttgtcacccaggctggagtacagtggcgcagatctcggctcactgcaacctctggctcccgggttcaagtgattctcctgcctcagcctccggagtagctgggattacaggcgcctgccaccatgcccggctactttttgtatttttagtagagacggggtttcaccatgttagccaggctgttcccaaactcctgacctcaggcaatccggccgcctcagcctcccaaagtgctgggattacaggcgtgagccaccgagcccggccagacttgactttttttttttttttttaacaaatgagccatcataccaggagctgagttcttatcaaacggccggtgagaggccaagcaacaaccctaaatgctaccaagctcaaattgttggccttgcagcaactacagcaaaagggatgaattcttccctttagtgcaaagagccaagagggcttctgaactgacacagaggggaaggataggagctgaagacatcaggaaacagtgaatggggtttgtccaccagcaggtgactacggagcttgatgctatatgctattctaagagggcagcggtatcatttcaaaggttatttgggggatgagctattttctcttcagtgacccagaagattccctcgatcattcagggtactggggaagaaaggcaactgccttcacgagtgaacatggcaatcaatatggccaaaaagggagggggtactaatggagaaacagttcttgtgccccaacaggtgagcagaccccaagtaacaataactacgtgccaggcccttcgccgctaattgcaggccatgtcgttataccttaagagaccctggtgggttcggtactgcccttcgttttaccgttcgggacttggaacttggtgagcataaatgacagaaccaacagtacagggtggcatctgagaccgggtctgtctgattcccacgcccctgactcaagcaacctgacgccgatgtccggggctgccctgagggtgcaggcatgccccttgagccggcagtccgcgcacgccttcggggcagcctggactggcggatcagacgacgtcaggatctgggctcgagggccgggagatgagggaagaggtgctggcgggggcttaccggctctcggggtacggcgctcctgcacagcgcggccaggcttagcagcacgagcgacatcgccgggccactgcgcgggatccaggccacccgcacgctgcgcttttatcccggcgccgccgggccgccccttctcggctccgcctctcgcagcgccgacccattcccgccacccgaacagagggcgggcccgctggccccctcccaggctggggcaggtcgcagcgccctcgcctgctggggctcggagggatgggccgtgtccgagcgctggcggagcacgggccgccgcggcgcgcgcctacccccgcgcacacgtgcatgcagtgagccaggtgcatcagctgcacccgccctcgggcttcgcgcgcctccgctggagcccagctagcctcgcggctccggggccgaccgggtcggaactgctgcgtccccattccggacgcagagagcgcgcggggcgccggcgccgccggttaaagtgccgcggggcaggggccgggccgcggccacccgctcctcccgctccggtcccgactgtcgggctctcggccgagtcgccccgggtgagtagccgcggaggcgccccgaccaccccgcagcagcgccgcccggccgctagcccggagaggcctgggggccggaggtttggggccgggctggacgccgagacccgggcccgctttacacaatcgccccgccgcgcgaagcgaaacgggtggaacgcagactgccgaagctcactgactcctttgagggagcgaattctttcagctacgcggggttagagcggtaggagtgcccgctgcccgaccccaggctttctggtaaatgtctgtttccaccaagtgagttcggacagcaacacctggggctcccaaagcggaagccgtcagcactggcgatttggagctgcggttctcaagtttccctggcccgggatctctagcgccgcctaaaatgagatccagacggcaggtccgggtcaggcccgggatctgcatttaacgagcctccacccacgcccccgtaattcgtgggtgggtggcccagggaccatcctttgagacacagtgggtttgggggaaagttcacaaaaatcagctgggctaacagtggagtcacagaggctggaactgctgcttcagccccctcggtttgcaaacgacagggttgtggtgaccaactcagggccatttaaacttgtaggcagaattagctccattctacagatgagaagacggaggcctagagaggggtatggaacttaggggtgtgttgtcagctggtgagaggctgtactaagtcaagcagctgttttagctgaggccctacttgtgtgccaggcctggcccacctgccagcttgattaaggcttgcatggactggggatcagccaggggtttgggctctggcatgcatacgtgtggagttgcaggtagcattttcagagaattgctctgtttcctgaccaaggaactcagttgaggttgtggccgcacccctgcctgggactgggccaccctgagcccctcattccacctctctgagttgctttgggccctgtggcccttgagaacattttcagctctaatagtcatcttcctgttcagcaaatacctgctgggtgcaaaggtgaaccacacatgggtgctggctgatgggtactcctggagtgaggatgagtgcagtgagaattattttcaaggacacaagtacccgccttgctgcggaagcccagatgaaaacagcctcgtctgcaagctcaagattgtgaactttgtcccatggtgctgaggaacaatggtacaggcttaaatggtcatccatttttggttttagaaaggccacctggttggctctgcagggcaaaatagagggctagtccctctgagacgagcgagcaggcagccattcactaacatgcgttcattccgtgagtatctgattctgtgctgtgggccaggctctgggctgtgctggcttttcagttgtgtgccagggcaggccctgctgtgagcttggtgttgttcggcacacaggctttgagacaaccagggtgcggaggttaggcctggagacagggttcatgagtcaga

SEQ ID NO: 315798 - DNA, 4001 bp, Homo sapiens
attcatggagggtcccatatatttaaaattcaaatatatttaatttaaaaataaaataaaattacaccatcaagtgttggcaaagatgggaagcaactaggactcccatacactgctggtaggaggggaaaatagtagaagcaccctgaaaaacgcttggtgatttctcgcagtcaagcatatgaagtagaactattctcatccccattttacagacataaaagctgaggcataacaggctgaagggacttgcccacagcgctgatcagaatcaaaagaatagtcccacctcacatggctgttgtgagaattaaataagttgatacctgtaaaacactggctgtaatgcctggtactgaagggtttcaataaatttaattcttttgtaatcctcaaagagataatgcatgtgaaaaagttttatagattttaggtttagaaggtgattattattattttgcataccacagactgaccaaactgcacaagggcagcaggcacttgcacctccagcaggacgcagcgggcagtagggtaggcctggaaggagagcacgacttgggcctggagagaggctgtgggcaacagggcaggggtcagtcaggcccaggagcggcaggccaggccttggcatggggcagttgggccagccaggttctcctcaccattcctaggctcctccacccctgagtcagctgctcctccaaacttttcctcatcttcaggctcttcccagtgccctagaaggacccaagagcaaggccctgggtgaggccccctgctctgggctggctggctttggcgttggcttccttctggaaagcccagtgctgggaagcaggggctggggagaccacactggcctgggggtccttctgctggtgtcctccaggagaacactgaggatgcctagcactgcttgagagatcccctggccctcatgcccaccccagacacactcacgtgtacacatgcactgtcacaggatgacttgctcaccatgcacggccaagtggacagccacacgcagacagaggtcacagtcggtctccttctggcacctcagcaccagctctgtctgcaggtgcgtaggcgccagcacggggcccggagcaggcacgatgtccccaggcaggcagagtatgtcactgtctgtgtgtggaggagcgggtgggagctgaagctgttccaagcccagaatttggtggcacctgacatacccagagagccaaagaacttggctgtcctaggctgaggtgggcatggagggcatgggcctgggacagctctgctcccttcggccaacctgggaaattctttttaaaagtagggatacttaccccagaggcggcaggagaggccctgggaaggaaagaaaggagagtcagaatttgtgcccccaccatctaggcactgttctctgcctaagacctccacctacctttttctggggctccgtattcccagaccctcccagagaaagacagacccagctcttgccccttccccgttcttctcttctaccatcagcaccagacagaccagacagggcagttctggcagtggcagcagtgacaggagccaggctaaggctttgctgagccaaaaactgaaccctgagcctttcctcgtctccccagggttccagactcaccggagagcagtgggtagcgtcctgaggccccacaagcctctccagagaaaggaccactgggcttcggcccagtgccaaggacagcaagaaccagggcacaggcatcttctaggtgccaggtggcacccaggcctgaggccctgtgctgcccccccccaaggggggcagacaccccagtcagcccgtgtctgtgggtggcaggggctggaatccctcttcagcctccagagggggcggagggggctgtgctgggtagtttgtgcactctctgtcctgggagtcctgactctcctcctacttccagcacggagtgctttcgttttggctcccggcaggctgctggctgttcccgcccctctctgtccctcccaccaacaccaggcttgggagccagcagccttggactagggtggtggccgcacctcctccttctttggctctcctctccctctgctgacacctggctgggaggggcccctgaagaagacagcgaatgcatcacggctgagtaagggagctcttactcacccccggagccctaaggaggacacagccctggagtcctgggcccactaagtctccccttactaggcacactcggtcccttcagacactctttgggcctcggtaaccctttgtgggacaggagctctaaaagcacggacaaaaggcaccagaaagtgggcttttcaccactgcctggctcaaatgcggtatggggagtagaaggaacccaggaccccagagcctggcagacaggggtcccatctgtgctgttgctgtgggccggctgtgtgatgatggacacaccatctggcgaagcctctgttttcctctcctcttgtaagaatcactgggggggatcaaggagattgccccatcctcctttgcttttggaggcattgcttgtaagaatgtgacggatgccatgcggtatggacacagaggatttgggccagcacactgacacataccccaccaggcaggctccccagccacactagagaagcacactgtgttttcttagtttgtcatgtttgtctttattcatctttccggatcttggtccccaccgccagcacccacccaccccacccccaacccccactgtcctgaccacctggagccaaaagcctcttttcctaggtccagagtcctctctccctctggccagagcctcagagtgggaaagggaatccctggcccccaaggaggttttctctcagccgccccctgcaatcccccaccgcctcaccctccttcagaactgacatggctcctgcctccctaccccggccccaacctctccagcctggactgaagcataagcacactgctctttctggagttctggagaggaagtgggaagaccgccctcccccatcagaacaggggttagaggagctctcagtcaagggaaagtatgaggaggaagagggacgcgcgcggggactgggctgggacttccggcctgtgaggcagggaatgcggcttttcggccagtcgtcctcgaggcaccccaaggatttcagggtcgaaggctcattccggggttccagccagtgtccgttgcgttgcggccgcagacacccgggactgcggtggagctctgctcaacctaggtctgcaagtcgggcggcctctcgttcgagccggctgcacagctctaggcggctctgcctgcgctgccgcgccccaaggcggccccagctggtggcctctgcgaaaggccgcgcgtccagcgcccgcagcagacgcggcaggtcgcgcagcaggcggtagcgcggcagggcgcgcagcggcggggggatgtcgcccttggcgcagaggcgactgaagtaagcgagcagcagcagcgggcgcggggcagcgtggagcagggcgagcaggggcgcggcgcgggggtcggggccgctgaccgggcgaaggtcggcgccgctccacagcagcagcacagtgccctgctcccgcgctacgcgcgtccgcgccgcccagagccacggcagcgggcccacgcgcgccacgtgcctcccctcccacaggtccacgatcacgtcgcgcccgccgcccagcgctgcccgtagcagttcagccagcgctcccaccaggcgccgctgcgcctccgagtccgccgcgtgcaggaggagcactggccgcgctgggcccgggcctggtggcgggaagcaacagatgaaggctgggcggctgagggactgctcagccctcttctccccaccctctcgggataccgtagggtgctcgcctctccgcccccgcccccgccccttatttgctctgggggttggtaccgaaaacagccctagcctatagggtgcttatgggctaa

SEQ ID NO: 315799 - DNA, 4001 bp, Homo sapiens
cccgtgcctgaggatgacatgcaaattcatggagggtcccatatatttaaaattcaaatatatttaatttaaaaataaaataaaattacaccatcaagtgttggcaaagatgggaagcaactaggactcccatacactgctggtaggaggggaaaatagtagaagcaccctgaaaaacgcttggtgatttctcgcagtcaagcatatgaagtagaactattctcatccccattttacagacataaaagctgaggcataacaggctgaagggacttgcccacagcgctgatcagaatcaaaagaatagtcccacctcacatggctgttgtgagaattaaataagttgatacctgtaaaacactggctgtaatgcctggtactgaagggtttcaataaatttaattcttttgtaatcctcaaagagataatgcatgtgaaaaagttttatagattttaggtttagaaggtgattattattattttgcataccacagactgaccaaactgcacaagggcagcaggcacttgcacctccagcaggacgcagcgggcagtagggtaggcctggaaggagagcacgacttgggcctggagagaggctgtgggcaacagggcaggggtcagtcaggcccaggagcggcaggccaggccttggcatggggcagttgggccagccaggttctcctcaccattcctaggctcctccacccctgagtcagctgctcctccaaacttttcctcatcttcaggctcttcccagtgccctagaaggacccaagagcaaggccctgggtgaggccccctgctctgggctggctggctttggcgttggcttccttctggaaagcccagtgctgggaagcaggggctggggagaccacactggcctgggggtccttctgctggtgtcctccaggagaacactgaggatgcctagcactgcttgagagatcccctggccctcatgcccaccccagacacactcacgtgtacacatgcactgtcacaggatgacttgctcaccatgcacggccaagtggacagccacacgcagacagaggtcacagtcggtctccttctggcacctcagcaccagctctgtctgcaggtgcgtaggcgccagcacggggcccggagcaggcacgatgtccccaggcaggcagagtatgtcactgtctgtgtgtggaggagcgggtgggagctgaagctgttccaagcccagaatttggtggcacctgacatacccagagagccaaagaacttggctgtcctaggctgaggtgggcatggagggcatgggcctgggacagctctgctcccttcggccaacctgggaaattctttttaaaagtagggatacttaccccagaggcggcaggagaggccctgggaaggaaagaaaggagagtcagaatttgtgcccccaccatctaggcactgttctctgcctaagacctccacctacctttttctggggctccgtattcccagaccctcccagagaaagacagacccagctcttgccccttccccgttcttctcttctaccatcagcaccagacagaccagacagggcagttctggcagtggcagcagtgacaggagccaggctaaggctttgctgagccaaaaactgaaccctgagcctttcctcgtctccccagggttccagactcaccggagagcagtgggtagcgtcctgaggccccacaagcctctccagagaaaggaccactgggcttcggcccagtgccaaggacagcaagaaccagggcacaggcatcttctaggtgccaggtggcacccaggcctgaggccctgtgctgcccccccccaaggggggcagacaccccagtcagcccgtgtctgtgggtggcaggggctggaatccctcttcagcctccagagggggcggagggggctgtgctgggtagtttgtgcactctctgtcctgggagtcctgactctcctcctacttccagcacggagtgctttcgttttggctcccggcaggctgctggctgttcccgcccctctctgtccctcccaccaacaccaggcttgggagccagcagccttggactagggtggtggccgcacctcctccttctttggctctcctctccctctgctgacacctggctgggaggggcccctgaagaagacagcgaatgcatcacggctgagtaagggagctcttactcacccccggagccctaaggaggacacagccctggagtcctgggcccactaagtctccccttactaggcacactcggtcccttcagacactctttgggcctcggtaaccctttgtgggacaggagctctaaaagcacggacaaaaggcaccagaaagtgggcttttcaccactgcctggctcaaatgcggtatggggagtagaaggaacccaggaccccagagcctggcagacaggggtcccatctgtgctgttgctgtgggccggctgtgtgatgatggacacaccatctggcgaagcctctgttttcctctcctcttgtaagaatcactgggggggatcaaggagattgccccatcctcctttgcttttggaggcattgcttgtaagaatgtgacggatgccatgcggtatggacacagaggatttgggccagcacactgacacataccccaccaggcaggctccccagccacactagagaagcacactgtgttttcttagtttgtcatgtttgtctttattcatctttccggatcttggtccccaccgccagcacccacccaccccacccccaacccccactgtcctgaccacctggagccaaaagcctcttttcctaggtccagagtcctctctccctctggccagagcctcagagtgggaaagggaatccctggcccccaaggaggttttctctcagccgccccctgcaatcccccaccgcctcaccctccttcagaactgacatggctcctgcctccctaccccggccccaacctctccagcctggactgaagcataagcacactgctctttctggagttctggagaggaagtgggaagaccgccctcccccatcagaacaggggttagaggagctctcagtcaagggaaagtatgaggaggaagagggacgcgcgcggggactgggctgggacttccggcctgtgaggcagggaatgcggcttttcggccagtcgtcctcgaggcaccccaaggatttcagggtcgaaggctcattccggggttccagccagtgtccgttgcgttgcggccgcagacacccgggactgcggtggagctctgctcaacctaggtctgcaagtcgggcggcctctcgttcgagccggctgcacagctctaggcggctctgcctgcgctgccgcgccccaaggcggccccagctggtggcctctgcgaaaggccgcgcgtccagcgcccgcagcagacgcggcaggtcgcgcagcaggcggtagcgcggcagggcgcgcagcggcggggggatgtcgcccttggcgcagaggcgactgaagtaagcgagcagcagcagcgggcgcggggcagcgtggagcagggcgagcaggggcgcggcgcgggggtcggggccgctgaccgggcgaaggtcggcgccgctccacagcagcagcacagtgccctgctcccgcgctacgcgcgtccgcgccgcccagagccacggcagcgggcccacgcgcgccacgtgcctcccctcccacaggtccacgatcacgtcgcgcccgccgcccagcgctgcccgtagcagttcagccagcgctcccaccaggcgccgctgcgcctccgagtccgccgcgtgcaggaggagcactggccgcgctgggcccgggcctggtggcgggaagcaacagatgaaggctgggcggctgagggactgctcagccctcttctccccaccctctcgggataccgtagggtgctcgcctctccgcccccgcccccgccccttatttgctctgggggttggtaccgaaaacagcccta

SEQ ID NO: 315800 - DNA, 4001 bp, Homo sapiens
gagaggagaacacactcgcacaggtagaagaaaatcaccagcctggctccgtcagggcactaccataccccacagcatggaaacttcacgagttttgtacagtggcataagaagccaccttggcaactgcagcaaaacagtgaatcggactgatttacctacgccatcacatgaacactcaaaataaaacgcctgtgatattgtagtcattcaaaagccaataggagtctaaatccaaaattctagtaggatccttaagtcaacacgagatcctccttgaggaaacttgctagctactaaaatttttttaaacaataaaacaagagcagtaatgttttactgaaatggaacacagtaagaaaatgtgatgctttactcaactaggaaggaatgacagagcctaatggggcgggggggcggggggggaagggggtggcgggggcggaggcagagcaggggtcatagccgtctccatagcttagctactgagtctgaagacatcccagctgtctggctcacacctggttttctgcaccacatttcttgggactgtggggcaagtgagcttggaggcaccagcctgcgtgcctaagggagtgttatgtcctaggttttggctgtgctgaggctgtttagagccacccagaagaggctgagtcaacgttcgcctaagcaaaccactccatacctatccctcagcccagcaatactaaggaaattctcatttcatcccatttttcatatgaagaaattgaggctcatggctccccaggagcagagccaaggtcatgtccctgctgcctgagtgcaaagcctacgttttctccacaagcttaaggccgtgagtgccctgacgccgggcccacccgggcctcggtgggagactcggggcagacggacatcatctccaggttctggggccgcccaaggccagaagcccaggtagggagcagggaagctgagaggggaatggcaatcacccgcgcccatcgcccagacagtgtcaaaggagcgctcggttccacgaagacggctcaatgcacacggcgaaagtctgggcacctctccagtctcgtctcaggcacctcacccagatgacacccacgcggccctttggcggaaaaatatccgcaactcgaagcagggaaggaggatatcagccgcgagaccttcacaagacgaagggctgaaccgggaggcgaagtttctcaggaggtcccggagtcagaggaggggtaggagtggggtgacggccccaggcgaggaggaacaaagctactagaagagcggggcgcatccctccccggtgctccaagtcccctctccggccgcccgggccttagcagggttgtggactgaaagtccgggagaatacccccttccctctccaaagcgcaacccggtccgggtggctcgggggatcccagcccgggacacgcagccctgggacgaaggaggtcccgggccaagaacaaagggtggggcgcccggcccagccccgccgcccctcacgcccgccctctgaatgggaccccggccggcggccgcacctcattagcaacacaaagccggggtcgggcagccgctttcatctcggccagggccggaggacacgcgtccggggagggaaaccaggaggatgcgcgggaggagtgagacccaggccggccgcggaccccgcgaagagcagacaggttggcgcgggctcgcctccccgcgagcacctgtgcgcgctgcgtcccccgcgagttggcgacggcaagaaacccgccgccctcgccttaccctccagccacaggtgtcggcgccccgcgcgcggccggacccgccagcggccacagccagctgcgagccgttgaggcaggcgttgaccgtaaagaagacggagcagagctgcagccacggggccatggccgtgcgctcgcccagccaggccgttctctgcgccccggccgcccgccgctggccagccccgagtgggcggtggccgcggcggccgcggcggcagcgaaggggaccgcactgggcatgcgttgccagcccgggccccgcccccaccctcagtcctcgtgtgctggccccgcccccacagcctggccctccagttgtggccctgcccccgtagaccacgcccctctggtcacgccccccaagcccccactgagactctggcagccgcagtttcttccccctcacttagtagatctttttttaatccaaaggatttgtccaagtgatgctcactctatgcaaaacctgaggaaaacacaaagaatgtaataataataattttaataataatttaataaacacctgctatgtgccagacccctttctgtatacgcccaaccacacaaggaagtgtattattgttatcccagttttaggcgcagaaaagttaggggaacgtgacagagaaatcctggctccacatttactagtaggactttggacaaaaggcttgctgtctccacaatacttcctcaccacaaccccccgtccccctcaccctcctggaagctagaataagtatcctagtctggggagagttctgttggttgaaacataacaagtgctccataaaggctacaatctatcattaactgactctcataaggtcacacagctgttacctgccagacctgagatccaatccagacctgactaaaaacaatactctcagctactacacttgtcaaacataacctcatgaagtggatattatttctgtttggaagaggaaactgaggctcagagaagtggagtagcccaagctatccagagtttcaccgcactcttcccagcgctttgccttttatctgagcacctaaactctcccactttgtccctctccactacccccttcctcaagaataccacctcctcttcctaagggctttttctacttctgactttgtccccgtgtccgatacatttctccagcctggatccaaagttatcttccaaaaacacaaatcagactactgacttatcccaattaaaactctaggctgagtgcagtggccaatcctagaggatcgcttgagttcaggagttagaggtaacagtgagctatgatcctgccaaccgcactgaagcctgagtgacacagtaagaccctgtctctaaaaacaaacaaacaaacaaacaaacaaacaaacctaccaccaccaccaccaacaaaaaaaaacagtaaaattatgtgttctgtgtttggaggaggattaataaaaataaaatcaataaataaaactgttctatggtggctcttatgcaaaggccatttagaataaaatccatactggctttctcttccactctgtctttaccacctggctcctgctgcacagaactccccccagccccagccttatcttggtctttttgcctcaggaaaccttggaaattgtcacctccgtccattcaacagggcagcctcctctatatgactctccttccagggcccagaatcccctccctctccttctctggcctggcctaagctcagccactgctaacacaggattcctgcactttctcttgtggcttgtgtctccaccaccctgcccacacgtccttggagggcttaagtggaggaagagaactcttcttggtaatgctagcagaagtcttggggatttgcttggaagtagctacatctagaaccaaggagtagagccagcctcacctgaacttcaggggctggaagtgtgaaacagtgcttgcccaaaggaacactgacattattgccagggagagggagaatgggtgctgggttccccaaacaacagcatccacctcaagacccagatgctgggcagaattttttttttttttacctcactgcctggaattcaggaattcagccagacccagtgaggtttaccataccctcttcagacaccagaatagctaggatccacagaaggctgttctggagtagccttctgtgaatagacctcaggaagcacatcactcctttggaggagctgctggttcag

SEQ ID NO: 315801 - DNA, 4001 bp, Homo sapiens
aaccatcatacctggcccagaaactgccaattctttttttggagatggagttttgctcttgtcgcccaggctggagtgcaatggcatgatgtcggctcactgcaacctccacctcctgggttcaagtgattttcctgcctcagcctcctgagcagctgggattacaggtgcctgccaccaggccctgctaattttttgtatttttagtggagacaggggtttcacaatgttgtccagactggtctcgaattcctgacctcaggtgatcaggctgcttcagcctcccaaagtgttgggattacaggcgtgagccaccgcgcctggcctagaaactgccaattcttaagcaatgtaagggcatttagtatgtaccaggcactgagctgagcaattaaaatatagagtaagaaagaagatcctgctctacaaatagatggtaataacaataaatccatagcttttaattccaagaatctcagctgaaaaaaaaccttcataaaattgtacaattgtatttgtgaatatcagtcatagcgtgctattttaggataatccaagtcccagttgaggttaaaacaagacaaatatctgttctagtaagtcccacttgctcagcctaggtggtccctcaaaatgttctcttcactgagaatggcccaaggggctgtttctcatacctgagccacctgacagcagatgctggcacaaacagcgggaacagtgccagactcgcacacaccaaggctttgtggagaagagggcccaccaggtgcggcaagggatataggcagaacttcctgggaaagatggaagggaaagcaaatgatagggtctaagaaggtccctcctacctccaacaagctggatttgaggccaagctctgtcacatcctggaagtatgactttgggggttacaggacctgtctaaggatcagattcctcattcataaagcgggtctgttataaaaatcaaaattgtagtgtatgggaaaatgtcttgtgaagtagaacataccataaaataggaaggattattgttgtattactgatagaagtgagggatcagttaaggggaggagccaacatatatggagaacctggagatttactcatgtttctcatctaatcctctctacagatcagaagcaacactgcctttagtgtacaatcatttctactatgctactacccctcagaaactgagggtcagttggaggggttaggtgcacagtctgaggccacacgggagtctggcagaactgcaatgtgaacccaggcttgtcatgattccaaatttttccttgatattgtgctacttcccgggttgggaactgaaaattagaatggagggcttgctaggcatctgcaaaaatagtgggcgtggggaggagcaatggggcaggaaatgcgactcaccagtgaaactgtcatcctgaggcacagggcccagtagggaaaagaaaggaaagagctattattaggagagactcccataaggcacattcctggggtctttgcttcaaatcagcaaattctgagccccatagctaatagcccataccttctggctcttatcttcccagctccaccctgtccaggccctcagcacaaaggaccttggctacccctttgagactaggtagaggacacatcaaagctgccaccagagcacagggactgcggaggtagcacagggcaggcaggggagtggggagctttatggctgtgccaggcaggtgtccctacctggcagcagcaccttaccgtgtgggaggccagaggacagcgggtgttccagtggggcaggtggcgaaagccaatcccagcagagtcagagaggtcgatgactatgaggaggagaggcaggagcagggctgccagtctggagctccccatgggcttctgtgcaattagggctcccggaacatggctgcatggcctgaaggtgggtggcagggccttgctgtgcagcagcgaacacagtaccagcaggagccctcgccccagcctgccctggccccgccctgcccgaaagctcctccttgatcccaaccagccagccaggccacattccttcccctccaagtggagggactgaggaaagcttgtgcccccaaaaaccctactgccccccacctgaaagacaaggggctcctgctgtgggtgagaagtaacaggaaaggggctagcatcaggttgggggacgcacccatttcttagcccctcctactcctgaaacacactgcagatctgatccacccatcagcacactctggaacttgtgtctcccatagacatgcgcttcaccccctcacttagagaattagccgagctcttaagcactactcagcactgggtgctggagatacagaggtgactgaggcaccatttagagtggggaagaaaaaaagcactctaggatgcacatgaagcccatatgtaccctggcttcccaactggttaactctcaggactatagccgagttctctctacccatgagccaggtccagctcttctaggcaaagggctccataccaaaggggcctctagcttcaaggacccactagtcagtacgccctgctcaggaagccccagagctcacagctgagccctggagcagagggagcgggccccacacactgacctggtttcctgtggtttccggtgctggagaaaggctgacgaggctccatctttgtgggaaccctccccatcatcccacagcttcctccccttcatggagcatttgagcagcttcagccctcaccttggtaacacacacactggaaagaaagtttggggcacacctaccaggtcaaggcatctttttttttttttttttttttttttttgagactgagtcttgctctattacccaggctggagtgccgtggcacaatctctgctcactgcaacctccacctgctgggttcaaccgattctcttgcctcagcctcctgagtagctgggagtacaggcacctgccccatgcctggctaatttttgtattttagtagagacagggtttcaccatattggccaggctggtctcgaactcctgactatgtgatccacctaccttggcctcccaaagtgctgggattacaagcgtgagccacggcgcccagccaaggcatcttgagattgttattgtccccctgcaattcaatctagaccacctttcagtggcctaaccacagcctgcttttggccaattctattcctgtctttaggttcattgtctgaaggctgcatcctacccattatcctaaaagtaccctctagctttttgagttcatgaaaagataaaaactcttattctttatgtttctccaagcctagcagtagatattatgaagtatgtgctgtgtaattgaataaatgtcatgatacatttcatctatgtagtttatctgtttcacacttcacaaaacacttttatatttaatcctcctaaccctacctgtgagacaggtaagtgttaattattgttttcatttcatagagagataaggaagcagagggataatgatttggacaaggtcaaagtctatagttcagggagctccccttttgctaggccctcgcaactcaactctctcttttttttttttttttttgagacagagtctcactgtgtcacccaagctggagtgcaaatggtgcaatctcaggtcactgcaatctccacctcccaggttcaaacgattctcccgcctcagcctcccgagtagctgggattacaggtgcacgccaccacaccagactaatttttgtatttttagtagagacgggtttcaccatgttggccaggctggtcctggactcctgacctaaggtgatctgagcccagcttggcctcccaaagtgctgggattacaggcatgaaccacagcacctggctttttttttttttttttttttttgagatagtcttgctctgttgcccaggctggagtgcagtggtgtgttcttggctcactgcaacctccgcctccta

SEQ ID NO: 315802 - DNA, 4001 bp, Homo sapiens
gggtttcacaatgttgtccagactggtctcgaattcctgacctcaggtgatcaggctgcttcagcctcccaaagtgttgggattacaggcgtgagccaccgcgcctggcctagaaactgccaattcttaagcaatgtaagggcatttagtatgtaccaggcactgagctgagcaattaaaatatagagtaagaaagaagatcctgctctacaaatagatggtaataacaataaatccatagcttttaattccaagaatctcagctgaaaaaaaaccttcataaaattgtacaattgtatttgtgaatatcagtcatagcgtgctattttaggataatccaagtcccagttgaggttaaaacaagacaaatatctgttctagtaagtcccacttgctcagcctaggtggtccctcaaaatgttctcttcactgagaatggcccaaggggctgtttctcatacctgagccacctgacagcagatgctggcacaaacagcgggaacagtgccagactcgcacacaccaaggctttgtggagaagagggcccaccaggtgcggcaagggatataggcagaacttcctgggaaagatggaagggaaagcaaatgatagggtctaagaaggtccctcctacctccaacaagctggatttgaggccaagctctgtcacatcctggaagtatgactttgggggttacaggacctgtctaaggatcagattcctcattcataaagcgggtctgttataaaaatcaaaattgtagtgtatgggaaaatgtcttgtgaagtagaacataccataaaataggaaggattattgttgtattactgatagaagtgagggatcagttaaggggaggagccaacatatatggagaacctggagatttactcatgtttctcatctaatcctctctacagatcagaagcaacactgcctttagtgtacaatcatttctactatgctactacccctcagaaactgagggtcagttggaggggttaggtgcacagtctgaggccacacgggagtctggcagaactgcaatgtgaacccaggcttgtcatgattccaaatttttccttgatattgtgctacttcccgggttgggaactgaaaattagaatggagggcttgctaggcatctgcaaaaatagtgggcgtggggaggagcaatggggcaggaaatgcgactcaccagtgaaactgtcatcctgaggcacagggcccagtagggaaaagaaaggaaagagctattattaggagagactcccataaggcacattcctggggtctttgcttcaaatcagcaaattctgagccccatagctaatagcccataccttctggctcttatcttcccagctccaccctgtccaggccctcagcacaaaggaccttggctacccctttgagactaggtagaggacacatcaaagctgccaccagagcacagggactgcggaggtagcacagggcaggcaggggagtggggagctttatggctgtgccaggcaggtgtccctacctggcagcagcaccttaccgtgtgggaggccagaggacagcgggtgttccagtggggcaggtggcgaaagccaatcccagcagagtcagagaggtcgatgactatgaggaggagaggcaggagcagggctgccagtctggagctccccatgggcttctgtgcaattagggctcccggaacatggctgcatggcctgaaggtgggtggcagggccttgctgtgcagcagcgaacacagtaccagcaggagccctcgccccagcctgccctggccccgccctgcccgaaagctcctccttgatcccaaccagccagccaggccacattccttcccctccaagtggagggactgaggaaagcttgtgcccccaaaaaccctactgccccccacctgaaagacaaggggctcctgctgtgggtgagaagtaacaggaaaggggctagcatcaggttgggggacgcacccatttcttagcccctcctactcctgaaacacactgcagatctgatccacccatcagcacactctggaacttgtgtctcccatagacatgcgcttcaccccctcacttagagaattagccgagctcttaagcactactcagcactgggtgctggagatacagaggtgactgaggcaccatttagagtggggaagaaaaaaagcactctaggatgcacatgaagcccatatgtaccctggcttcccaactggttaactctcaggactatagccgagttctctctacccatgagccaggtccagctcttctaggcaaagggctccataccaaaggggcctctagcttcaaggacccactagtcagtacgccctgctcaggaagccccagagctcacagctgagccctggagcagagggagcgggccccacacactgacctggtttcctgtggtttccggtgctggagaaaggctgacgaggctccatctttgtgggaaccctccccatcatcccacagcttcctccccttcatggagcatttgagcagcttcagccctcaccttggtaacacacacactggaaagaaagtttggggcacacctaccaggtcaaggcatctttttttttttttttttttttttttttgagactgagtcttgctctattacccaggctggagtgccgtggcacaatctctgctcactgcaacctccacctgctgggttcaaccgattctcttgcctcagcctcctgagtagctgggagtacaggcacctgccccatgcctggctaatttttgtattttagtagagacagggtttcaccatattggccaggctggtctcgaactcctgactatgtgatccacctaccttggcctcccaaagtgctgggattacaagcgtgagccacggcgcccagccaaggcatcttgagattgttattgtccccctgcaattcaatctagaccacctttcagtggcctaaccacagcctgcttttggccaattctattcctgtctttaggttcattgtctgaaggctgcatcctacccattatcctaaaagtaccctctagctttttgagttcatgaaaagataaaaactcttattctttatgtttctccaagcctagcagtagatattatgaagtatgtgctgtgtaattgaataaatgtcatgatacatttcatctatgtagtttatctgtttcacacttcacaaaacacttttatatttaatcctcctaaccctacctgtgagacaggtaagtgttaattattgttttcatttcatagagagataaggaagcagagggataatgatttggacaaggtcaaagtctatagttcagggagctccccttttgctaggccctcgcaactcaactctctcttttttttttttttttttgagacagagtctcactgtgtcacccaagctggagtgcaaatggtgcaatctcaggtcactgcaatctccacctcccaggttcaaacgattctcccgcctcagcctcccgagtagctgggattacaggtgcacgccaccacaccagactaatttttgtatttttagtagagacgggtttcaccatgttggccaggctggtcctggactcctgacctaaggtgatctgagcccagcttggcctcccaaagtgctgggattacaggcatgaaccacagcacctggctttttttttttttttttttttttgagatagtcttgctctgttgcccaggctggagtgcagtggtgtgttcttggctcactgcaacctccgcctcctaggttcaagtgattcttgtgccttagcctcctgagtagctgggattacagctgtgcaccactatgcctggctaatttttgtatttttagtagagacagggttttgccacattggccaggctggtcttgaactcttggcctcaagtgatccacctgcttcaaccttccaaagtgctaggattatgggcatgagccactgtgcccggtaccaattctct

SEQ ID NO: 315803 - DNA, 4001 bp, Homo sapiens
attattgcatgaagttcatcagaataaaatcaattgtcatgagaagggttaagggtgtgggagggaatccatttaactttaaaataccaataatacaggaagactagtgtgggcatgtgaatgtctgtgtgttcgtgtttaaataaggcaagtttgtgtccagaaaggtttgcatttagcagcatctctgtacaatccaaaagaaatatatgagaattttgtttgttttctgatactagatgaaaaatgtaaggttgctcgactgacctaagagagcaaggatagaaggcttagaataatctgtaacacagctgcaacttccaactttgtcttcttgtctttctgcctctcacccatttcaagaccctctttgtcaataaaggatgtctcagatcagggcagttcacaggcctgaggtttgacctaaaaactagtaggaaattcatatcaccgagaaacatcaattttacatttcgagctaagcatccatgatccacatcacatatggacaacattcagaaaattcttattataaaagagttgctcaaattcaaaagaagaaagacaccacatttacagatttttttaaaatgcctctgtaagatggtatgaaatcacctttctgaaaacccactgtctgcaaggttactatgtaacaatatttacaatagttgccattggttttgaaccaaccagatgccaggccaggcactgtgctaaacatgctacttgaatgatcccatttcatccttccaactacccaaagggctcattgtgaccattataaatctccattttttggctggaaaaaaaaaaaaggaagaaagaaagaaaagaaaaacccagtatcggaaaggtgagataacttgcccaagttcacactgctaatacatggaagagctggagtcaaaactcaagtcctctttctcatccagtagctaaaccagggatctgtacagcagagcagcagaatgcttcgcgtggcgccctggttcacaatttcacaaccagaaggtggagggaagacaggctgtgggctagctcttaaaggaaacagccgaagtttgcttttatgtttgtgattttctctttaactcagcttccttgctccctctcagtatttagaagagggaaggggctctatggttccatgaagtcagctcttcccaagtgaggggcaccctgtgccccacagggccactagctccgcttcctccggggctgggaagaaacagtaccataggaggtcactggcgcccgggcctcgctcctctctccccgcgctcctccagaagctggtccgacaccctctgaaggggcatctttctgagaaagcaggtcaggggaagagggagtgaggctgcaagcagcattttcccaggctgtcacagctctgcgctgagagcgacgtgataccgagtgggcgtgctgggacacaccgcttccttctgtcctcggcgcttccagcagcggtctggagaaaccaaggaggagatgggggcggggggtggtagcggggagggggcggtgaggaggaaaacaagggtagacccctcaaagggctgaggatgggggcggcaacgagcagacgtcccacaaccgcgttacttaaatccctgcaaagcaaagatgggtctctgaacgtttgggttcgaatccgggctccagtcctaactagcagtatgacctatcccagccgctgcctcgttctgtgcctcagtttcctcttctgtaaagtaggagggtttaacgataggatctctaagaatccgtctaccctgagattctgcggcttggtgacttctgagccctcacggcggcgcgagactcacctttcttgggaagctgagagggcgcagcaaaagcagccgggatgggtgcagtgtcgccgggcactgcttccttccgcgcctctggccaaagcggaccccggagacctggatcccggcagtcttccccagtgagcctcttactttccgccgcactttcttttccccctttggggctcctcccccggagcggcgcgattggccacggcctcacggctcaggctccacccgccgccttggctcgcgatccaccggcgctctgggcttccaggagctgcggccgcggggcggcgtcctggacggtcccgcccgccgccaggaggcgcggcgccgggcccgcctgcggacggatgcaaggctgcgctcggccccttcggctccctgccaccgcctgtgcgggcttgagcgcgcggggaaaggagagggttagtcctgcagcgcagctcggcacgctgccaggcgctgtgggaagctacgcccctcactacacaccgaggcgcacacatgcgctcattgcaagatcgtgctctcgcagttgagatcggtgccaccctgccctttcttcctgtctcgacgtatttagcaatcatgctgcaaggccttgaatcaattcagactgcacgattttcgcaaccaccctgtgccggcacagagcgcggcaggatgtagatgcgatctccgcagtcctgagctcttgctgtcttgaactgacattcatatgagcaagcaacaggacatgacagcaagactaaatctgtattgtccactggtaatatacccattgcctagcacagtgcctggcacaaagtaggcactcaatacatgtatggggaacgaataaaagaactaataggttacatagaaggaaataatctcaaaacaaatatttgccttcattcatttccatttccccaagtttttgcaagagccttccttcagctgccctctgccactgtagatggtagtctgtaatatatcccgggaagcgttataaaggctttcattaagtcatctctcttgttcaggcaccttctgctgtgttcctactgctagtgcctcatgatttttcctgactggcaaggcccttcatgacctgtccccatttctgaaaccccctaaccaaagccacctaccagactgacgagtcttcgcacatcttcttgctcatcacatcttcttttctcctcctcctacctaactgaatcctactaatttattttcaagaatcaagattcagagaaagcatttaaggaaaaggagaaaaaagatgtgaaataagaaaagggcccaggtgagtgggaaggaaatgaaaccagcaggtgcccgtgctgctaaaggtgcacagcagtacgaaactcagaggctgcccctgccctggcggagcttcagttcctaaggtgaaatatcagtgtaattggagccatagaaatgttcatgatactttacttcttgacatcacttatgaaaattaattgctcaaaatttttatttatctcaggatacctgggacccagcacctgctcacaacattgtcactgaaccaaagagaaaataatccaaaagaatttaaaatgttacctgtatgaagcaacaataaaacattttctgatttattattcattccttaaatatattctgggcacagacttttatatatatatagtacactgaagcatttacacagtgcttacaaaataaaaaggtgcaatcataaggactttgtgtatattaattcaggtaaccctcaatacaacctggagggtgctattattatctccagttcataaaggagataaagggaatttaaataacttgaccaaggctacaggcctacaagtggagaatacaaaatgagactagagacactcgacgttcatgctctcagccgctactcagtctcatgtactacctagaagccaaacagatgctagtaattcagaattgaaccagatgtatattcccggacattgaagggctactcatagcttaaggaagataacattaagatgaataatcatatagacaaatattcatagtatattgtagtttgaacacaatataaatggttggaaatgaaaatgattagttaaccaacgctgtctacgcacagaataaaatatttgcatcataactatcatattatggaaatatgtctacaaagaaaaaggctta

SEQ ID NO: 315804 - DNA, 4001 bp, Homo sapiens
tatgaccatttcacaggaagggaaactgacgttacatgattgagtcctgagctagtgagtaacagagccaaaactcacacacaggtctttctggctatgacatccttgtgatttcaccactgaggtttttttggtgtgtgtgtgttttctatgtaagtttataagcgtcagaagtgcacactcacctccagatctatttaaaacaggagttttcaagaaaatacttataagacgggcgtcattgaagaaaatgtcaagtcgaaaaatgctgggctttcctcttctcattcagcctcccatcttctcgtttcagcttagtggacggatgttttcttggcaacatttctgttccaacaactaaataaccaacaactaactaaccaaacaaccagcatgcttagcctgtgctaggagatgtggggacagcagaaaagatgcccaggccctggccctccaggtcagtgctggaaagagaagtaaccacctgaagctaaagtacctggggtcaaagagaggtcttggaaagacgtagaaggaaatactgaagatgctgcttctggtgggaaattataacaataaaggccaggaggaggaaatgaaggtataatatgctgactgttaagccagcagctgcttgtagtccatattcgttttcaaggagtagtgagaaatagggttaaataaatatagggtggggcctgaatatgctgggtgatgagagacaacagaatttggacaccatgtgctgaacaactgggagctgtgaaggtttttaagctaggaaagaacaccataaatttgatgtttaagccagttctacacctttgcaaattgtcttagtactgatttgttacctgatgtaaactaactagaataattaaattagttctgtgtaaaacacacacacacacacagagagtgagacagagagacagagagagagagagagagagaaagtactcaaggctcccatcaacactgcaaagtgcctagtgtcttggagtatcaaaattagaagtttctcttaaacgtgatttgacatgaacaaacatcaaaggctacagagttccaattttaagacaataaagcagataggtacaagcaaccaggagtggagcagagaaaactatgtaatctcactggcaggggaaatgtcccaaaccaaatattttttagaatgctatggagtaccttttcttcaatgaccagtagagaaatccaatttttataagtctcgtatccaatgttaagctcacaaattgtctttttattcatgtgtattttgctagaatctttgttttaatttgttcttacagttaacatctccaagacacacacagtaagtctgaaagaactacattgcactatataaaaccagacgatgagataagtaacaaagtgcacagagctctgcttttatttattttgatgatttctctttctagattgttgtgtggacattaagaagagagatttccaaacagaatgcaggccttttctttgggatgtgggaatagaggtttaggaggtgataaatcttttgtaaaacagatatacgatattctatacacatatttcaaccccaggccctgggaaagtattttttgccttcttaacctatattcaaggcccaaactattggatgtattctaattcatacttacctgtgagcaaacatggaatcaatgcgtagaaaaaccacatgaaaagacttgtccagatttcttctagaaccattgtgaaagtctgcatttggtagactcagtttgacctagaacattgtttctttccaaaataaagcattctgtccatctcagccatctttcttcagaatgcatatgttggagctgaggtctgagtcgcagcgaagcctgaattgttctagagccggcccaggaagctcagaaagggcgggctccgaagcaccctcctttctgcccaaacccagatgttgcatcagcagggagtggcctaggagagttccagagaaaatgtaactttggggagcttgagaatctgcctatgagcaatacccggaccacaggctctgtcctaaaggactctgcacctccctaaaagccaatgagcaggcaggattatctccctccctcattaaatagctgtcctcttccaagtttctctctgtgagttcattcaagctgggtactgactagctcttttttctaatatgtacccacttcagaaaaactaaagatatttgaaaaaatttaaaatacccttctaaaagtcaggagggtaaagaataatatatagcttcatatttgcatgcatttgcaaaaagaaaaactaaaagaagatataagaaatgaacaagattggttaccttggggcagagaaagtgggaattggaaaggtggaagagaaaaatgggaacaagacttttgactgaatatctttgtatatcgtttgattactgagtcacgtgaatgtattactgaaaaattaaaaccaatttcaataggtggaagaaaaaccttgtgatagtatttagccctttaaaatttagcccttgaaggactttaaccaccctaatgtgcaaatacaatagtggaataaacatgggttctagagtataatgtattttggttcaagtttcagaacttacaatgtaaccttgggaaagttggtcatttatttattcattcaagaaaccttcactgaaggcctactatgtgctagttcttaggaattcaacagtccattccctcaacaagaatttcccaactagtggagaagatagacacgggaataatcataagtcaatttttaaaatgaagggacagcaatattcgtaaggaaacatagcatcactaaaaagaaacatctaacccagtttgtaggattacagaaagcttcctggaggaggtgactccaggactgggtgttaaactctggaaaaaaaaaaaaaaaatcagccaggaatgttgtttttaggaagcaagaagaagtttggtgcaacacgagaacaaggttgaaatggcgagaaatagggcttagtggcagacagaaacaggattctagagagttttgaatgccttattgaggagcttggaatttatcctgagaggaatgaaggtcaaaggaagggttcaaagctcaaatatgaccatgtcattccctgcatttgagctttaaaaagtttgtgactagggtggagaaaacagcacagggggccagattgaaggcaggagggccatgagggagctatggtagtgatccaggtgacagacattgttggcttccactaggtttctcatgtctgcagagagaaatgaccaaattcaaaagataaagaagatagaactgatagctcctggatattgagtgcattaagagggctggggaggaggagccaaacatggctttcaggttctgagtttgggtaactgggtggatggcagcacctcaagtgaaataatgaagtgggtggagtgtggtcaggacaggcaggattgggggtgctatagaaaaaggctgcaaatgttcagcttgcgaaatttgagcttagatgcttatatgggcaggggagtctctagtatataaataatctttgtctcaggttgattggtgtcaactttttagttgtgtttctttaggcaagtcatttaaactatctgctttatggttctcatctgaaaattgggaacaattataatagtgtctgactcagggctgttgtgaggattaagtgaaacttagaacaggatctggcacaaaataagtatacaataaacattgctgtatatctttttaccacaccatagtcaagaaaacctggtgcatattttccttgattccagcactgtgagtcagtggccacatctgtactttgacctctggtcactagctgcttgtacagtctctcactgctcctcttaagagtgcttcatacatggcctcaacgtctgtccccaatgttacctttgttctccatcttggcttcctgattcctctctcctaagttcgcttctgctcacagt

SEQ ID NO: 315805 - DNA, 4001 bp, Homo sapiens
ggttgtggctgtaaacataaaactctctgtcagtccaagtggaaatggtgttgccaccttgagtatttggaaaaatagaagaaagagtttgctacaaatatcccagtagcaaaatatttcctgccaattgcacatggtgcaatttgtcatctcacatccatgctcctgggcgtacctgtctacagacgatcctcttgttccgaccagtactcaacagaagatggcgaggaccgtgtctgtcgtgtctatgctcgtggctgcaaccccagcatctagcatagcgtcaggcacaggaccaatgctcaatgtgcctggccctgtgtggaatagaagcaaattagtgcacagccctaatgtgcaatgtgcggtgaaacctaacagaggaatgagttaggtcaggagagcagcaggctggggagtgtgtaacaagcctggcccacttttggtattttgcctaaaaatttcccatgcggtgtttcaaataatataaacaaatgaggtgatttaacttctaaaactttattttgctttgaaatgcaaacttttaacaaatagctacataaattcctttttcgataaccatgaaagaggacatattcacttaaaatagaaatcatgccaggtaataaaatgttcagtatggtaattcattaaagcaagtactaagtacattattcacatggctataaaagcaccatcacttttcatgtgtttattaattttaggctcaagggtattaaaatattctcgctctgtctctcctttttcccccttttttttggttccatttcatccttttttctgtctacatggaaatatgcttaccttgctttaggtaaatacattagtgaacacaaaaccaagtgacatatttcagcaaatttgggtacattttatatacaatgaaacaatcttggaaatccaagaacccctaccagaaagaaaaagcagaacgcctccttcagttagataaagtgcctctctctactttttgttgttgtttctttatttgtagatttcttgcttaactctgaaacttcctgagatattttattaaaccctataccctattttggaagctcatttattttctaagaaatcttggcagaatatatgttctcattttaattgcataattatctggagcggtggaaaacagatgtcttatattgatgtaagcactaacaaaaccataggtgttgttttcatatgactcaccttgccacggatttgcacatctcacttactgagccaaaacacaagaatagaaggttatacccagaatcaacatgacctgcctaatgatgcaagtttaatgggaccattattagttctgtccctgctaataataatagaattataaggagttttgtttcccctttttgttgtttacaagtttgtcatatatttagaagtcattgtttcttgcttttcctaaccctcctccccaccctgggtgtagtgaaattattaggaggtggagcacagggtattgttacagcccatgtcatagaaaaaagatatttatttgcttactctgtggtgagtgaagcatttgattcccacttactgagaaatgcggtggccatgcgatgagaagcagcggcagggcattgagaacgaaccttatctctgggtgcactttttaacttagaggcggttcttcactctttcatcatcacggctgtaatggttaaaaactctcaggcagcttccttcatgatgggatggcaacacgttttctctaagcaaatatggaggaggatttgtacagagcaactgtgcaggagctgaactggaactcccaacaaccaaactgctgtcaaacgaaagaatctctcgtccagatagccattatctgataactgtcttgtctgcattttcactctctttcagagttggtttgctctcttcaggagtgggaattaacttttactcatggtgacaaggtaaacaagttttccgtgggtactctaaagcgttgcatttctgttttgtttatgtgccttgtttggctacagtagttactgtgcctctgtctcctaggcaacactgacacatgatttgataggaagtaaggcctgaggagtaccctctccccactcactaggcaatagcagcaattctctgcccttagagaaccgccttagctcttctctgctttgtgagcaggtctggtaccctcaagtaaatatgtgtgggggatgcgtttctgggtgtgataaattgctgctgtctgtcacctgagatcatcctacacaaattgtaacaatggcagtgttggtctgtgggtgcacccaagaccaccttcctcacgtcacatccattttaccacccagctgtcttcagaatgcttcaatttcagcaaacctccttggcttttcctgtcctttgttccatttctgtttgattccttctggggaatttcgaggtggctagctagcaaagctggctttaaaaaagtagcttagcgtgtgaatagataagagtagtgcttattgtatgacccacggcagagagtagtaagtagttgcctttggaaggagaccttcagtctagcctaagcgatgagtgatgcaggattccctgtctccttaggagctgactgggagagtctcagacagagcagatgcagaaagatggtggcccaggttggatcagtggttctgtttgtgagatgagagacaggcttcctggaggcaatttccaaaaggctcagtgtagaagctgtgcaagtacagtcagcgtgtgtgcctggggttcccaaggtgaccattttagcagttgccaaaatgaaaccggagcaattgttatcaggttgaaaattgttgtcagacctgaaaaatgtgattttcctcggggaaaggggaagtaaaacaaggaacagagagagatccatttatttgctaagaggcacccagaaaagtttagatatagtatcaactatctggcctactcttttaagtcctgcccatctgtttatacatgtaacatatttgtcactaatgaaaccttaaaaatacttattaatcattgggaagacagtaatttctggcttaaaagcctgctttaatggcctctctccgtatatatatatgtatattttttgagatgaagtctcactctgtcgcccaggctggagtgcagtggcgcaatctctgctcactgcaacctctgcctcccaggttcaagcgattctcttgcctcagcctcccgagtagttgggattacaggcacccgccaccacgcctggctaattttttgtatttttggtagagatggggtttcaccatgttggccaggcttgtctcaaattcctgacctcaagtgatgcacccgccttggcctcttaaagttctgggattacaggtgtgagccaccacactcagccaatggtctgtatatttcttacattcatttactcaaatattcattgaatgcacctatgcactatgctaggcgcggtgaagggtataaagaaaattagatctggctgctccttccataccaccttcctgggtatatgatctttaattaactacgccaataaaaacaaacaaacaaacaaagcaaacacatgctcatacagaaacactgtctctatgtttctgtataagcacaaacgaaaaaatgagaggcagggactttttttttttctggcggggggttgcgggggggttgtttgtttgttttgagatggaatttcagtcttgttgcctaggctggagtgcaatggcgcgatctcagctcaccacaacctccacctcccgggttcaaccgattctcctgcctcagcctcctgagtagctgggattacaggcccccgccaccacacccagctaatttttttgtatttttagtagagatggggtttcaccacgctggtcagtctggtcttgaactcctgacaggtgatccacccacctcggcctcccaaagtgctgggattacagacgtgagccactgagcgaggcctgtttggttttttatggcaataattt

SEQ ID NO: 315806 - DNA, 4001 bp, Homo sapiens
aagctgtatgagatatgtactataataattgctatttactggaagctttgaatagtttcgtaacttgcccagtgtcacataaacatcattgacacaaaccacattaaatagctgaatgtagtttatttacatttctacacataggaaaactatctgctaaaatagctatttcccctccaagtgttggagtcaaacagttgaaatatcaatttctcatctataaagtgaacgtgagtttagaggtttgcttaggattacaaagtcttaattctggggatagaatacccaggggcagtggtgggagcagaactctattttttctaaaaaggtagctcaagcagcttcagaaatccccagctgctgtggagtttgagatgagcaggggagccacaggagagaagactgtgcaaagctgtgggatttttataaatttgcattcatagcctaagatggtgtttggtgaaattttggacacaaattgaggtgaggtttagttatttccctgtgcatcgtgggtgtccaacatctagtcttgtcaacttcagacagtttctagggtctatatcctgtagaaaatcttgtaagccagagggccttgggggatatcaattttctagtttccctacccttttgcaagcctctctcccttttattctcagcattacgcttaagttatggtagaatcctgtctgaataagatttgattatacctgagaaattcgttatgtcttatggagcttgtagaaagaacattctgccaacacaccttcatattgcatctgttcccaacctaaaaatacaagactcaaattggtctgtgagcaaactctaagttgaccttccactgacaacttagaggtaagagggcagctattctgaaagggaggggaggggtaaaatgaaataaaacagggtggagcttccaagggaacttataaattcttctttgcaaggtcacacctacatcctaattggaaaagagctgaaagagcctgcccattctgtccctcagctaccctttcctacctggtttcactcgtggagatacacacttctgtcagatttccaggacacacacagagatacacaaaatcatgttttccaaaacagagaggagattggtgtggagggtaagagaatgaagcctgagagggtagatggttggacacctgatgcaggatgagcaaggggtaaagttagggcagtgactggatacagagaaagtagaaaagtgacattgaacatggttagcccagaagtacatgttgtggtcctgcacagtagattcagattctggccaaacattgctttacatactgaggacacattataacctcccagaaatgaaatatatgcacttctgggccaatatggttgtcaccatatcagatgaaaggaaaaagtaattaggaattttaaagaacggtgcttttgcccctatcagttcagcttcagagatcaagaactgcctaatgactgcaggaacgaaagttcaaaggctccaggtttctcagttgcacctgtttgggaagggcctggactaacaaaagagaaaagcaacaggttcccacaggcagaaactcgatccagtccccgcacctcctggcgcccatgccaagcgccaccagagcgcggcccaggcctccactgccctgcccgcggccagctctgcaaggccacgccacaatggcttcctgtctccttgggtccagggtgggtaccatttttccaaggctcacctgctgggagccaggtgcagagcagcagccaaggtgcgggcagtttgggccatgccatgccgccccctttctggcccttttcagctcaggggcttcggggcactgcgtctttcttcctcagctgccgccccaggacgcaccaccttctccaaggaacccctcgggtttcccctccctcggcgcagcggggagggagcgtccgctctggtcccggggcaggtgccgcccggctcgtccccacctgcggcgctccccacggctccgcctcccgccccgcgcgccgccgtttcctgctccgcccccgcctcccgggggactgcggccaccttccctacctgctgccgcctcctgctcgctgaaacaccgtcccccaccccgctgacggagaagattcccactttcctccagaagttctcgggaaatctcatcccctgcaaatgtatccccctctccttctagaattatgtggatataactttctagggtgtgtttcctgcgttatatttccattcccttataaatacttgcaaaacattgttttactaaaaacacagtaatatgaagtttacacgtaatgtctgttcagattttctaggaaataaagattcgtatctaggccaggcgcagtggctcacgcctgtaatcccagcactttgggaggccgaggcgggtggatcatccgaggtcaggagttcgagaccagcctggcctacatggcgaaaccctgtctaataaaaatacaaaacagccgtgcgtggtggcacgcccctgaaatctcagctactcgggacgctgaggcccgagagttacttgaacctgggaggcggaggttgaagtgagcggagatggcgccactgcactccagcctgggcgacagagcgaaactcggtctcgaaaataaataaataaataaataaataaataaataaataaataaatatttgtttctagaaggtagagataaactagagaagttgactcaagtttctacaactataaaagtaaaatattatagaaaaataaaaagttatgggagtttaaaaaaatcctgctgcagctttccatagctaggcactgttcaagtaggtatatttatttatttattctattatttattctaatattctaatgtttatttattttttcttataaaaatattataagtaggtacatatttattttattttttcttatccttcattgtcactgagaagccactcacagacctcaacccccaccaaggttttgaccttgccagatcaaggttttgaccttttgctttgcaaagactttaggtctctttgcaccaggccacgtagcatgtaatctcagtctctccttccacggcaggaagcccaccagccatcacatttttcttcaagaaaaataaatgaataaaaattcattaaattcattaaacacagtttcaggaagctcccattctggtcactaaccttagaagtcgatattttttctcctgagcgcatgtcatgccctgctctgctgtgagggggccccttaccctgcgttgctgatatctttcatttcgcctctacccagaggagcatccttgtcctagatctgatgcgggatcttaacccagtctcttctccctgtctttccttcttccggttccctcctggatctgacttctcttttccccagtgggcctcttctcttccagagagtaaattcaggaagtaagtggccaaagatagatggtaaaatgtttaggagcctcataggtcttccgtggagggatcctagcacagcagcagcagcagcagcagcagcaggaggaagctgcagtgtgagggttgagggtcaggtccctcaaccccctctaaagaccctgtacatgctcccagcaacactgtgtatgtttggatgtctgtgatcctgagggatttgcatagtttccgggtttgtgaatagtcttcggcaagtgctcaattccagtctaaaaagacatgtgagccctgtctttcccatacctcccccccatacccctcagcccccgctttggtataaaggccattttaatattcatctaagccagcatttctcccatgtttgttccgttgaacagtagttccccggaatgttaatacacagtatatgaaaaaagggctctattattaagtcaattcaagaaatgctggattaaactaaatgaaacaatttttcaggacatattaaaccttagagtgttaatgtacatttgaatatagaaagaaatatggcactcagcattcccccaaa

SEQ ID NO: 315807 - DNA, 4001 bp, Homo sapiens
caatggcaagaaaatcagggcagacctcaagcactgcccctaccttaggggtttaaaagaacaaagcatgaatactagcaagcatttgggcagtttgaaagcctctggtggggaaaggatgcaggaacccaataaaggagtcagaaacttggtttgacactcctttcccagagagaagaggctatcagagatgtcttagacaacagaagccccttgtcttcaacctgggctgctagagcttggatctactctgccagtggcacccacctcttccaagaaacagtcatgttcctcctctttgagaaaatcaatgtccctggaggagatgatgcccaccaagcggctccccatccggcctgtgtctgtgattgggataccgcagaaaccatgccgggccttggcctcaaaaacatcccgcacgcgatccttggggctgaggaccacagggtctgtgatgaatccctgttcatatttctggaaagggatggtgagaaagggcatcgcatctttgaactactttcatcaggctcttgatctgaagcatggggtctctgcttatcgatccctttggcagtgccacaagaccaaatcacaccaacacatcttagagacatgggtaggctggaggcactgtacacctggtctattgctgctgctttaagaaacagaatctcagggtcttctcagtaactgaaccccatggtgggaagaaagaatactaaattagaataaacccctactcccaccccaccccacctcagtgcaattcccaggagcgcttgctaatgatcgttgcccttctgaccttcactttccgaacttcattggcctggaattcaggtgtacagttgtggtggatgaagccaataccgcctgtaagctacaggataaaaagagactactactaagtgacaagaagcaggactgaatgcctttggggaaaggcgatggagtccttgctccttcccccacaccccatggggctcaccgccattgctatggccatcccagcctctgtgactgtgtccatgggagaggaaaccagtggggtcttaagagtgattttcttggtcagagcagaagtcaggtcctgaggagacaaacgtcaaccagtgtgggaaagcatcccttacacctcaaggtgttactgagtcccccacaaaaaggcacttttgtatgacctgcatgctaacaagcaacatgatcctataaaatccacccccaagcccaatctggtgagttagcccagagaccaggtgatagtagcaccttagctcaccttgatgttcaggacccaattcctgatcatactcaccacctggtctgcagtgaagtcgatgtacccagggagaatgagaaagtcactgcgagggaagggagtgaattgggagtaaagctctcagcttagggcagcatgagactccatccccatgtaccaatcaacccgtaacgcatgtgagcagagagtggcactgacagagtctgtgtgtcacaggcacagcacaaggtggaaatgggtacaggggaccttttctgccaccgagctgtcatcagtgctcctggcaccctgacaattccatgtgtctggagcatggaatctccggcctgagattccaagcactactgagatgcttctccgtaccccaagcaccgctccagatgtctcaaagtgagccccggaggtgggtggccaattcccgaaacctgtcccccacgcccacgcccaaggcggctctcggaagcccccatctggccttttccccagggtgccgcccctctcttcgcccaggtgagccccataggcccgcacttgtaggtgaggccgtctccgcagttgaagagctgctgtgctgtgagtccgtcgtctggcacgtaggacgtgcccccactaatcaggtagtcggccatggccaacacaggacaccgccgcgtgtctccgaggaccgcgccgcagagacctctgccgtctgggccgcgccaatataaaccagccgatttcgtcactgcgctgcgcgcgacgctgacgtcagggcgtagtgcgcgcgggcggaacctacccgcctcgctgcggcgggggcggagctggcgctgaagaaacagcgcatgcgtatagcacatagtggccttgtcactgaggagctgccacttcacgtcccaccccacactccccgcaggacctcggccagttcaattaacaggcaagggtttacttctactgtcccgccgggctcctccccaaaataaagagacgttgttcactaacatgttgaaaagacgtgcttgtcattcttaataaacaactagagtaagaatacataagagaaacagagtggtatctttatatgatacacaagtgtatgttacaagaattccatcaggcacaggagcctcaggttttaaggcctcaatgttaggccaacaaaaaaaaaaaaggcatggtaaagtttttacttttacatctaaaatgtcacttgtcataaaggagggtgtaatagaaattgtctttaataaatcataattgaagttcccctcatttttcttccattaagatgctaagtttatgtctgatcatgaagaaagaaaagaacatcgttcccctgtggtcagcaaagtctgtcagcccagtggaagtcggctggggagattccctccagggtccatccatcattaattccatctctcttgaagatggaaaggggccacatttcttttcacagtccaagccctttccccaggccccagacaaaaaagagtcagccagcaactttctaggacatatgacactcaaggaaacccagagccaccatcggctgaggagtctgccgcagcaggtttatgaagatgcaaagggggcaaagttttcttttatattttaaacagaagcagcctgaaaggcttcgtaactacaccaataaaaaaaagaaaaaaaaaaatggaggcctcttctttagtgtgaaagtctgtctggtttttcctggctggtttctcttgtgccatggccaaggcatctcagtgcatagtgcttgcattggccactgcgatggcctcctgaatttctcttatcaccaggatccgcgtcagcatttgtcccatctgctctctgctgataggctggactgagtaccagattgggctgttgggggccaccactggctcaggtgtcaggtaaaaggtgtcattccggcctttcacactctgggggctgaagaatatgcggataaaagttgggtaccaccaatataacttcaaccctcccaccctgaacttcccagacagatgctgtctgcaaacagtaaggccccaagttattgtggcacagctactgaattccatgcagccaccacacactacatcctggtcctcctttgggactactgcaaatcccccaaatgttgggttacttcccctctgcccctccttcccacaaaccagctgtgatccatcactgactgcaccagcctagggctctcatggactcatgtgagtctatccttatcctacttgaagccagcttcactgctcaaagcgtctatctccaagtctttgcgctttttttttttttttttttgagatggcgtcttgtctccaggctggagtgcagtgaggtgatctcagctcactgcaacctccgcccccttggttgaagcgattctcctgcctcagcctctggagtagctggaaccataggcacgagccaccaagcccagctaatttttgtattttttagtagagatggggtttttccatgttggccaggctggtctcgaactcctgacctcaggtgatccacccaccttggcctcccaaagtgcttggattacaggcgtgagccacggtgcccagcctcatgttgtgttttctacccaataatgatggccattacagtggggccctaaacttgggttcacccccctcccccgaactgtgctgtacctctattaagtacttggcatgctgtatcctctaacagttattcatccatccattcaagatttattcaa

SEQ ID NO: 315808 - DNA, 4001 bp, Homo sapiens
aagataaagtagcagctcagacagaaggttcatataatccagtgcctggaaaattcgggctcaataaacatttgttgaatgaattaatgaataaatgcatgaatttaaaagcctcattttacaatcacttcatcatctaatttcaccttgtttactaacatcacatccatattatggctttttattggttcttgagcagtaaaaagcaaagtttgggaatccttcaaatgtctaagggacatactaaggtcaattaagcaatttagtaaatatatgagaaacagaattgacttacataaaaagtatgagatcaagaatactgtttaaagacaaaataaaatgtgagattttgagaaatgccatcattttagatgtgaaaattttatgtgtaccaactagagagcaacctgtgtgaatctgcagaatatctaaactataaaatatagaaacattatatttgtatatataataactattaataaataggcaagcaggtgagtatactttggtaaagctattttgtgggtatacttaggcatttactgtaatgaagaagtaaaaattaaaattaatgtagcccaaaacataaactggtatttttgaagtgcttaaaaagatttaagacatttcctctctgaatatgttgttgaaattaatgaaagacatcttattgtgactgccctcatgtgaaaaaagtttcttacataacgcaccaaaagctacaaactcaaatcatgaaagcgttcttcctttggttcaaagtgcatgtcattattaaatgatattattgccttaactggagggcactggaaaaaaaacaaacctcctctcttaatgtaaactgttctctgaagttaccattaacactatattcttagcagtagaaaggtagttttggctcagtcctgtctaaattatcgtaaattttgatttacaatgttacctaacaaatgattaaactatgtttgaatttcattatggagctgaaggatttggatgttcgcttacctcggactttaaaatacttcacatgatttgccacagcctctgcaacactttcatctgggcagattttcactccattaggaaacagaatagatctccgccttctgattaaccactgtctttcagtttctctgcggtccagaggctgtttctttttggtagctagagaaaggtctgttgattcttcaggcaggagaaaagaaactgcactcttgggttcttggatctcctctatagataagtaggtttgtgctacagagtgaaagtatagtcaagtcttcgataatgaagatacagtacaaaaggtaacaactaaagaaaaactgacacttgggctacattaagatagagaagccagtgcccaaatcataggcaggcatgcatatctaaggaaaagaggagtgaggcagtccatctttttccatttaactcccactcctttcattcaagattgttatcaaaatcaagtaaatacacatccaatttcaacaaaataaataaaagtaaggtttaaaccagaaattactaatgagggaaaaccaaaattattggagatattttaaaacggtttaaatgaagccatatcaaagattaataaagtagtatttgattccatttcttacagcaatcacatcaaataatcctatttttgaagaacatatactacagatatggaaagataaaaacaaatgtagatttttaaatacctgttaatgatggaaagtctccttctatcaggacaaatatcaaaatacccagagaaatcttcccaaaaagaggaaacataatcatttgggccaaaaccaaaggaatgaggagaggacagaatccttaattgagtgtccaaatccttgaaacttccaataacaaagagttataggaaagacctaacatttaaaagtctatgtttgagaatgaacaaccacttcaaaaccattataaattagcggaaagaaaaatggttgtcctttcaaagtagctctcacttcttttctgaaataaccagcatgctataaaagctggtgagataagctaattagagcagatggagagagacaatttctttattctaatctacctaagctctttactaacactctccttgcctttaacaagcagtccactaagaataatgtgtttcacatataattcactgatttttccaacttttctgaatctgttagttctgggttttcctagggactaagatgtataagcataaaaagtccagactgactatatctacctatttcaataatacagagctacgtacaaatttagtttttgtaatgaaactattctcttgcaaatttccttccttgatagaaaaatcacttactttgtctccttccttacgtataaaatggaatagaaatagtaaactcatggtagagctaatgtgaggattaaattaactaattaactaattcaatcttcactttgcttagagtagtgcccggaacatattaagcacttaatataaatgatagctgtgcgataactttgttgcttaatttgccattaaatgtgaggcccagtgtgtttatctacatgaggaactcttaaccaagaaaacattttccctgcagatgaaattctctatattagaacagttttttaaatcaagtaaacctagtagaaagcaattcatcagaatccctgtggaagcttggatttactatcaaatagcaatgaaattatattttatttcatgttatctctggcaaaattctctgaaaaaaagtgtattgtaaagatctaaaccacattcctcttgagaatccttgactaattgtgttagctaaatcaccctcaatgttattttatgctttaggaaaagctcaagtatattttttcaatacagcctcaaataaaccacattttcagcctttataaaagctaataaacctaaatgaccattaaatatatttgcatagttgtatttgcaaaatactggtaagcttataagaaacttacttgccaaatttattgtatgagtaggagaaaaaagccgaaaattttattagctgagtcaaagtttaatcttaagaaaagcttcatattgacaattcagaacaagggacaactcttaggtaacaaatattagttggcaattattctttttgacagccttgaccaaaaagctaaaaaaaacttctgagaatcatagtaatctagaaagattcctgtatttagattgagaaaccctggactcaaatcttggttttatcacttaatatttgattttggtaaataacctaagctctttgagccggtttactcaccaaagaaattacatgtgataatctctacctgtatcacagggtcgttgttaagaattaagagacatgaaagttctctgtaaactactgtatttgtattaccagtaaactttgtaaataggaattgttttgtattacaagtgttcacagagtccaaacatgtttcaagctttgaaattctattttgctcaagctccaaaataaattttccattaacttatatttcaaacagagaattcacataaaaacttcttaaacatttattatattatgttctataaaatatagttggtataatttcagaaacctgtactttaaaaaaagaaatataagaaattagatgggttcatttgtttctaaatatggtcatcattttacaaattcaatttaacttgacatttatttgtaacttttaactgtaactttgtatctatgatacaaagcaggtgatgcccgctattaagtttgtgtcataggaatccaaaagcaagagtaactccaactagaaaaagcaagagggtgtgggggaagcaggaggcgggtatttcagctgcgccttgaatggcctacttggcatttcagtattttagtgggcagaagtaaggattgttagtgggaagaactaagagttaggagagaaatccctcgtcgtgatcaataaagtggaaaagtatactgtttataaagaaaataggaagatatttgctggagcac

SEQ ID NO: 315809 - DNA, 4001 bp, Homo sapiens
aggctggggcaggagacttgcttgaacccaggaggcagaggttgcagtcagctgagattgtgccattgcactccagcctgggtgagagaacgagacttcgtctcagaaaaaaaaaaaaaaagtaggcttggcgcggtggctcatgcctgtaatcccaacaatttgggaggcggaggcgggttgatcatgaggtcaggagttcgagaccagtctggccaacatagtgaaaccccgtctctactaaaaatacaaaaattagccaggtgtggtggcacgtgcctgtagtcccagctactcgggaggctgaggcaggaaaattgcttgaaccagggagtcagaggttgcagtgagccgagatggcaccactgtactccagcctggcaacggagcaagactccatctcaaaaaaacaaaacaaaacaaaacaaaacaaaaagtgcacaaagtattgtcgcttgacttcttagtcatctcatgcaggcatattctatgaccacatacaagaagactgtacaaagaaccaaagaggccacaggtcaagagaaatgtgttttggagcaatgagaactcttcctagacctgcacactctactgaggatctccaacttgcccaaattcacaggaaaggggcttgaaggtgttttcactgagcaagataattttagtactgttaaaagttaatttgcgccgggcatagtggctcacacttgtaaccccagcactttgggaggccaaggggggtggatcacgaggtcaggagttcgagaccagcctggccaacatggtgaaaccccgtctctattaaaaatacaaaaattagccgggcatggtggcgcgtgtctgtagtcctacctactcgggaggctgaggcaggataatcgcttgaacccgggaggtggaggctgtggtgagccgagatcgcgccactgcactccggcctgggcaacagagcgagagactctgtctcaaaagaaaaaaaagaaaaaaaacagttaatttgccagttccatatcatccacaacaaaaacaagtttctttttccgattctaagacactcctacgtttcctttgtctcctatggcgagcatccctttaggagataaaatcaagtcatcaccataatactcactttctcctaaagcaaaaagaggaagacattaccactctccaaaaagtggtggtgaagaaccaaagaaattatgttccaaaataaaactcagccattatggacatttaaccaggttctttgcgaggaaaacggtgagcttcgaggtacacgtgaggttccgaacgggtctcaggaagcagcagccaggcagagggtcccccttgccataatcatagggccgtgacaccggcctgcctggctcgcgggggctttggcttgcttcgtctagtcttagcatccagcgtcctgaaaatcactcgcaggaacgctatctaagaaagaggtaagtctatttctcagccaggagcaacataactcccaggagagcatcagggtggcaccggacacactttagcgctccggatcagcggagtccagagcttcggtcagagaagctggtttcccgctactagccggccaaccctcaggcactggcgctctccgtcctccacaccggctgtccccccggcttcggtgccagcatctgggaggctcggcgggcggccggtcaggacgctcgagcgatgttccagtgatggccccaccggagccccgaccccacacgcgcccactccaaccccgcgcccgccaccgccctccccgcgggcgtcaggccggtctatcggcccggctcctgtcactcacctgcccggcccgggcaccgagcgcccacggctccctacgggagctgggccccccgggcctccaggtttcggcccgccccctggcaggcagcacaggtggctgagcaccgctacagcggcctctcaccggccgcttggtccagctcccggcgctgcccactgggtacggatcaacaacaagatggcggctagccgagggggcgggggccgggcgtcatagtaaccaggactgcaaagaacccgcccccgagggggtgctatccccaatcaacagtctttttgctcgtcgccaggggaagtgcttcctgctgacaggtcagctcacgtgtcagtcagagtctgcctctcagggcctctgccgaaagcgtggggcacgtgactgtgacggcatgggttggcgcatgcgcttcgttcccggagtggctggcggcggagttttcgctggctactacgaggccggagcgcccttggcctctctgcgtccctggccctcgtgcggtaccggcggcgtcttgtcatacacttgcgcacacacagggaatctcagcggtgtgctattcgtttttttgtcccccactctgggagaaggggggtgcagcccccagttcactctggagaggaaactgaggctcagagaggggaggccgagccaaggtcacgccacctctagaaatggaggtgctgggtctcgcacctcctcctgctggtttcagagtgtgaggagcctctatcccagcttcccacgctttgtcccttactagcctcgaggtaccgcagtctgtgctgccacagcagcctctggctcattgcccatgctttcctgcctgaggtttagagcctagcacaagtcctgacacacagcgggcactcccttttctcttccctagagcatcttgtcttgagatcctgtgacagcatcttttgccctggactgtcatgaccggcctcccaagcagactaatggtcccaggaagatggtcacaccttgctccccatacagaacacctaactctgggcttggcttcaggcttagaacaacagatgaagttacgtggcctgggcccacacccaaatgccccaactagctaactctgacttttgagccttagcctctctttagctttggttgtcccatctgtaaaatgaagataaaagtggagcttctcagaggaagatttaatgagccctcagagcaggggaagaactcaggaaaaatctgcctacaaccacttcctggaacaacctgcttccaagttgctgttcctgaggcgtgccttaaaacactaactttggtggaagccccatgaagcgtttttgttttgctttgttttgttcccacagaaggctttcagcttcttcctggccctgggataccataactggttcagaaggggaggtcctcctagctaggcgcagtggctcatgcctgtaatccagcactttgggaggccaaagaaggtggatcacttgaggtcagaggttcgagaccagcctggccaaaatggtgaaaccctgtccctactaaaaatacaaaaattagctggacgtgatggcaggtgcctgtaatcccagctactcaggaggttgaggcaggaggatcacttgaacctgggaggcagaggttcagtgagctgagatcacgccaccacactctagcctgggtgacagagcaaaattctgtctcaaaaaaaaaaaagggaggttctccagtaccctgagggggttcaggcccacagactcaacagacgagtaaagactgtgataacttggatttaccacagtaaggtcctcttggagagctggcagaagcctgagacctgatgtcaggttgggcatggagagtgggccaacactgcatccagcaagacctgcccaccagcagattgctgcaggccacttggctacatgcaatagctcaggtcaacacagggagatgtgagagcagaggaaccagaagaaacagatcaggaagaaaagccaacaaccctcaaaagggggattctgctaatcctccaggaccagccatgccacaggattctcaagtctgcatcacccctcaccgcagtgcaaaagctccagatccttcccaagaaaacctccacatacagttggcaaattgccctgaagtttgatgggaccctcaaaaagcaacagtggtataactactgtggataacagttcggaggttc

SEQ ID NO: 315810 - DNA, 4001 bp, Homo sapiens
cattttggataggctaatctcttaactactgacctcaggtgatccgcccgcctcagcctcccaaagtgctgggattacagacatgagctaccgcacctggcctctttcaaaattatacattcagaggtgacaagatcctgatagaagtgcacaaagtaggctaggcgcgtgaccaggcacagtggctcacgcctgtaatcccagcactttgggaggccaaggcaggcggatcaggaggtcaggagttcgagatcagcctgaacaacatggtgaaaccaggtctctactaaaaatacagaaattagccgggcatggtggcacgcacctgtaatcccagctacttgggaggctggggcaggagacttgcttgaacccaggaggcagaggttgcagtcagctgagattgtgccattgcactccagcctgggtgagagaacgagacttcgtctcagaaaaaaaaaaaaaaagtaggcttggcgcggtggctcatgcctgtaatcccaacaatttgggaggcggaggcgggttgatcatgaggtcaggagttcgagaccagtctggccaacatagtgaaaccccgtctctactaaaaatacaaaaattagccaggtgtggtggcacgtgcctgtagtcccagctactcgggaggctgaggcaggaaaattgcttgaaccagggagtcagaggttgcagtgagccgagatggcaccactgtactccagcctggcaacggagcaagactccatctcaaaaaaacaaaacaaaacaaaacaaaacaaaaagtgcacaaagtattgtcgcttgacttcttagtcatctcatgcaggcatattctatgaccacatacaagaagactgtacaaagaaccaaagaggccacaggtcaagagaaatgtgttttggagcaatgagaactcttcctagacctgcacactctactgaggatctccaacttgcccaaattcacaggaaaggggcttgaaggtgttttcactgagcaagataattttagtactgttaaaagttaatttgcgccgggcatagtggctcacacttgtaaccccagcactttgggaggccaaggggggtggatcacgaggtcaggagttcgagaccagcctggccaacatggtgaaaccccgtctctattaaaaatacaaaaattagccgggcatggtggcgcgtgtctgtagtcctacctactcgggaggctgaggcaggataatcgcttgaacccgggaggtggaggctgtggtgagccgagatcgcgccactgcactccggcctgggcaacagagcgagagactctgtctcaaaagaaaaaaaagaaaaaaaacagttaatttgccagttccatatcatccacaacaaaaacaagtttctttttccgattctaagacactcctacgtttcctttgtctcctatggcgagcatccctttaggagataaaatcaagtcatcaccataatactcactttctcctaaagcaaaaagaggaagacattaccactctccaaaaagtggtggtgaagaaccaaagaaattatgttccaaaataaaactcagccattatggacatttaaccaggttctttgcgaggaaaacggtgagcttcgaggtacacgtgaggttccgaacgggtctcaggaagcagcagccaggcagagggtcccccttgccataatcatagggccgtgacaccggcctgcctggctcgcgggggctttggcttgcttcgtctagtcttagcatccagcgtcctgaaaatcactcgcaggaacgctatctaagaaagaggtaagtctatttctcagccaggagcaacataactcccaggagagcatcagggtggcaccggacacactttagcgctccggatcagcggagtccagagcttcggtcagagaagctggtttcccgctactagccggccaaccctcaggcactggcgctctccgtcctccacaccggctgtccccccggcttcggtgccagcatctgggaggctcggcgggcggccggtcaggacgctcgagcgatgttccagtgatggccccaccggagccccgaccccacacgcgcccactccaaccccgcgcccgccaccgccctccccgcgggcgtcaggccggtctatcggcccggctcctgtcactcacctgcccggcccgggcaccgagcgcccacggctccctacgggagctgggccccccgggcctccaggtttcggcccgccccctggcaggcagcacaggtggctgagcaccgctacagcggcctctcaccggccgcttggtccagctcccggcgctgcccactgggtacggatcaacaacaagatggcggctagccgagggggcgggggccgggcgtcatagtaaccaggactgcaaagaacccgcccccgagggggtgctatccccaatcaacagtctttttgctcgtcgccaggggaagtgcttcctgctgacaggtcagctcacgtgtcagtcagagtctgcctctcagggcctctgccgaaagcgtggggcacgtgactgtgacggcatgggttggcgcatgcgcttcgttcccggagtggctggcggcggagttttcgctggctactacgaggccggagcgcccttggcctctctgcgtccctggccctcgtgcggtaccggcggcgtcttgtcatacacttgcgcacacacagggaatctcagcggtgtgctattcgtttttttgtcccccactctgggagaaggggggtgcagcccccagttcactctggagaggaaactgaggctcagagaggggaggccgagccaaggtcacgccacctctagaaatggaggtgctgggtctcgcacctcctcctgctggtttcagagtgtgaggagcctctatcccagcttcccacgctttgtcccttactagcctcgaggtaccgcagtctgtgctgccacagcagcctctggctcattgcccatgctttcctgcctgaggtttagagcctagcacaagtcctgacacacagcgggcactcccttttctcttccctagagcatcttgtcttgagatcctgtgacagcatcttttgccctggactgtcatgaccggcctcccaagcagactaatggtcccaggaagatggtcacaccttgctccccatacagaacacctaactctgggcttggcttcaggcttagaacaacagatgaagttacgtggcctgggcccacacccaaatgccccaactagctaactctgacttttgagccttagcctctctttagctttggttgtcccatctgtaaaatgaagataaaagtggagcttctcagaggaagatttaatgagccctcagagcaggggaagaactcaggaaaaatctgcctacaaccacttcctggaacaacctgcttccaagttgctgttcctgaggcgtgccttaaaacactaactttggtggaagccccatgaagcgtttttgttttgctttgttttgttcccacagaaggctttcagcttcttcctggccctgggataccataactggttcagaaggggaggtcctcctagctaggcgcagtggctcatgcctgtaatccagcactttgggaggccaaagaaggtggatcacttgaggtcagaggttcgagaccagcctggccaaaatggtgaaaccctgtccctactaaaaatacaaaaattagctggacgtgatggcaggtgcctgtaatcccagctactcaggaggttgaggcaggaggatcacttgaacctgggaggcagaggttcagtgagctgagatcacgccaccacactctagcctgggtgacagagcaaaattctgtctcaaaaaaaaaaaagggaggttctccagtaccctgagggggttcaggcccacagactcaacagacgagtaaagactgtgataacttggatttaccacagtaaggtcctcttggagagctggcagaagcctgagacctgatgtcaggttgggcatggagagt

SEQ ID NO: 315811 - DNA, 4001 bp, Homo sapiens
atcctctttatgagccaaacaatggaaaattttcacctcagtaagctggcctcagggaggttcaggctcatccctgttgcctagataccagtgacatctcaggagcttacagaaggctctggcatccctcttggaagggagactggcaaaggttcatcagtcagtggttgctccttctttcctggcacattccactgctcagacagatacagggctagcatacagtgtacctgtctgtcacctaggaagctttgaaacacaaaagaaatctattatatctgttacactgatttctagatctcccaggtccctgccttgctccctccctacccaggccctgcataaaaaacaaaccaaacaaacaaaaagctagtttctacaattgtattaactctagtcagtgttcttatccatttcatttctttctctctctctctttttttttttttttttgtagagacagggtgttgctatgttgcccaggttgatcttgaactgctgggctcaagtgattctccatttgatttctaacaatgcctgtgaattctaaagtcacaaagcaggtaaatctatcgaaatgacaatgtcagacaagaccacagaaaatagaaaaaaaattttaaatgacagttaacagtttaactttttctcaaaaaaaaaaaaagttactaggccatcaatttgcctattatgtcaaatgtgataaagtattcatttggccctttctaactctgatagtggctaaagttaaaacaacaccctgaagcttctctttaaatacttaacacccaagttacacgatgcaattatacaaaccccacagcaacaacctatataaataagcatcttagttcacttaaaatattacctggctacaactgcaaatacagcaaacattttaaacactagaattcaacaaaattactgtaatcatggtcctctattaaaaatatcatagaaccgatgatctacaacatttttgttaccacgttccaaagtgccagtactttttcttaaaactattcaagatgattttttgttctgtgtacattctgctacggaaatgtttaattccaagcagtgactagttctgttttccctggtatttaagagcactggattttactggtttctacattttattttcactcacttttctgctagtgtagcttagttgatatatgagaacgaatacaatcctaaaatgaaataagccattaggatgcaaaagacaaaagcggtctgtaatcaaacgtaaagagtggaaatatcactataaaggtgtcctcttatccatttaaaggcattttttctataataaggttaagtgtgtagattccctcatcgaacaccatctgacgggcccaaatggcattcaacactcaaaatggctgcacatctgccgaccccaggtaacagtacctgaggcgctgagctgactccctatccaaagatccgggaagacccctccacccgccaaatatctggggagatcgtggccgccaatgacctggggagacccctcaatgacaccgtagatcttgcgcttcccaagacccggggagatctcaatgaccaggaaagatcctgccctcccccaaacccgggagaccccctccaatgaccggggaggatgctggacccccaaaaccacggaaatccctcccccaatgatcagaagaaaaaccctcctcccaaatgacccagggaaatcgaatccacagggaccccgggagatttcccccacaatgaccacggaagaagtctttcccaaataacctgggagactccaatgatcagagatcccgtttcccagtagcctgaaaaaatctccctcaaagctcctcgggcactagggccataggacgcgagctttacctgccgcctcagccgggttcctcggcgtttccgtcctattgtttctctcgcaccaaaatggctgcggccaggccgagccccgccccctgcacctcgctcccggtgcccctcactattggctcgtcctaggagctgcgcacgcggactggacagcctgaaaggcgctgttgctagggtgccaggattcgctgcagcagcttccggaaaaggcggtgactgggggcggggccagagagggcggagcattgtcctccgtctgggagggtgggccggaggtctgacgggcggttgggtggatagactagctgcgggccgatggacagcaggatacctgggaaacagatggattgaccaacagtcttggtttgttcagtagtgagcgatttcgcaggatgcaggaatttcaatgctaacacagagacagtccactacaaactgggaagttggtcactctagcagatggacagaagactggatgtgaatagacggaaagagggacaaaagagtgcctgtagacggtggacaaagaaatggttatagatacagacagacagattattagatatggaagggtggacagagaagtggccatagagttttctggggactggtggatgacccagtgcccaacccagctcccaccaagcaccacaccacagggcttgtctgaggctcatttgtcttgggcctgtgttggacagaagggctctcacctgagtgaatgtcagcatagctgtgaaaggcaaaggagagggttagtgccactgagaatgggcagagcctcctacctgatctctgctctttctgtaaaggagaacaatgttgcagccctgtgtactgggcatttgcaaaggtgtaaattcactcatacactttttaattcaacaagtatttattaagcacttacactcggtattggaaatacagcagtgaacaaaaaaggaaaataaataaatatccctgaccttataacagtggataggagagacttctgtgagcagctcctctcaccttagcatgtggtttccagggctccatgtcctcctggtttcctccagtctcaccagtttctcatctgtgtgttttctctttgtctacactcactcttccaaaatcttatccaggctcatgacttcaaatgccacctacatgtcaatcactcctaaaagtgtttgtccagtccagacccttcctgagtggcagattcactagtcccactgtcaactagacatctgcactctgacttccagttgctggcatctcaaacgcaacttgtgctaccctaacactggctcatccgccaaacctacttcaccccactttccccaaattgagtgatagcatctcagcccttcttattgctcaagtcaaacacctcaaagtaccccttgactactctctttcccatctatattcagtgcaccaggaaggtctgctgtctccatcagcatcatctacccagaatgaaatcacttcttgccacctccatacctttcactgagtccaaactgccaccatttctcttgagtgcaatgtcacagctgcctcctggtctcctcttgctgcccctgatgccttcagtctgttctgcacacatcagcctgtgaatacatgagtcagatcctcccattccctgctcagaaccctggagtacttcctccccaagggaaaaccagagacatcaggaccttcataattccctatcacccccccgactgtatctccccggccagcttttggccttgctgctcaatctcccagtgttcctcacacatcacaccccatgcactctcctgcacagtgtatgagttatggttgttcccatgcctggattgcacagatttccaaagagctgcaccccagctctcagagcccctcatttcagactgtaacctgccccactctgcccccagcactcagtaccacctttatcccctcatcctggctctatatgtttccatagcagttaccaccttctcagaattttttttttttgagacataatcttgctctgtcacccaggctgcagtgctatgacattgcaacctccgcttccagggttgaagcgattctcatgcctcagcctcccaagtagctgggattacaggcgtgtgccaccacac

SEQ ID NO: 315812 - DNA, 4001 bp, Homo sapiens
gtaagcttcatgagggcaacctacctatcccttagagatgattaaatgagttaatacatgaaagcaattggaacaattcctggcacatagtaagagctctccaaatggttattattaaagcccagttctaccatcatactacattttaagaccatctttgctggctgccttcttatatctttggttcacaactgtattcccagtggctagactagtacctggcacgtactaggatttgctaaatacaggttgaaagtatgagtaaatgcacaaacctcaggcattctgagcctcaatttcttgactttctgtttttctcttgttacaatagagaaagctcagatttatagttggaagcctctctaacgtaaaataggctcaaaacagtttgtgccctcctggctaccgtaataaaacatcactaaatcattattgtcatcaacaaatatgtgcagagcagtatggtagatgcaggggatgcaaagattctacacaagacatactctctgctattgttctggttgggaaagaaaagtatgtttatgtacatgtgtacacacacacagatacaaaaaaatatacttaagaatatcagatatatgttaaatgctaaatagatgacacagataagaatacaggccataaagtcagaggactgggcttctctgaaccatttttcttgctgtaaacaaaatagcaattcctacctcctagaatgattctatttagaagagaaggcagccaccaagatggtcttaaaatgtagtataagtgtagagctgggccttaaataaccatttggagacctcttatcatgctccaggaattgttctaattgctttcatgtattaactcatttaatcattccaacaactctaaggaacagatactattatttttttcccaatttgaacaatgagcatacttaaactctggagaatgtaattagctggcacaaagtcacactgttaagtataaagcaggggttcaaactagagccaccatctgccttaaagcatttaactacgatatgaaacagcttcggcacaccttcaaagggtaggatttacacagacaggttgaaggagacataaccacctaccccaaaatcaattgacaaatgtgcctaaggcagaaggtgagggagtgcagttggattgcgtaattaccctgaaaaaccacctgttatggaaaccatctgtaaactttctcgagtgtttctcctataattcaacacttctcccatctttacattaaattcatgaaatttgacacaaaaagacaattatttatctattttaaggctactaccctgttgccaggccaccgggtccggcccagccttgattcttcgggaatcacttctccctcgccgcgcctgttactgcctccacggatcactgtgaggaaaataaatgaaaaggaaattcagtgcgatcctgttgcggctgatcctaaatgtctgcagttgctatctccgaatcctctttctcctccccactacacatccccttctccagtcctaggaccacaagaaacttcctctggtacaaaaaggtcagaaaacgattactgaggtaacagcgtcgcttcaagtctaaggaccgagattctggggcctctgggctcctttactccagattctagacccggctttcgcgctaccaggccttggataagacactaggccctgtgcctggacactgcacctccccaggcctcagtttccacaccagatctctacagagtgggcgtgagggcaggccgattctcccgttaagagctcttacaagccggctgacttcgtccaggagcctggggtcctggcctcctggtaggcgccctggggccctctccctccccagccaccacctcagataagttacctcatcctcgcttcgcgttcttccactaaagaacctggggctcccacgccgcactacagcgccgcggccttccggggcagcgtgcgtcgcgacgcgggaaggggcctggaggcgggactaggagcctcggagtcaaggggcggagcgccctttgctaataagccaatcagaacgtgagacgctccggtggggcggtgcgcgtcgagcgcggggtggagtctgggtgacttggctggcgggatcaagtgcagctgcttcaggctgaggtggcagatagtgagcgctggtggcggagttaaagtcaaagcaggagagtaattatgaatagcgcagcgggattctcacacctagaccgtcgcgagcgggttctcaagttaggggagagtttcgagaagcagccgcgctgcgccttccacactgtgcgctgtgagtgaggaccatccggggatagagggggagcctcccgggatgggggtgaagaggcacaaacccctctgggttttgttcccacagtaccccttacactgttggagactacggggcggggaggggggaggcagcgcgatcctctaacctgctcggagtcttagggggtcggtggaaggaatcggagtagagcaaatgtgggtaaaccctggacagagagcgttgagaccagcagacaggaagggaaagtgtgaaaaaagtctgtagaggtgactgtggagacagacgtgacaggtggatgatgcaggggtggacaggaaaataataaggtgacaaatgggaagggactaaggaccgaatgccggggaacttgaatgccttgaggctggtggggcaatattctctcttttcatcactttttctcacctctggcagatgagggttcttatttggtgtgttctttgcaaagggagaaattctcaaccatcccaatgatctgtatatctctttggaccccagatttcactcagttatcaaatactgattatcaaagtattcgagggtgtgttattaatttctttatttggaagatgcttacctccctatgatttctaccctttggttttctttatgtcctctggaactagttttaataaattattctcttttatgttgttggagtagaaaaaggagctcttttgctttagcagttggatgatatagattccaggaaggaaaatatagcatataagtttttatgtgtaagacattcgttttttgcataacaactgtcatagaattgtagagcgggaaggaaacttcaagatcactgaattataacttctcatttttctgtggtaaaactgtaagtattttttcacttcctttccccagccttgcccttccttaatatctcatcattccgcctttctcagtcattctgttctcgggttgtttagagacctttatggtttttactctgaaatgttccatggttcaatcaaaacaactaattaaagcatacattctcccaaaagtttatttaagttgtagacaatttagttatagttactcaaagtaaaggtatgaagaaccactggttttaaccctgcaagaatatatttactaaaagggtttttttaaagcaaaattaacatccaattggtagaataaatgggtgagatatttgtgaacagaaactcttcaacagtgtcccttgtttattcttctttatcatatactttctcatccagagctccccacgatgagatggtgctgtgctggctctgcagtttctctctcttcagtcccattttccggaagtgtgatatgcgtctttatctggtttttccatgcctttttctcaaatagtatctactctctccttttctcttccttctcaggtatgcaatagtcttaatattaatttttcaagttacaagggcttaagattataaaaatttgcttaagaatatatttctatatgatttgggtatatattctcttatgtagggcacaaatcccaatttaaatgaataaaaaattgcctttgaaaataatcttgcaggtccttcacagcctttcatttataaaggttctgaaaatgccagtatcttgaaagtcagaggatcagatgatccagctaccagaatgaaaataaacaaaaataagcaaaacaacaataatgac

SEQ ID NO: 315813 - DNA, 4001 bp, Homo sapiens
acttcatgtctctcacgacagggaggaaacttagcattccttggagacctgaacggatgcagtgagcttaagaattttcaagagcttatcaatcagtcagcccttgttcatccccgaggggatgtgtggtggtattgtggtggacctttactggacgctctgatgaatatctgaagtggcacttgtgttttagtccaattggctatccctttcaccctggcatttcatcaaccagaggaaggaaaaataagacatcgtaaagtgagagaagccccttatgggtcttttgactctcacatctatttaaatgcaattggagtctagcagggaataccagatcaatttaaagcctaaaatcaaatagctgcaggatttgagtcaatattttgttgagagacaattaataaaaatatagattgaataaactacatatgctacaaccaacagcgatttattaactacactagagatggtgttaaaggaatagctgagcaattaggggctactagccggatggcttgggaaaataggataggcttagacatgataatagcagaaagaggaggagtttgcctcatgattaaaactcaatgttgtaccttcatcccaaacaacactgcccctgatggaagtataacaaaggcattgcaaggtctgactgccctgtccaatgagttagccaacaactcagggttaaatgagccctttacaggatggctagaaaagtggttcagtaaatggaaaagaattatagcctcaattctcacttccctggcagccgcaatgggtgtatttattcttgttgggtgctgtgtcacaccatgcgtccgtgggttggtgcaaagaggctcataaaaacagcacttactaaaacctcccttaactattctccaccttatccagagaagcttcttcttttggaaaatcaagcagaacatctaagccaagacatgttaaagaagtttaaagagaaagagctgtaaggaaatgcaagaggagaagttgttaggtatgagttctaaatttctcttcaaagaatcagtatgtcaatatgttcaattctttgccttctacttttaaacttaacttccttgtaaagcaacctttttcaattacctgctccgccctgactcattctgattacctactcccccctgactcattccgattaccggctccaccctgactcattccaattacctgctcagtctccaccctgactcattccgatttcctgctccgcggtaaccatttttcccaccaaaccactcaccccatcactctctttaaattagccaatcagaattagtttagcctgtgtggtctaaccctagccaataggggaatgacacagcagcaggggccacgtgcatcagggataagaaccccttcccctcccttgtccaagtgtgcactcaccattgctccatctgtaagggcgcacccttctatagaagtaccttgccttgctgagaattaaaaagaaaattttatatttgagtgctatttcttttgcggcacagaaacttcacttataacagcaccatgcaaaagacactagctactagcactaggacatgggatcaatgacatccaagtcagggctcctcctacctctgcctttgactctgctcctaaggacaaatgggttggcatctccttctgctgaggctcatcttcttttgagggttccttcgtcttttggggctgcttctcctcctgcaatcagcattaggggaaaggcaagagtgaggctgcggtccctccctctccattcaatatggcacacatccccagcttccagggcttcttagagtcttcagtgtcagggggtcccttcaccctgagagatctatggggacatccctaacaagcctggtgtgtctggctttctcttaccattggtcacatatggattgattgtagatggttcaaatcccctcacatctgtgttcatccagccatagcataggcaggaagggtggaggaagaaaggcctgtgatgtcataagggcacctgtgactcaggcaccagatggctcctaacaagtgagccccctccaagggaaagacaaaagcgctgcccattcttttctgccagaaatggccaaagccctgacttcaaaggcaagatgccagaaatactggcccattgctgtaaggtttataaaaagccagtcatttctaataacatttaattgaaaaaacttggccaggcgcagtggctcaggcctgtaatcccagcactttgggaggccgaggcaggcagatcaactgaggtcaggagttcgagaccagcctggccaacatggcaaaaccttgtccctactaaaattacaaaaattagctgggtgtggtggctgtcacctgtaatcccagctactcaggaggctgagacaggagaatcgcttgcacccaggaggtggagtttgcagtgagccaggatcatgccactgcactccaggctgggcaagagagcaagactccatctcaaaaaaaaaaaaaaaagaaaagaaaaaacttatatagccaacttaaataatcaataggggattaatttaatgatgcatagttcattcatactataaaatactacataactattaaaaataagaatttgatctatattactaatgaggaaatatataaagatgtatttataagtaaaaaactaaagttccttttgatcccactatgcaaacaaaactaggaacataattatacacataaaattgaataatttatgccagaagttattacatgatacacattatatgttgtaaatgaatataaagaagaaaaaaggtatatataccaaactattaccaatgattacctttggagaggagagttaaattgctgactcatgcctaacacagtccccaaggaaccccatgagggcctgaggaccagcctggactccatctgaggctcaaatgggtccaagtgctctcctgtcttcctctgtccctggggtctcaaggccacaatcagatggatgaaggtggccactgcacaagcatggcccctttctgcctgatctcggcctctgaagacccagctggacagggtaaggccatgagaggcacagcccctggggtcactgagaagtgcacttgaaatgtatagggtgagtatgggagaggccaatgtggatctgtagggggaatgtagggaagaggaggaggccatttgaggctgggatgtgaagttaatgggatgagggggtggagaatatgggaatacattgaaagatgtgggaagttgtgggtgtgatatagtttggctctgtgtccccacccaaatctcatcttgaattttaactcccgcaattcccatgtgttgtggaaggaacctggtgggaggtgactgaattatgggggcaggtctttcctgtgctgttctcatgatagtgaatgaatctcaagagatttgatggttttaaaaatgggagtttgggctgggtgcagtggctcatgcctgtaatcctagaactttgggaggctgaggcgggaggatcatgaggtcaggagatcaagaccatcctggctaacacggtgaaaccccgtctctactaaaaatacaaaaaattagccaagtgtggtggttgacacctgtagtcccagttactggggaggctgaggcagcagaatggcatgaacctgggaggcagagcttgcagtgagctgagatcatgccactgcactccagcctgggcgacagagcaagactccatctcaaaaaaaaaaaaaaaggcagtttgcctgcacaagctctctttgcctgctgccatccatgtaagacgtgatttgctcctccttgccttccaccatgattgtgaggcctcctcagccatgtggaactgtaagtccaattaaacctctttcttttgtaaattgcccagtcttcagtatgtcttttcagcagctgaaaatggactaatacagtaaattggtaccagtagagtggggtgttgctgaaaagatacccaaaaatgtgga

SEQ ID NO: 315814 - DNA, 4001 bp, Homo sapiens
taaggctggggatgggaactgggatttctggctctgtcatatatcagagcagactggggcttcctatggccattgtcagtccaaaacagggtccttggacacagggggcaaacctcactgaaattctttctcagggagaagaggaggcagcaaggtccaagtctcaagaatcccattagctgggggagcccatgagacacaccagaccaggttagacctttaatagggacagtagacacagtgcccttcttgccagcccttaggagttgatgatctcaatgtggaactgcaggtgagtggctgtgaccacacagtggccctggaggagagcgcaggtctggcagttgtggcattgccagtggccctggatgatgtagatggcattgagcacctggcagtatcgccagcggacacgccacatacggaccaaagactggagcttgatcactgccctctctctggttgcgtaggcgatcagagctgcctgccgtttcttctccagcaccctcgacagcgtcatccgccaccagcactgaattatccaggccctgagggctgcatgcagcagtgtcctgcgcaccagggtgccccgccaccaggcctggatctttacagctgcttttgttcttattctaagtttttcctaggcagagacaagagcgatcagtcagaaaacttcctgccaccaacttctaggatcttcctggaaggagcctggattttctctctcaaaacacagcccttcctcagaattcagggaagttagcaggacactgactaggagccatcagacctggtggtgaccttcctctgccactgtgggcacatcacttcaatcttagagtcacagagttcttctgcagactatttctgcagtgcatggatcaagggaaaaaccattagtaactagaagggtgcaatagggatgtgtgggaccttgttagtcacactcacctctttggtgctcactgggtttggaaaggcctcataaccttctgcctggtaattatctgctaattccagccccaaaccaccactggctgatttctgtctgctatgaccatattttgatactatggtaggttttcaataccctgaccacatattctactccaagtctttccatattttgaacagtctactctctaattccaagttctcacattctcacctctcagccttatgcatttcttgatggctttcattcttttttttttttttttttttgagaaggagtctcgctctgttgcccaggctggagtgcagtggcgtgatcttggctcactgcaagctccgcttctcgggttcacccattctcctgcctcagcctcctgagtagcatagctgggactacaggcactcaccaccacacccggctaattttttgtatttttagtagagatggggtttcaccgtgttagccaggatggtctcaatctcctgacctcatgatctgcctgtctcggcctcccaaggctttcattctttccaatcactctcaatatctcagtcaggcccagatccagacagcccagactgagaagagaatggaggaaaaatgagccaacattgagttgactcctaattagaccctggattgataagaggcaaagtcctacaccttatgatgtagttataaatgttctggatttctcttaagtacatggaattcttctcaccttgattttctgctgtttcttcttctgcaatgtcttccattcaatgctttcttcaacatcctcaattataaccaaaattaaattgcctttggtctgtcatcagaattaaatgggaagtacataaatgagttaagactgtttctctctatggctctatacaaagacaattactactttaacatcctctcttttctcaagtcctgtaaagcccagggagatacccacccattcctggtccacctaatagatctggccatgtctcttacacaaaatcgaaccctcatggcctgtccttagatggttcattagccctgatttctctgcttcccaaggtctggcatgagtaacgtgagtgaggagagagctctgaattcacaattgcattatgacatagggattgggacatctgccacagagatgtgtctctgtcagaaacaaactccaggggaacttgtactgtagcaggatgagctgcagacaaaacccctcagacactgggttaaagaaggaagaggctttattcccccgggagcattggccgacttgcatctcaagaaccgagctccctaaagaaagagttcctggccctttaaagggctttcaactctaaggggtccatgtgaaacctggccctttttagggctttcaactctaaggggtccatgtgaaagtgttgtgatagattgagagcacatgtggttagagttgggggtggggagggttaatctttcaatctcaggtctggtcagtggcaccagttggtcttgccactgacttcattcctgttgttcttcagcttttacttcctcattctcttcagagacaggagacagtaagagaaatggcctctctcctcagtaccatgtgtctgcttgcctcctgtcagagatgtgtcagagctgagggtggaaaaatagagcacttgagtgccattccatagcagggctctcctcatgtgaagtccatccacagtcccttctcattatcatcagcatggcaaagcagggaggaccatgacggtgcatccccatatcactctctagcgtctggtgagatttagcacttcctctcttcccttgactcggtgcctcacaaagccttaggaaactagaaaaagatacaccagatgaatctggaaagcagtcaaataaagatcaaaacttaaattaatgcatagaaaacaaagatgggtagtggaaaataaatttaaaaggcagtattctgacaagaccagttttaaagatacacagtttaccaacctgggtaatcaagagaatgaagtggaatgaaaaaggtgaaatagccacagggaaatttaaataaatacaaggaaatattgatggtgacaaatttgaacactaagagaaaatgattttctttctctctttttcttttttggagatagggtgtcactctgttgtccaggctggagtgcagtggtgcaactttggctcactgcaggcttgaccttcctggactcaggtgatcctcccacctcagcctcctgagtagctgggactacaggcacacaccaccatgcctggctatttatttttttcatttttttgttcttttattttttaaagtatgtatttattaagatatggggtctcactatgttgattgggctggtctcaaactcctgggctcaagtgattctcccacctcagcttcccaaagtgctgggattacaggtgtgaaccaccatacctggccgatttaaaattctaagagttttatagctttagctcttacatttagatctttgatccattttaagttttgtgtatggagtgaggctaggttcaaattcattcttttacatgtggatgtcgagttgttctggcataatttgtcaaaaagacaattgttttcccattgaatggacttggcacccttgtcaaaactaaattgaccatagatatatgggtttctttcagactctctattctatttcactgacctatatgtctgtgtttgtgcctgtaccaaaccagtttgattactgtagcttcgtagtaagttttgaaatcaggaagtgtgagccctcccactttgtttttctttttcaagattgctttggctattctgaatcccttgactttccatatgaattttagaaccagcttgtcaatttctgcaaaagaagtcagctgaattctgatagggattatgctaaatctgtagatcaatttggggaatattgtcattttagcaatattaagtcttctaacctacagacacagatgtctttatttaggtcttcttaaacttctttttttttttttttaatttattttttattgatcattcttgggtgtt

SEQ ID NO: 315815 - DNA, 4001 bp, Homo sapiens
ctgaagcaggaagaaattgattccctgaacagactaataatgagctctgaaattgaattagtagtaaatagcttaccaacaaaataaagcgcaggacaagaaggatccacagctgaattctatcagatgaacaaagaagagctggtcccattcctactgaaactattccaaaaaattgaggaggaaaggcccctccccagctcattctatgaggccagcatcatcctgataccaaaacctggcaacaacaaaactttaggtcaatatccttgacaaacatttatgcaaaaatccttaacaaagtacttgcaaactgaatccagcagttcatcaaaaagctaatccaccacgatcaagtaggcttcatccctggaatgcaaggttggttcaacatatgcaaatcaataaaatgtgattaatcacataaacagaattacagacaaaaaccacatgattatcttaatagattcaggaaaagcttttgatgaaattcaacatctcttcatgttaaaaactctcaataaactaggtactgaagggacataacctcaaaataataagagccatatatgacaaacccacagccaacatcatactgaacagacaaaagctgaaagcattccgcttgaaaactggcacaagacaaggatggcctctctcaccactcctattcaacatggtattggaagtcatcttgtagcttcagaacatcaaggaaaaagaagatcctaaaagtttccagaaagaaaaaaaaataggtcacatcccacaaacaaaggaatcagagtgataaaagacattatattagtcggttcttgcactgctataaagaaatacctttaaaaaaagaaaaaaaaatacctgagactgggtaatttataaagaaaagaggtttaattgtctcacagttctgcaggctgtccaggactcatagtggcttagtaaaccaacataggaacaggaaaccaagtaccacatattctcacttagaagcgggaactgaataatgagaattattatggacacaaagggaaacaacagacactggggaccatttgagggtggagggtgggaggagggagaggagcagaaaagtaactattgagtactaggtttagtacctgggtgatgaaataatctgtacaacaaacccctatgacacgagtttatctatataacaaacctacacatatacccctgaacctaaaataaaagttaaaaaccaaaaccaaaactaaaaaccaccaacaaaaaagaacttcatgtaccttgtttaaaaaaacttacaatgataaattaattataaaaattatgaataattataatctagcatttataaaaattataaacataattataaattaattataaaaattgtaattaataaaaaaggacagtatgcatttcctgtcttattctctcccaaaagaatctcccatcactgagacaactatttttaactcttctgtatatttctcctatgatttacctctataacatgctatattgaaaattattttctcttttagatattacctcttgacttcttttcatgaagtgaagatttacctgttcccatccttctgctctcctctctatatgattatagcatcacagtttttggttcaataagcattcagggcttccatcattgtgattatatcctgtccatggcttagcaacatggcatattgctgtgacatagcctttcatgcatttcctgtctgtttttcctggagctcttgattgccatggtttgtactaatttatcccaaactttccaccaaaacttggataatccgtcaactctgcttttttcatggaccgctgcaccactgtgtaatctgggtagctgctcttcaagcctgctgcctggtcattcttctggggtaccctcaccccagcatcctaggaatttctttcccttcttccctgtgaggactctcctacttactggatcccacgtgttgcaggcacagttttactggggatgcagagccactctggatgctatgggataaggaattcataataggaattagaacatatgcgattgtgcaagcatctggggaaaagagggtactacattctagatagaaaattactttttgttcctttcctttttttttttccttttcttttgcttttttgagagaggatctctctctgtcacccaggctggagtgtaggaacacaagcacagctcactggagcctcgacctcccaggcttagtgaactcaaccaattttcccaccttggcctctggagtagctgggactacaggcacatggcactgtacctggctaattttttgcagagatggagtttcaccatgttgcccaggctcgaaaattatttttctctcagaatttgttctactttctgttagaggtttggatctgggtccttgcccaaatctcatgttgaattgtaattcccagtgttggaggtggggccttgtgggaggtgactggatcatgggggtggtttctcaaggtataacaccatcacctttagtgttgtcatggcagtagtgagtgagtgagttattgtgagatctggtcgtttaagtgtggcacctctccctctctcttcctcctgctcatgtaagatgttcctgcttccccttcaccgtctgcaatgtttgtaagtttcccaatgcctcctcagaagcccctatgcttcctggacagcctgcagaactgtgagacaattaaacctcttttctttataaattacccagtctcagttatttctttttttttttaaaggtacttctttatagcagtgcaagaaccgacaaatacaatgtcttttatcactctggaatgtgacctatttttttttttctttctggaagcttttaggatctcctctttccctgatgttctgaaactacaagatgatatacctagagatgtgttttggtttttctaaccattcattgtgttgggcagtggtttagccttttaatttaaaaattcatgtcatttactgggaaactttgttgtatttgcttttttttattttgataatttctacccctcaatttttttagctttctatgtttagaaatcctattaatcaaatcatagattgatcctcgaagtttctaatattttctacactatattccatctttttgtgtcagtttctccctgtaaggtgatggaatatgtcttcctggcgttgagtttgactatacgacctgttttggccaatagaatagtgtagaatgacagtatgcaagttctgggctgggctttaagaggcttgtccatttatgtttgccatcttaaactttttgatctactttctggtagattttctatatcttttaaagagtcattcccatcctctgaatattctttttttatagcacactatgcttgttttattgatttgttattatctcttatgggtctaagaatactaatgatagctgttagtggtgtgtgtgtgtgtgtgtgtgtgtgtgtgtgtgtgtgtgtgtgtttgagacagagtcttgctctgtcacccaggctggagtgcagtggtgtgatctcggctcactgcaacttcctcctcctgggctcaagtgatcctcctgcctcagcctcccgagtagctgggattacaggcacctgccaccacacccagctaatttgttgtatttttagttgagatgggttttcgccatgttggccaggctggtcttgaactcctgacctttagtgatttgcctacctcggcctcccaaagtgctgggattataggcaagagccactgtgcctggcttgtgtgcggtttttaaccttttctcttgtctctaatatttcttttaagcccttctcttctgtttttgtttttgtctcagttttctcagatagaaatcccagaaccttgggtaagagagtaggataatgaaacctgtctgcaagcctttggggagctgatttggcagagagggctggaggcttctctatttagcctgtacactttcacatactcccttggt

SEQ ID NO: 315816 - DNA, 4001 bp, Homo sapiens
ttctccacatggaaaccaagacaacccctgctgattcctcacagctgacttgtgacatgcctagtatttcccatcattatctcaaacaatgacctcctgaaaatacatctgatgaagagagctggggacacagatatagcagacctggtcattcttttaatggaaggggtatgcattgttgcaccttacaagcctgtaagcccaaagagatttcaagttgaatattaagttggttttctttgagttcatagtggccctcaataaagacacgggaatggcagctgtgccagcgccaatagacctggatgatgcggacagcgttgagcaaacgacagtaacgctggcggacacaccacatgcggacccaggactgcagcctgactgctgcccattcctgctgcacatagaactccaacaccatcctccgcctctttgccagcagcttctccagcacctgcctccaccagcactgaatgatccaagccctgagggctgcatgcagcagtgtgcgtcgcaccagcatgccccgccaccaggcctggatgaaaacagctgcagacctttctgtcatgatggtcttctcttctgggccttacaagagaaaacagacacactcagggtatgctaggaaggggccctgatcctctatcaatgatggctccttcctctaaagttcagcactgggcagggcaacagctgaacccaggagaccaggtaggtgtcccccctctgccacccacaggttagtggatgtgctcacctcacttgacctctgagtttcaatgtccccatctgcaaaataggtgtacatctgccctagctacctcattccattttccatggaccttgctggccagtctagagcaagaacactgtgacttagaggtaaaagagctgccatctacctgggatccatgactcttcccttcagagccctcccatccgctgaagaagtggtgtcctttgctcctcctgccctctttactctgacttcaagtcaaacccacaagctgctgtgttccttcctcctcaccaaagtggtaacagattcctccacctcacacacattgtgaacagcttgaacttcagctatgcatgcatctgtacaaacatgcacactccacacactaacacacattttgccccttggtcctgcattccccacagtccccacttgcagcccccagccctatatggtccgggatcacactcctctgccccactcctggccacagtctccactccgtatctcagccagactcacatctctccgcctgacaagaaaatgggggcaagagacagccagtccccattcattccagctctgcataccctgacgtttcaccccagtttttctggaacaccctgattgatgtcaggtaatgaggacaggtgcctgtttccctcactgaagccactctttgtacaataaattacagggtcatagatctttgagtcactctgctggaccacaggggtcagagatgtcactagttaaggctctctggacccagccactcacggagttgtgggtaagggtgtggcctggtaggggtgagggtgttgggggtggagtcgcttccctcttctcccctttgttccttccagctctgttctatcgatgtgatttcatcattatgtttaatgatcatttaaaacagcttgccatccttctggaatcagagtgtatggggggaaatagggaagaaagtgaaaggtgctctcccactgctaggtgccaagtcaaacaccattctcactgtttctagacagcttcctggctttctctaggacttcaaacatggaggggggtcctgtcatgagtaactgtggggaacttactctcccctcagaaagctagtgtggttctgactgcctcttacaaaacatctgactggggacaggtcgtaaaattcgcacaggtctggactttactaaattacccatggttaggggctagatggtcccatcaccctccggcccgcactcctccgatcaggactccaacaggaagagtggaggaagggcgggacctgtgatgtcataagggcacctgtgatgcaggcaccaggacagcttccagcatatgagcctcttctaaggaaaacctagaagaccccaagtactgacccattgacacaaaggtatataatgctgctcattaaaatctggctggtattcattaaatgcctttcagttcctttacaccctggtattccaaataactattagaatgggtttgctctctatgtacagatatagaaaagtacaagatttcataagtgaatcaaatcaagatgaaaggcaaggtgatcccaatataaacacacatttatacacatgtgctgtaaaggcattatcttaaaaaggggggatagaaggatgtacacaaaaactaacaatatctctgatgaggacggtggaattggagggacacgaaaaactccttcactgttgctaagccccctatgtctgacctatctgcaggtcagtctgtttttaggcacctgagaggacaggacacacacaggccagaaaactccttgaggcccccaggactagcctgggctccatccaaagctcaaatgggttaaagtgctctcctgtcttcctctgtccctgagcacctcaaggccacgatcagatagatgagggtggcctctgcagaagcagggcccctttctgcctgattgcaacctcttaagacccagctggacgtggtgaggcacagcccccgtggtcactgaggaatgcactgggaatgtgtagggtgagtatgggagaggccgatgtggatctgtagggggaatgtagggaagaggaggaggtgctttgaggatggcgggggtgtcagtttgaagttaatggaatgagggagtggggaagacagcaatgaggtgggggatggggaaatagtggggtacaatgtgtaggacagagagggagcaggaagcacctatttgaagataaagatcttggccaggcccccgggagacctctgtcaatttagtgcctccatcagtctggctcctgagtcaagccactagtcaccacattcctgtccgtggtaatagcaatgcagtgatattagtcccacttcgcaatggaggtgcagagatcatgcctggctcacgtcaccctgtttcatagctggtcagctgtggagctagcatttggtcccagctctgctccaccctgagccttggctctaaaccaccacatcatgcagaccccagcatctccatgttttcccaaagcttccggttctcatcgtttctagaaaaatcccgctaaaaaacctccatcctgaatcttaaaaaattagccaagcaaaagaagccagactctgaagaaggcacactgtgaatccatgtgtgtgcactgcagtggggacagctgtcgtcaatggggacacagcagtggttgcccagactttgagatggagactgaatgggaactatgtgggtaatggaatgttctagattttttctttctttctttctttttcttttcttttcttttttttttttttttttttcgtgaggcagggtctagctgtgtcacctaggctagagtgcagtagcacgatcatggctcactgcagctgcaacctcctgggctcaagcaatcctccaacctcagcctccagaatagccaccacacccagctaatttttgtattttttgtaaagacaaggtttcaccgtgttgcccaggctggtctcaaactcctaagttcaagcaatctgtctcagccttccaaagtgctgggattacagacatgagccaccacacccagcctgcaatgttctgtattttggttgccaagatggtcacacaggtgtataaacttgtccccaaaaaaatcaatgaaatgtacatctaaaatggatatatatgtatgtaaattatgcctcaataaaagctgatttaaatacctctacccatctcatttataacacagagatcatcatactaggatccaagtgtgtttgggtgtta

SEQ ID NO: 315817 - DNA, 4001 bp, Homo sapiens
gtgagtaggaggtgggcagagctgtatccagcaccactgaatgggttcccttggaagagcgggattcagtcagaaagtccaggtacccagttgcttcactgccacctgcagctactgcagatgatgggtgtcaggctgaaccctgagccctcacatctgctacagctgttctggagactcacccccaacacacacacacacacacacacacacacacacacacacacggattagggaaagtgtcacccagctgcaaggcatgaagacccctgcacacctcccttcccaccgctcctgcagggcccaccatggaaaaaccctgcggagggttgcagacctcagacttctgggatggaggttcacacaaacatctgagggacacaagctgagagtgaggggccttgggcatggatgacaaaccagagacagtgagagaccacatgagagatggttgcgccataggtgcccagagacagagagagacttagcaaagcagtagcccagcagcacccacccaaggcaggcccagcagacggtgaggcatcctggggggaggccagagaggggacatgggggtggaggaggagcacagctgcttctgaggacattataggatttagaggctgtgtgcccaatgacctccagtggcagagggacaaccctttcccctgcctatccctagtcctctgtttgtttacctgcccccatgccacccccacaaccatccccccacagcccccaagtctctctcccctccctgatcccatgcctggttctccaaggaagtgcccagcagaggggagggaagccttgttgttcagccccagggtgggcaggcggcaggcacagctgctgccctcagctcctgctctggcttccccaggggctggctctggctggctgctccctgactcccttccccaccataaggcacagcgtctgtcctgctgttgcccagctgaagtgccatgtcctcctggctccctgccaagcactctgccggccctgagggccttgccaagcacaggcctgtggaatcctggccttcccagctggccctggctgcagccagattctctgatcttctgatctgaatggagatgcctggacaggggctgcaggaaactaaagcccaatgcctactcccactgtggaaggggccaaaatcaggctgactgaggcatcattgcttgacctgggccctggggtctctcttggatgcaagactgtcccggtatgctgttaggaacaggggcctaggttggtgacctgaggacaggggctctagaccacaccagggaatctttctggggggaaggcagaaaacttagaggctgaaccctcctccatgagtctaatctccaaagggcaagtgtatggtcagtaagggtctttattggaagagagatccagcctccttggctctgtcagcgccctaggtcatgaggatttcgatgtcaagctccagccggctggctctgacctcatagtggccccggatcaggcctcgggtttggctggcatgccagcgccagtgagactggatgatgcaggccgcttggcgtgcctggaggaaccgcctgcgggcctgccacattcgaacctgtgcctgcaccttcaccaccgcccactcctggcaggtatagagtcttagtgccaggcgccgtctttgctccaacatcttggcctgcattgacctccaccagcactggatgacccaggctctgagtgctgcctgcagtaacgtccggcgcaccatgtttccacgccaccatgactgaatctttatggctgtcttctctaactgattgggggaaaggaaaaacagggagatgctcaatgggggaccctcccctcctgttcctatccccatctctgatcttgggaggaaagaaggcctggcccaggtgcccctgacttcttgtttctagggcccatccatcttgtttccaatcccccactcacatttagacacggttcattacctgtcaggtaagtccctactgcaagggccttactcacattttgcgtgtccatggccttgatccttagggtccacttatctgtcacttaggccacccttgtctttagccccaccctcaactgttagtcacacctccatcattggactccgcccacttgcacacaagactctacctcatcaggtcccgtctgcacgcattttaaccacatttctctctcctcttctcttgctttcatctcttttgctttattgattcccaccactttgggagcctaccattatctcttgccttcagtttatttctcagccccagtggcattcctgatcctcctgatggcagtgaagagagagtcatgcagcttacctacaaggaaggagttttactttaagcctctactcatagccaatttggatttcctgaagcttaagtgtcagggcgcctgtcagggcccgaggaacgtgtttacagagctgtatatttttgggtaaaatttgtgaaagcaagatatttcagctgcaattggagaggacctctgtctctcttccctcttactccctctgtcactcacctcctgttgagtggggtggaatggcaacctcttttgccacgagactaagggaaggctgagttgggatagactcagtttttttttttctttttttttttgagacagagtctcgctctgtcgcccaggctggagtgtagtggcacaatctcggctcactgcaagctccgcctcccaggttcaggccattctcctgcctcagcctcctgagtagctgggactacaggtgcccgccaccacgcccggctaattttttgtctttttagtagagacggggtttcactgtgttagccaggatggtctcgatctcctgacctcgtgatccgccctcctctgcctcccaaagtgctgggattacaggcgtgagccaccgcgcccggcctagactcagtttaacagcatagatttgtgtggttcacagtcacccttgggaacacataaatccttgctagccattctgctgttgctgtgttcattcaccttgctcatggcgtgaagatgcaggaacagaagggctgctatccaataagaacgtgtcttccagtgctggcaccaaaagtatttgggcaggggaggaaaagtaaatgtgaaaagtatggaaccagaagccagtctgtagaaaattcttcctgttattagatgtgtaaaactataagtggaagattcaagtctcattgatgcctgattaaaattgaagctctctcttttcaggaatatacttgacaatgcaatgatacaattttaaacatttccatacttttttcttttcttggtgggaattttgtgaaatagaatttatctgaattcctgtgattgtagggcacaaccagcagagctactgtaaacaacgtggaagtcagtgtgaaaaatcacatgctttatgcataccaaatgtcaatcataagaatatttctgtagacaatgcagttgtaaaatcatcctatgaagaaacattaaaaggttatgcagctgaaatgtaggaaaatatagaggtgggtcagttaattcatataaatattatgtttgatgtatttatcaacttaaaaaatgtataactgttgtaatttcttttctcatctttaataaatactcactaatttgacatctctaattttgtgtgcttttcttaaagtaggctttctaaatgatatgttttaggtcccacaaaacctggctctgtcctgcctcactgtaagaatgcagttgtgcaagcagatctcctgggagctcacaaaaagctgtgcttctaggattcagaattagcacaggccattttggctctggctttagcacacatttcattatccatttttctgcaggaaggtttgctgggtgcccacggcttgtagggccacacactgtccatggcttctgtttatatgtttttgaggatcctgctgcctcatatcattgctatggcactgctcatctgggcatcttacaggttctgg

SEQ ID NO: 315818 - DNA, 4001 bp, Homo sapiens
accttttttttttttttttttttttttgagacggtctcactctgtcaccaaggctggagtgcagtggcaggatctcagctcactgaaacctccccctaccaggttgaagcgattcttgtacctcagcctcccaagtagctgggatgacaggcacacaccaacacccctggctgatttttgtatttttagtagagacagggtttcactatgttggccaggctggtctcaaactcctgacctcaagtgatccacccacctcagcctcccaaagtgctgggatgacaggcgtgagccactgcgcccggcccatactttgttttaaaaagtattcttatcatgctctactaatggtcatcacctgcagtttgaaaaatgccttaactgacacttgtccaagtgatcctttcgctgactcgtcaggccagatcaggcttctgggcactcatgccactactttcccgcagagctgtgttcacaatttgttacgttagtgtcagtttccccccactagacaactgttccatgaaagcagcaacatgacaacgatgctcacagttgtatcaggtgctaagtctcagtgctcaataagtatttgtggaacgaataatacacgagcaaacgaatgaaactcacacttaatgtgttattcctcccaggaggacttccatatagaactttgacaaatcaatatctaatagtgaaatttctagcacatttctttctgggacagggaacactgggtggggtagtaggctacaaggtacaagttctatcctgttgtatttaagagaggatctgattttaaaagtgacttatatacatctatttcatacaacttcggagtcatactttactctctctcattcctcatccaccagcaaatcttgccagaatttaaatatattcagaattccagtactcaatatcctctgtttacacaccatcacctctcatcatagtcactacaggaacctataattatcttcctgctgatacccttgcctcccttcactttcaacacagtgactttgtcaatatagaagtcagatagagtcacccttctgttcaggacccttaaatagttcccatctcaaagcaggggaagcctcttttacatacttcccatctcaaagtggggaaagcctcttttacagtggcctctctgcttaattttcttcacagaaattatcatcttctaacgtgtcatctatttttacttgctcattgtgttgctccgcctcgtaggatataagctccacgagggcatagatttgtttactgccgtgtcatcttacacaaaccttggtacagggtagtcattcattaaactatgtgttaaataaatgaatgaatccataggataacccaaataaatatgcaataattcggaaatgtgaatctctggcgtccactaatccacctctacaagtatctacggaggacctactaggtgcggacacgaggcagctaaacgagttctcctaaaagggcgataaagcctcctgcaggcagtcctcctcatacctcggatccaaaaagaagaatggaggtaagaacttaagtcatttcattcattttttttttcttttgtagaggttgggggaggtggtctcactatgttgcccaggctggtctcgaactcctggcctcaagcgatcctcccgcctcggcttcccaaagagctgggtttacaggcgtgagccactgtgcccagtctcatttcttgaaagagataaataagtagaggggagaaaagaagtatagaaaaagaaaaaagagaaggaagaggtcctgctgccttcgtgctcccggcctttctcttccatgctagattaggatcccagaatttccgttctgtctattgctgtgtgtatcgagagaaaagcaccccactgttggcaaatcaatcttacagtcaatcattctttaggcagcgggaacatcctccactcagggttcgcctttccacctacggcgtccggggacgcaggaagtaaactaagttgtttctatggcaacgcacagctttggcggatttagctggctaccattttgccttcccttgttcccaagtagtacattttgcagcctaccaagatgaaaggacttaggaaaataattgtaagagtgctattgaatgtggcttatttcagtgcgaagccgatttccgaggattgtttttctggcgtttggagaagatgcctaaattgagggcggagtcgaaagatgtttaatcccacaaggccacgcggcggggcctcgtccttctcttaccgccatcttggctcctgtggaggtgagtgaagggtctgctgctgaaatttgggggcaaataaccggagtaggtttgttcctgtgccttggcgagtcgccggtgcgtatcggagtctctgccagccattgatttctacgggtttcaagaagagggagaacaggatggaggagatgttgggctgatggtgtttggtcccctgacacccggagaacggctgcccgggttatcccagttaaattcctgggcctgaacggagtgaaacgatgtttttgttcgtgtgcagttgtccatgaggcagtgcttccttcatccgtttcctcccagtccataccttccttggcttgtctgaccagtctctttcctcagcttttctcccccagccattgcataaaagtcttacgtgtgtgtttctctttaaggcttcatttcttttcctgagtgttgcctactgataacggcatgcattttctcaggcttttctgagagtcatttttgtgactcctgtcccttagttttgtcttcattctgaagtttgcttagataccagctgttctctgaggtttgaatgtcttgccggaccctgcgtttcatatggatgttctggcattgttgtccccgaactcctacatgaaactcccatccaaaaggaatttgctttaggggcttaaacgagaggggacgaggtgggaaacttgtgtggcttggttttaaactaatctttttgtttgttttaaggcctgctgggaacgggacttctaaaaggaactatgtctggaaggtacgcgttttaaatatagttctttatttttgtgtgttagacgtgaacgtaaatgcgagcttaaaattggcaagaaaaaacttagatgtttgctctgagtaacttttgggtgggggtgattacaagtcagattggttttttgaagcttatgtttcatgttgtgtatcttttgtgtcttaggctgtggtccaaggccatttttgctggctataagcggggtctccggaaccaaagggagcacacagctcttcttaaaattgaaggtgtttacgcccgagatgaaacagaattctatttgggcaagagatgcgcttatgtatataaagcaaagaagtaagtttatgacactggtaggttttgggtttttgagatctgcctcattttcttttttatataacggagtcttgctctgttgccgaggctggaatgcagtgacttggtctccctcaccgaaacctccgcctcccgggttcaagcaagtgtcctgtctcagcctcccgagtagctgggattacaggcgccggccaccacgcccggctagtttttgtattattagtagagacagggtattgccatgttggccaggctggtcccaaactcctgaccttaggtgatccgcccacctcggcctcccaaagtgctgagattacaggcttgagccaccgcgcctggcctcattatcctattgaaataataaacaaaagatttagctgaagtacttggtattgtttttttgtttttgtgacaagagtctctgttgcccaggttggagggcagtagcgcgatcttggctcgctgcagcctctgcctcctggctcaagcgattctcctgcctcagcctcctgagtagctgggcttacaggggtgtgccaccacgcccggctaatttttgtatttttactagagaatgggtttccccatgttggccaggctggattggtattgctg

SEQ ID NO: 315819 - DNA, 4001 bp, Homo sapiens
taagattgttcttgagtgtaatacaacgtcactgaagaacttgattcacaggaaattttaaaatttactcatttgagacagggtttctgttgcccagcctgtagtgcagtggtgtgatcatagctcactgcacctttgaacttctaggctcagacaatcccctgcccacaacctccagagaatctggtgcatgccaggcacgtccagccaattaaaatgttttttcggggtcccaggctggtctcgattcctggcctcaagtgatccccctgccttgttctcctaaagtactgggattacagatatgagccaccagctcagattatttcaaatcccaatggcatcccagcataaacaagggaaaattaggtgggcttttcagtctcaaatggagaattctaacatgtttctggctttgggggctggatggataatggtgcatttacaaagttggggaatcaggagatggttttgtgggaggagctaaagttgaatttgaggaagctgtaagatgttaacctgtggacatatccatgaagacagatgggtatttcaggtctgggttaggcatatggagaagtggatggtattctgagtggaacagacacacggtaagtggtaggcatctgagcaaagcgggggaaaacaaacggttgagactttaactcgagtaacttacatgtgcaatggcaaatgagactcaaaagcaaatacatgctcttccttactgagatgatgcagcatttgtaaataataaatgtatgtttttatgtttttctcctcccatatggaaattaagtcaaaagtactcaagtcaccgttgccaaaggaggagtcctgtggtttacaggaaagggcttgcgtggctggtaacttgtccactacaccattgaaacagctttgcctcctggctgggcgcggtggctcacgcctgtaatcccaacactttgggaggcggaggcgggcggatcacctgaggtcatgaggttgagaccagcctggccaacgtggtgaaactacgtctctactaaaaacataaaaattggccgggcgtggtggcgggtgcctgtaatcccggctactcgggaggctgaggcaggggaatagcttgatcccgggaggcagaggttgcattgagccgagattgtgtcactgcactccagcctgggcgacgagtgaaactccgtctcaaaaaaaaaagaaacagcctttcctcagcataacactattgttacagccaggagcttaggatgactggttccattctttattcacaatagcaatttatttgtggtattgtagtggaaagggcacgtttcctaagttacaaatgtggtttggaatcccaccttccactagttgtgggatgatacacacatttagtgagtatttacttgtaaaatggtaatacttaaaacaccaccccatcctcgtagctgaatctccacccatagtttgtaacttgaggttttccttctttcctactccttcatttcccagtatagtagcttacctattcaattcccgttgaatgacttccagctcagtgagttcgtaattttacttcttagtgtcatgagccactgggatttgtcccaatttcccattttgtatagttcctcacggctcagtttcgaaggcaaggtttccttaatggccaggatcccccttatctcaggtgcagtggcaattcttggctggaaactaaaagatggagttgagtaaaacagtaaacggtgtatcatagatttttataggaaatggcgttagttaagtaatgggcctaaagttggtgactcaggataagtaaatgaaagtattccactcaccttttcatacagaggactacactgaaagattttgcagagggttgtatgtacgtctaaacacctggcacctagtaggtgcatgtcactttggtaaatgaaagaactgaaaaactgcctcaagacacccacatacggccaacgcccgctagcctttcttcctcccacagccccactcacgtgggcctccaaacagcatttattggccggcttcgcgccacgagacgcgatggacgtgatcgccgccctcatcttctgcggcgaacttctagcgggtgacgctgtccaatcggaaagcgcctttccgccggctgggccctccgtctacccccagcggcgaggggcggggccggcgcgggcgcagaggcgtcacgcactccatggtaacgacgctcggcccgaagatggcggccgaatggggcggaggagtgggttactcgggctcaggcccgggccggagccggtggcgctggagcgggtctgtgtgggtccgaagcgttttactcctgttgggcgggctccgggccagcgccacatctactcccgtctccttgggcagttcccctccctgccggcaccacgtcccctctgacactgaggtagggcgacatgggcgggagcgggccctctcagggtaaagtcacccagaaggagcaggcgtaggagatagtgactgggagaaggtgtcctggatgagaaagcgaaattggggcagagcctgactcttacaggcctgggacccgctctcagctccctacaccctgcaagttggctgttaggcgctcagaacagtatcacttctgtgcggagggttgtgcttagcagtagccctcgaggagtggttttcaaacttgagcgtgcatcacagtcacccgacgcacatggtacaacacggattgccgccctcagtcccccacttagtgactcagtaggtctgggatgagtccccagagttgacagtttacgttcccagctggttggtgagatatgcttgtccggggaccactttaggaaccgctgacctgaagtttcgggaagacattgaacggagagccagatagaggcgttggtgggacgttgggggctcactggagacaaaattcaggtttcttttcacgttatgtcgtcactttgtttgctttacccggttcctctgctctggaagtgcctgcccgcctcccatcccatttttctctctgcttaaattctttgtctcatttcaaattccctaacctcaaggcagcctgctgaaaccaccacagcgcaatattcttttcattaaaaagtacatcgtgtctgtactccctcctggcatttaaccaagtactgctatgggataatggcttattttttaggcgtatcttgcctttgcagttagattataaggttccgtgggataaggtttgtgtttcatactttgattccttcacagtatttaggtcagaggtgggtccacgataatccatattctttgagaaagggagagtacctggggcagggctgcatgctgatacacctacacatgttcaattcagcccagaaatctaaagacactcatttttatggtaatttcccaaaatgttacatgcatactcttcataaccaagtgagccaaaatattaacttcggagtttatagcttttttgcagcttttatcatgctgcattttcgctgaattctttaaaaaaaatttcccacaaaaccctgcacttctctcttttaatttggattaaaataagagaaagagtcctggtccctaatacgtttcgctagttcctcatagagtatataaataccctgtcgtcctcactattctccttgttttaacctggacacggagtatagccaggagctacagtgttcactgtagttacgctaatgactatacctctgttcaatgctacaggaaattacataacttttttggttttggtggtgttggggagctacaaaacagttttactttttaactggttctcaactaaagcctgtaagttttgtttttaccttttattacgccggtacaaacaacatcagaataatttaatgaacccgcatggacccatcacctagctttaacacctagctttaaggttccgccattcttgtttcatatactttcagccattccgcagccccctacttgagttactgttcttttgaagttttttggta

SEQ ID NO: 315820 - DNA, 4001 bp, Homo sapiens
aaggggccatttctacatactgaaatgcatttttactgtactattatactttaattataaattgaacatggttgataaaatcagcatttagagttatgtaaatttttaaaaatatacataatcctctataagtacacagctctatatgtgataaaatattagatcttggatgctaaaaagtaagagtagctttcacactgaccttaataatattcatttttattgttacaactcagtcaactattttactgaagtttacaattgtccacaatgcgaagtaaatccaatgcaattgttgcttttataatcattatcatgaagcaaaaataatagccaatataaaataattaacctatttactacatcatcttaaatatattaagaaactacaagatggcattaatactatcctaatctgctccacttaacaagctaatatttaagatgcttccattttcaagtatcactacccaacgtacatttaaaaaacctacttgtgaaaaactattttaatttcttagaaaactactagttcaaagaaaacctactttgtgaatgctatttgacttgctacctcattttctcttctttacaaaaattagttaatattgatctcaaaaagagcataatgcaaagtgaaagaattattataatctgaagaccagaaaacaagtttctattacaaaagtaagcaatactcaagatcagttatttttaagcatatagcacattgtagtcataattagctcaccaccagttagaaatatacatacacatttttcaaaataagtcttttaaatatagtgttgcaagtatctttctagcttaagaatttgaaatagcaattaagtatgaaccttaaataattcatctttataactagaagagcaagtcccaaggatgtaaatctcacccaatgagacaagggatgctgaatatattattaattgctaagtaatctcttaatcttagaatctagcacccaacactagcaaataaataatgtgatttatgagcctgcactctcacgctgctttactagagttcaataaacacatgcagatcctaaatgtacagtgtgaatgtgattcctacaagccagaaaacatagaaggatttggctatagcaaatctaccccatctacttattattcaagcactagtatttagaatacctaaaattcctgctgaacactgcggatcaacgtccccctgaggttctccaaagcagaaccacatctcttcccctcagtgcttactgagttttaagaaggcaggtaacatggggtagaaattctcgtgcagcagcaatataactcttctctcccaattttcaaaaatcaacacctcctccccatacacacgcacacacacacacacacacacacacacacacacacacacacacaagaaaggagggctttttaaataagtgtttaaaacataccatttgcatgggtgtgaaaaatgtatttttcctctacttgctgttgttgtgtaagatatttacagatctgactagaaaatctggatgttcataggaagtgttgctttcaatgagattcctttagtgaaatctgtccgcacagacacatgtatacataaataatacatatttatgcacacatgcctacattaacaaggacacatgcacacgcacctagaccaataattaagcccacactgttctataagctctttttgacattttttgcatacatgttaattcagaagacagatttttaaaaaataataagcagctgcatataatgcacatcaaagtggcacgtttagaaaagcaaatacattaccagacgcattttgaagtttctggaacacctgcaggtgaaaggagactggatcggatgctggcacactgtattcctcagaatcacagagcgcaatgtgactgtgggggaatgtgaggcgagtgtgaggctggaaacctttgagttgagctcactctaggcatcagaaagcctcaaagaggggaaagaaaaaggcagcccacagacagctagatgagaaacttctggcacctctccagctcaggaatgaattctctgtaatttggagacgtatagtgatggaaatgaagagaaacttggatttacgggtgaatttgctcagccatgcagaaacaggcaggtaacagcctctcagctcattttaaaacagtcattgagaaacaagactgaatcaaaaaattaagaggcatcctgcttttgaaaaaatgaaaaggctactccagccagcttccctagatacctttacaaacttcaaatggatcattccatcagctatttgttgcgcattttattaatcccagtgcagaggtaaactggaaaatctaattccttttatgtagaaaactagatttattgcttctttttataatgcactttagacatataaacacatagatttacttgcagagttctcgtttctcatgtaaaaccactactgtttggtccagataaaatgctaaaaggcttgttcacagcttttcaaggaagtggagaaaaaaaaatgtttaatactcagaagctgagctgagtactgatatttaaatgtacagtttgaagcaaagagaatataaaggaagagccctgaaacattaagtggtagctaagaggtacgattatatacaagcattgagcaggcaggtggcttaagtctataaatttatacataattaagcataggaagaaaagagatttggcaaattaagttattagagacaatagctgttattttgtttaggtttacaaataggctaataatttctgaggagtgcacgtggacatcaccttgtctgaagaactcctaaacctcacaaatagagagcgaggtcgaaggcattgcacagtggcaatctatattcaaatgtaatgaggaggaggacaatattaccatgaagaatgttgtcatattacattgtgcctgtgtggcttaactactcatccaaccttgcaaatggccatttgcctggactcaatagcaaacgtgctattgatgggtgggaggaggtgggaggctgattttatttgttttaccaaggacactcctttgggaggttcggggataaaatgcctgggctgagcatgggagtcattctgttcaaggccacacatgcctatagtaaatttgaagtggaattaatgatgaccaattaagctatttattattttaactcttgaggtcaagggcagaacagtatttatgtttattgataaagagtcaatggtcagactgctgcagaaggccagactcacctttaagcacgctcgattgatacgtattgaccgaggcaccgccagtccccctcacattccactgctcaggcctgtttgcctagattctgttcttagctctccactgccatttgtttcatccatttgttcaacaaatatccactgaattacacatcagatgctgtgtagaacacaatgacccttaagatgagaactccctcaaggggcttaccattgtcaaatagtaccacaagggactcagcaggggatggacacaacagaattacttacaaaattcatgctcactgccatctcttgcactgtggattaccctaggtagcatgaggcaagcagagttcggacatgtgttttgaaattctctccaggcgattctgatgaagtcctccctctcacccataacagcagctgcaattcaaaactgctgttacagagccttggagtctttcaaggaggaaggcatcccatccgccactgcctccagactcaagcaacacagctgctcaagctgacctgcacttctgctcttgtggatccctctaccacaggaaggtctggatttccttggttcacccagagcctgagggcacaaggctgaaaatggatttggaagccaaagctgaaggcaaaagaaaccccaaatcttttgattcatttgtataacctctctgggcctctgttttgttttggtttgattttaatctgtagaatgagagggacgggcaggct

SEQ ID NO: 315821 - DNA, 4001 bp, Homo sapiens; identical to SEQ ID NO: 315820

SEQ ID NO: 315822 - DNA, 4001 bp, Homo sapiens
aatgtctgggggtgggacccacacagtttttttttgtttttttttttttgtttgtttctttaactgctcctcaagtgattccagtatagctcctgggctacaacccccaccccaggctagtatactccagggttccagtagaactgtgctgagcctcagtttccccatctctaaaatggggttcttagtgcctgcccagacaaggcctttgtgaggatgacatttctgagcattggaggcaagcaggcactgggccaagtaatctgaatatgaattgtcacatttcatcctcatgacatctcccctccccgatgtaacagccctgagagtttagaatttctctggcatcaggctcctgggcccaggcaaaggtgtggcagggaggagacagctgtctcaggaggacctattcccagccactggggtggaagttccacgctgggaaaggatttactatttgtttcagaaaatgcagcgagggccttgccacagggagtgagaactttggtgtgctctgctcgcatcgacaaaccaacctgtgagcttctccactaaaaaagcaagtgagcatcacagcgaaccagaggccaccgtcatccctcgaaccagaggccaccgccatcccccaaaccagaggccgccatcccccgaaccagaggccactgccattccctgaaccagaggccactgccatcccccaaaccagaggccactgccatcccccaaaccagaggccaccgccatcccccgaaccagaggccaccgccatcccccgtgggttgccgcctggcactgctgacgcagcagaggcagaggtgtgtttactttccctcagtggaggtgacggggagctgccactctatcaggggttccacaggcccctgccatggtaaggggcctccatcgattagggaggccttggggtagcccccagaaggctccccacatactgctccaggcctccttttcctagccttgcgactgagcccagctcaagaggactcagccatgctctctaacctcctaaggtctgaggtcactgcacagccccaaatgagtgggtcctgggcaaatagtttaggcaggtggagacctgacgctgggcctcaacccccgcagccgagggtcccagaggagggcaaaggttgctcctcctagaacagcacagtgcagcgcccagagagctgtgagggaagctggcattcgaaccccactgccccctgggaagcctggctaaccgaagcgcaggctttggtttccataaatacccgggcccgtgatgtcaccgccccgtgcagactttcacagcctctgctgctggcgtgaggcccagcacacagccgctctgctgccagcccacagaacacctgggcacacagctggacactgatgcctccgtgctagggacggtgggctggaccttcacctgcccttggaggacgcagcatcctggccactgcctcagcctgcctgcgaccttctatcaggcatggctgaagggctggccatgggcgtgctgggcagagattctcttcctaaacaggctatgggctaaaccaaagccaaaacagtaggagccggtctgggcaccctgaatgtggatctgggaggggggatacctgctctcacagttgggaatttcacagcctgctgaagacctgctgactaatagcctttttctcatcgtcatcaccaacaaacacctccgctgcaggggccgagcgccggcatccctgctgggtggccagctccctctgcaagtcacctgcacatccacctgcccctcccccaacgatgcccctcactccagctcccagctcagccgggcccctctggcctctggcttcaggcagaaacctgccacatatactcacaaatagcgtcttctgcaagccatcctgtgtgaatccgttcttccctgttctggctccctctccagcggggaggctcaacgtgtttccaagaggagcaggcggctcaggcaagaagtggaggggaataaaattaaatcgcggggcgagtcacattcccgggggtggcgggctcctccagggaggctggggcgggagcggggggcggcgccagcagcgggctgtggagggccctggcacgtagcgcgcgctcacaccgtgcccaggagcgagcgaggacgtcgagtaaccgtggtcgccaggctgggcgggggcgtccacctcgctgctacctgggcccaccttggggtttttccctcccgtccatccggggtgcggggcgcggggatgaggaggggagggtcgagagaaggctgccccgggtttgctctcgcagcatccggagaaggggcgggcgcgccggagcctcccccaccccccgcgcccaaggagcaacgtagtgcggccgcgccggaccaatcgccgaggcgctggtcgccatggcaacagcagcatcaggcgcggccgctcggctgcgccctcgcggcaaagtcacacacccggcggggcgcggggcgccggccccttcctggcccgcgctggaaacctggaagtctgttgctaaaatgcacgcgccgcgcggagcctacgatgacactactttccaaggcggcttttctgccttcggcactgagacacgcgagccgcggagctctcggggctctggccctggagtgaggccggccgactccaaggctgtctctgccactgaagggcgatgagaccttggcaagccgcgtctctcctgggagtcttgattatgctactgtgaaagggatcataacagctataccacggggttccaggagggcgcaccacgccagtagctgcacggtggatggcagagcagtcctcgtttgtgccagtcctgtcccaaagggggctgcacgtggctagggagaatttctggtctagctatggtgcctcttcctctcccgaggaccttccatgtgccgggcaagtatctgccctcatgatgtttacagtctaaggggaagccaggaagtaagtgtgcagatataggattgcacgtggtgataaggatcaggatgaaaagagagcaggaagaggggaggcagggaccccaagagaggcgggaaggaggcttctgccatcagacggggtggtcgggaaggccctctgtgaggcacgtgtggctgagactcggatgacgcaagaagcaggggaggagctggcgtcaaggctctgaggcggaaggcagcctggtgtatttgactggcccagaggaggccagcgtggtgcagtgtgcgacagggaggtggaggggagaagcgcacatccatcctcggctcccacacccgcctttcccacacagatttctctcttcctgtctgatgttcatctgatcctctctgcttcctcatctgtaaaccaggaatcccagacctatctcagaggcatgtagataatattcttccgtgcacggtaatcctcaagacaaccccaatgaggcctaatactatcatcctacttcacgggggagcgcattaaagccagaggttcagcaactggcccaagccacatagctggcgggcagtctggctccagagtcttggttcttgactgcttgaaagctgcctcactgggaggaataaatgagagagggagtagttgagactgggaatcggctggatgtggatggcagcccacagggccatttcccttcctctttccattctctccagattcacactcaccgaatttagaaggagtgatgctgcatccttgagttccattccatcctttacaggggaggaaatgaacctcagggggtgagcgatttgcctaaagttgcacagcaaagagtggcagaggtgggactaggaccccagtcttccagctcagtgtcctggtagggagcagaggttggagctgcggcctcaggtggccaaggtgaggcatcgaacagaactgcatgacgcttcccgatctgccctctccaggtgaatccatatgcatgaccaatcttcctgtagcacggacctccctccctgagtcatgtgaggaatt

SEQ ID NO: 315823 - DNA, 4001 bp, Homo sapiens
taatgagaagggatgtgggactgagaagtatgcaagagaggtggcctggacatgtcaactggaatggtcctaatggaggggcagaaacccctccccagttactttcagctcagagggaggcgggaggtgcagccaggagagcacgctaatggtttcttgttccccactagactgctggttccatgaggacaaagactccatgttttgttcactgctgtgtctctggtgcctagagcagggactggtacatagcaggcactcaataaaccacagagctttagtactgacaagactgaatgctcagcctcgatttgctctcctgcaatatgaggatgctggtaccacaagggtaagaagcaattgtaataccaggtgggacagctgatggactatgagggccgcgggtgtgtgtgggatatgaataacatgacccccatgtccagactgctgccactgattccagacagatggtcttgcagctgcagcatgcctggcctccaccccagatgcaaggagcaatggggtccttgagaagccccccaaccccacttggaggctcaggctcagcgctccaggcctctggggtgaggaaggggcagagggagacatatgcatgttctcagtgcaactgctggacatgcgctgcacaatttttgaactgaaagatcaaacagctccaggtgggcttcctccagagggggcctgacataagccaagtcagcttgtcaacaaatccccttagccccacccccctgctcctcagaagggcctgcagatagctcagggggcagctgtgctggccatcgcagagaggaaatcaatattcccagcacatacacacacactccctttctccctttctctccataaacacgggcccttggaagctcagacagccgcccacaggcccctaagtagaaaagggttggcccctctgacacaccagactccatccctgaccacaccaggtgcacacgcatcaccacacaaagcccctcacatccacactctgccacaaacagcagccacacaccccagtgcacccccaagtggccctgccaggggcagagtacccgacagaagctgctgacacacctgggacgcctgtttgttcagggtcatccaccctcacacacacttggggtcttgcagacaggacagacacatcaatccagacataggcccaatgtctggaatagacaggcctgcaagaggccttcctggcagctccggccctgcctgcagttggaaacaggcacagacccgctgggcaccctcccaccaactctccgctctccctcctgcccctcacctcacacccacaccgagtcccactgtttccctctcaagcccccaaactcaaactcacccccacaccaacttgcactccaacaggccctcgatcacacacacacactcccatcctgagaccctcccagggcacacacagcgctcctgtcccaagggcgcgtctctctctcccacgcacaaactcgggtcctgtttgctcttctctcacccaaacccacagtctggcggacgcaccccgccccgcaggcagctttctctcgcacgccgggcgcccggtcccgacggtcacccgcactcccgcacaggcatccccacagcctgcgccagcccaccgctcagcacccgggaaggccgctcgccccgcgccgcgccctcacccgctgtcaagctctagctccagaagggactgggtcctctccgagttgcagtgcaggcaccacatggcggccgcagtgggagcgggccgggccgggagccgggacccaggcccagcagaggccgccgactcccgccagcgagccgccggatcccggggccgacacccggccacccggagacccgaccacccgccacgcgatcacgtcggggctcctggtccagcgtccgccggctcccgcggctccggccccaagtccgagccccaggccagccaagcccgcccctccgccgccgcccgcttggcgcagcgcgaggccgggccggaggaatgtggccctgaagtgggcggggcagggcgggggcggggccggagggcgagctgggggcggggccggagggcgagctgggggcggggctgcgcgcgggggcgagactgcacggagcgtgtggggaagagagcacaggaggcgtggccacacggcgccgcggaagaagcacagggggcggggggtcaggggcggggcgtcaggggcggggctacgcgcaggggcggggccgagccgaggcgcggggtgcagagcgcaagggcggagtcccagacactgcatccaggtcccagcgcgcgaagcctctgttctggaaggaggactttgcgcagcccctccaacactggcgcctcccgggagccatgtcttcctctccagcgtgtaaccacaacaaatgcacagcgccaaacccccaaccagagcctactccgctgatgcctactcaacatctgcctatcccgattttgccttcagtttataaaacctggcctttgcctgcctggaccgaaccgtgtggttctggggctctgatgcgccccagagaagggaatgggccctatcctgaggttggtaccacccttttggcggctttttgggggaagatctaatggaaagttgcttctttctccctaagcccacccagccccctaccctttctccacccagagacacccttcaagcacctatgacaagcttaaagtaatactaattagcactttagagttctttagtgatagttggccttcaaggcaacattgtgaagtaggtggagttacccctggcctcattttaccaatgagtaaactgaggctcagcttaactgggccaactaagagacggcttccctcactctttcctcctctcccaggctcttcctactatgagcgctcatggcttgcagtcctccatttgtatgtttacttgtttattatctgtccttgggctccatgaaggcagatacagtgcccagcgcccacacctgtggaatgcctagacgtggttgggagacagcaagcagatatggaacaatcaaaaccccacctgtcctgggccacccacctacaagtccatctcctggagggccaggcagctggcaggcctacgggagtcaggaagctgcaagaagccatcaaggcaggggcattgtcttgtgcccttctgaatctttcatttggagggggacagtgaaggaagggggctgaggtggcccagcttgcagcagaggagggcagcccctaaagccagtttagagcacctgggttcccaggcaagaagctgagcaggagcccagtgccccttatgccagtttagagcacctgggttccgaggcaagaggctgagcaggaacccagtgccccttcactgcccatctccacattcctcttctcagcttcccatgttttctttgctctgttaaaaataaatgaagacacagaatggggggaaatatttgcaaatcatgtatctagtaagggtctagtgtccatagtacataaagaacgctcacaattcaaaaataataaggcaaataacccaatttaaaaacaggcaaggtatctgagtagatttttctccaaagacaatctacaagtggccaataagcccatgaaaagatgctctcaacctcactaatctttagggaactgtaaatcaagaccgcaataccacctcacactcacaaggaaggccataataaaaaagatggacaaaagtacctatacatagagggttctggaaggagaagaacactaggctgcactgctcaaagaccacagccacatctggcatctgtcatggttagggtaggggtaggaagctgggagaggatagggtacacatgacccagttgatggcagaggcagcagaaaactcccacccctgtctgaagtgctctctaaaaatagactgcaataaatggagccaaaataattcccccagcccagctgctggagcactctgggcacggtctttgacagcctcaccatc

SEQ ID NO: 315824 - DNA, 4001 bp, Homo sapiens
atgaggtcaggagttcgagaccagcctggccaacatggcgaaaccccatctctactaaaaacataaaaattagtgggcgtggtggcacatgcctgtaatcccagctactcgggaggctgaggcaagagaatcacttgaatccaagaggcggaagctgcagtgagccgagatctcgccactgcattccagcctgggccacagaatgagactgtctcaaaaaaataaaaatgaaaagagaatattacaacttatgacttataagaatatttaacacttaggtgtcagtgcttttatacagtattttcattcctcacaactttatgaagaagctataattatcatctccagtttacatacagattcagaagctgaggctcagagaggttaacaaactggcccaaagtcatacagcaagagcctggaatgcagatctccacctggaaagcagagacaacaggcaagcggcctccccgcagagtccatggccctctccgccagtcatccgtcaggcaccaacaaacaaaacatatggaggctgtctgagtgccttcccacggaattatctagaactgtgcaccttgcaatagagtgaaagtaagtgcttgtgcttaggccccattatacacactgaatctattaggacacatctgatctcaaaacaggttgatagtcataaatactgtgatcaaaacaatgtacactaaaagtaaatatctgattttaaaactataatggtaaagtacatttaatcacaaatatgataaataggctgggcacagtggctcacgcctgtaatcccagcactttgggaggccgaagcaggtggatcgcctgagatcaagagttccggaggccgggcgcggtggctcatgcctgtaatcccagcactttgggaggcccagggtgggcggatcacaaggtcaggagatccagaccatcctggctaacacggtgaaaccccgtctctactaagaatacaaagttagccgggcgtggtggcgggcgcctgtagtcccagctactcagaaggctgaggcaggagaatggcgtgaacccgggaggcggagcttgcaacgagcctagatcgcgccactgcactccagcctgggcgacagagtgagactccgtcttaaaaaaaaaaaaaaaaaaaaaaaaaaatagttcaagaccagtctggccaacatggtgaaacccggtctctactgaaaatacaaaaaattagccagggtggtagcgggcgcctgtaatcccagctactcgggaggccgaggcaggaaaatcgcttgaatcccagaggtggaggttgcagtgagccgagaccgtgccattgcactccagcctgggcaacaacagcgaaactccgtttcaatatatatatatatgttaaatcatagatccttctaatatacactaaaactaaacacaccacacacacacacacacacacccccccaagaagtgacagcaccgtgggtccctacagggtcgaggctcgcactttgcaggctgttgtgggctggatgagaggccacctggggacgtcaccgagccagcagcgctgacaggagggcccccgtacccaccgttctctggactcagagcgcagtggcggcggcccctgctcgtcgacagacgtcctcagagaccacgcggcaccttcaggtgacaggccgaggtccgcggcggacccggtccaggaggctcagctcgcacgccctcggatcgggacccgctgaacccgggtgcccgagggagcttggcggccgctccaggcgggatcgctgggggctccggtcgccctggtcccctcccctccccgggccgcactcaccgaactccatccagtcccactcgctgagcgcgtccatgttgcggcacaggtcgtccagcacccaggagggcagctggtagatgtagcaggccatggcacgctacggggccggctccggcgcgggacgactgggtcggacactgcgggctgcggcttctctagccaggggcggaccggcggggaagtgggcggggcgggagggcaccagcgtccccagcggccacgggcggcacgacggccccgccggctccaccccagcgccggccagagaatcggaactgcgaggggaaactgaggccctggtgggagaaggccacacgggaattctgccgcagcggcaggaggccttctgaccccacttccatcggcactacaccatgcatcatgcgctcatcaaatactccattaattacctactgtatgccaggcaactccctaggtgttggtaatacctgaataagaaaccctacagccgggcgcggtggatcactcctgtaatcccagtactttgggaggccgaggcggacggatcacgaggtcaggagttcgagactagcctggccaatatggtgaaaccccgtcactactaaaaatacaaaaattagccgggcacggtggcgcacgcctgtagtcccagctacctgggaggctgaggcagaagaatcgcttgaaccctggaggcggaggttgcagtaagcccagattgtgcccttgtactccagcctgggtgaagagtgaggctctgtctcaaaaaaaaaaaaaaaaaaaaaaaaaagcctacaaaagcccttgctttcataagacttacaatctaggtgtggagagaaagactaacaataaataataaatatagtatgttacagagtgtcttaaaggtaataagcactattgcaaaaaaaaaaaaaaaggaaaaaaagttggttaaagggaatcaggaattcagattgagcatggggaatattctattaaatagggtagtcaggtagactttactatagtagctaatatgtatcgtgcagctactatgtgccaggcactgttgtaggtgctgggaatacctctgaagagaaggacaaaatccttgtcctggagggagacagacaacaagcaataaaaataggcagataagctatgttggagaatgaaagtagaagcctgggcaacataggaagatcttatctctacaaaaaactttttttttttgagacggagtcttgctctgtagcccaggctggagtgcagtggcgcaatcttggctcactgcagcctctgcctcccaggtcccggttcaagcaattctcctgcctcagtctcccgagtagctgggattacaggcacgcgccaccacgcccagctaatttttgtatttttagtagagacagggtttcactgtgttggccaggatggtcttgaactcctgacctcgtgatccgcctgcctcggcctcccaaagtgctaggattacaggcatgagccaccacgcctggcctctacaaaaaattttaaaatgagccaagcatggtagtgtacacctatagtcccagctactcaggaggctaaggtggtaggatctcttgaacccaggagtttgaggctgcagtgagctatgactgcactgcagcctgagtgacagaatgagaccctgtctctgaaaaaaaaaaaaaaaaaaagaaagaaaagaaagaataaaagtagagggtggtaaaagggagtgcaagtggccaattgcattatcttagatgatactattactgggaaaaaagcagagtatggtgcaggggactgcaggacaaactggattattaaatagggtataaggggctgggtgcggcggctcccacctataaccccagcactttgggaggcagaggcaggcagatcgcttgagcccaggaattcgagaccagcctgggaaacagagcaagaccctgtctctacaaaaattagccaggcatggtggcatgtgcctgtagtcccaggtacttgggaggctaaggtagggggatcacttgagcccaggaggtggagattgcagtgagccaagattgcaccactgcactccagcctgggtgagagtgagaccctgtctctaaataaacaaagagggtacaaggaacagaatttatagtgtgtgtatacatatatatatatatatatatatatatatata

SEQ ID NO: 315825 - DNA, 4001 bp, Homo sapiens
ttgccctttactttttagtgaaaagttttacaagaatacaatcacaagcaaaccacttgaagtactatatgaacaacaataaacaaaaatcaaaagatgtccaaatcctgtgaccaaggctgctcctccctctacttaaaatctttactcctccactgaccctaacaccttgtatctggctaacttgcattattcttccttcaaattttacttgtgtcatgaccacccagaacattattctgtgaccccttcttcccagttaggctggtgtcctctatcaaggattatacttaccatggcatttaacacccagcatcacaattgcctgttccctgccagtggtatttggggaaaataagtctgaagactgcctttcgtaaagttttatgtaagttctgtcacactaaatgtcaactcaattatccctgaaacacagtgtccaacagagaacgagttttctgggttgtagtctaggtagaaagagtcctggctaagtcagggacttacattcccagttcttccacttaccatctgtgagaagtagtctctctatcactcagtttccccatctttacaatagagatcatacctcatcttacagagctgtcacgatatcttcatgagacaaatacaccaggcatgcaatttatagacactcagcaaaatcgagttcaatttaaatctcttttgagattctccccttcaactgacacagaaacaaacttggcaaatgcttggtagataggcaaacaccgcagtaatttgggatataccttctcacagaaacggctactactttttttttttttctttgagacggagtctcgctctgtcgcccaggctggagtgcagtggcgcgatctcggctcactgcaaactccgcctcccgggttcacgccattctcctgcctcagcctcccgcgaaacggctacttctattccactggtttctctctttttcttgggagcttgtgctcatcaatctacaatggcttccaatatatctcttataacctaaccatgacgcccagtgtttcttataggggcttcacttaatgaaaataatacagtagccaatattacgtagtgccggtaccaatcatctttgtaccggcactacgtgtattcttaaatttacacgtcgtaaatgcttcttgaagaaatgaagaaaccaacaaatgacgccagaccacagagagcacaccctcatagaacactttctgtctatgccattcatttattcaatagttattgaacatctgcaacgactctgtgtcagacattaaggaagcaataaggaaaagaccctaccctcgtgatgtctgtatattatggagcagactgagaacggacataaatgaaataatcccagaaacatatagtcacaactgctcttaatcttctctgtggtatttagggacaaacagccggcccacactatgcaccgtaactcggagcgggacctagtgcttctctgtgtcttaatttccctcaggttaacctaaagagcttcatcgggattaagacactgtccaggacagtaacgcggctcccgagtttccagttttccaatttgtgacagctaatggaggcaggaagagaatcccctcgttacaccaaggaacttgaagccctcagcactgcacgtctgagcctctaccgaatgagcgccccaggtggactgggcgcccccccgcccgcccgcccatccactcgctccctcacccgcccaccctactcaccatggtgtcgctaagggcgccgtcctggagccccgcggcccctgtccaagaaactccacaggcccagaagacgccgacgctcacaggaactgaagattccaactacccacagacactgatgttttgccggaaacgtaaaagacagggaccggaactgaatgggagtaccggaagtgcccagacgaagcggacgctcacagaaactgaagattctaactgcccacagacactgttttgtcggaaacgtaaaagaaagggacaggaagtgaatgagagtactggaagtgcccggacgaagccgacgctcgcaggaactgaggattctaactgcccacagagcctgatgttttgtcggaaacgtaaaagaaagggaccggaagtgaaagggaggaccggaagtgaaagggagatccggccggggattgggagagaaaattctggcgctccgtcaggcggtcttccggtagcgccggcacgcggcgtcatcacacgcagacgtgtgatggggctttcgcagagggactggcggttttcggactcagcccaggcggcgggtcttagttctggaaacaggagtactaaatgtcttgtgttcactattggtactgcgggagcaggcggcgctgggcgcggttatgtggaaggctgagtgattgccgctactctaatcccaccggcttccttggttcctctgtgagagcaaatatccccttttggaaattactcgacctcatctctgcgacgagggatctacggccccgacagctcccctagtgggagctggagtgtgcgtcctgcaggagttggagctggccgggcttcgtaaactccttcacttttccttgtcacctcttagggccatttctagtttttctgagctggtctgttggaatcgcggggcctttcagagctggacgatgcttgaggtcatcctcttttaaaataaaaatttaagttccaggcaaaaagtgccacttaggggaggagggtggttggagaagtgcggtcactgtcctgagcacatcgctgggaccagaagatcgttagacaaagaccaggaagacaggagaggtccctggtaggagacgttctgatggttactcccgcatggtgtcagcaatgaggggaactgtggtggggaattcaggtgagggcccgcagcaaattcggttacagccgctttcccctttcaagcatggtgcctcagctgcagggactccctccaccacgggacctaactagtgatgggcaccctagcagcagccaggaggcacaagccaaagagagaagcagctgacatgtggttgaggatcagacaggacaggaaaagtacttagaatagtcagcacaatctcatacctgaaatgtgacaagttttaagtgggcatatgaccacccactacagaccccatcctcccacctgtctggtttatgattatggccaataagaatcgagtcaaaggaatgtgtgtcacttagatgaagccatgacaaaaatataatcccttgcccttttcctttctctgctgagaggtgtccatgggatcagccaacctgaattcagaaatggaagtattgtgaagatgccagagttccccccctcccagctctggaaaactgagctctgcaaaatgagaaaaataaaaacatgtcttgttaaggcctctgcatttgggggtcttttgttcaagcagcttcacttttaccttaaatagctgatctgaaacaagcagggtcattcctcactcaaatgaggccttctcaacatgtccataccacctttatccattacgtccctgactctaggatgcagagatcacatattagcaggattcaagaggtgttagctatgttgtcctagcatctgctccccctacccacttatctcagttccatttggggagccctctggttgtggggaaggcaactgcatccccagctttaagtatggatcaagcactagattaagctaatccatccatccagtctccctaggcatagtgactggtgggtttaagacccaagctgacctagtcagaatgagtcttgagatctgcttgcaatgctggagaaaatagatcctgctggatgtcagacaaaaggcaataccaactgtcagccactttagagctcaggagacaagatttagtgtttggtgacatcattgggtggatgagaataaggccttgcctccggcccacttaaatctttagttatgtgaagatttatgtaaaattgtttagggttgcaaccagtaag

SEQ ID NO: 315826 - DNA, 4001 bp, Homo sapiens; identical to SEQ ID NO: 315825

SEQ ID NO: 315827 - DNA, 4001 bp, Homo sapiens
tgctctcgtctctacccattcctttcccaggcagtgtggctttgacctgtggcccatgcaaatccacagtgacagtggcctggcctctctccctctagctgtcaaagagctccaaggcagttgagccagcctcagcctgcagatcacacacaatgctccggctggcttggctgcctgctcagctgcccgccctttctcagcagcccgctgtccacagcagccctcccatttttgacagtgcttcccgcgtgcctggtgcctagtgtggggatctgggatgtgttcttcaacctcagaccctgagtctgcaggacacagaaaaatgttcagcctgctccgctttaaaaggggaatttgacaagtgttaagaacagacacactcggtcttatacccagcaactggagtaagtgagagagggagatgtggagctgggcgagagctatgtgagggctttgaaaactggttctcttgaaggctgatctcctgaacagcatgattcttagtgggctggtctcagagtccccttttccaggaatgcttgagtactgcgatccacaaaccacccttttccatcagcctctgtccaatacagagcagtgactctcctgcataactacatgctgagagcaccagcatcagtgacctcgacctccctgcctgccacccctaaggacgctcaggctggtgaatacacaataaaatcaaccccggcctggctgtcacctgggcccccatgaggcacgaccttgaacgggggaacttcccgcagcctaactctctctcctatcaagaagtgaccactgtgtggctgtttataccctctggtccagaggatgtggccaaggagggcaccaacccccccttagtgcttctctgctggggttgggcacaagctctgtaccactcggcttatggtgcttaatgggggagagctgcccccttcttaggcccacccctccggactcaggggacaactggaccccttggccactatagaaacacgtctctctcttaaggcttctggtgaaggtctccgggtcgaatggcccatatgagatgagactcaggctctcccaagagataactacctgccccaccggcggtgtcactgggaagtgctccctcaccttcctcttccctatatcctaggagcttctccgctccacttccacccagggtcttgtaggagctgggggggggggggggcgccggggctctgggctccagtgcgccccagtggatcccagacaccctgcccctggggagccccaccccgcgcagcggcgctggagaggctatactccttcctcaggggttccccaaaaccggggaggggtgcagctccagtgccccgactcctccaggccctgcgaggttcaggaggctcgctgggccagcggcggccgcccggaggcagaggagccaagttacttttcgattcagagagtgaagccgagtctagctgggcggcggaggagacaactctagcggctctccccccacgctctgggctgggaccccagggaggcacccggacgcccccgcccgcctccaggcgccgaccccgaccttagcgggccccggacggcgtcctcccttctcccgccgtcccccggcggccgagccgcgcgcaacggagacatttaaatcgccccctcgggacggcggcgtggaagagaccggaaaggcggcggcggcgctggcctgggggccggggcggtggccgcgcgggccagggtcgcggagtcgggcgggcactcaccagcgcgtgttgtcgtggaaatgctccagaactgcgtagccgaagaacgagtcagcggggccctggaagtgcacggggcgctgcgggtcgaggttgtaggcgcccgcggggatccccgcgaccaccagcgccagcagcagcgcgcggagcctcccggcgcccctcggcgcagccgggccgcccatccccagccggccgccgccttcccctctgcccggcgagcagggcgccgagcgcgcgggccgcggggcccgccgacggccaggaagctccccggggcgggagctctgcgcctggacacgggcggaatgcgggcgtcgggcccgccaccggggcgcggacggcgggctgagcgggcgctgaaggcgagcacaggggcggccccgagcggcggcgtcctcagtccgcccgagaagtctgcgcgagcgggtcccgggccgggcggcgctggtctgcggaggggcgcgcccgcgaggtgggcggcccgggcggcggcggctggacggcgcggcagcgccccctgcgggccgtgagccctgcgcgcacttcccgggcgggagtcagcccctgggacccgccggggcgccccgaactgccccctccccgccgcgcacggggcgctcgggttcccggagataaggctgctcccctccgtcactacaggctctgccggccctgctgggcctgtctccctgcctttgtctctctttccctccctgtctcacaaccagtaagatccagagcaacccgggtgaaggacgagtttagactccaggttctagccctgcgcatcctctgctccttcacccagttgtgagataagctgtaggagcagtgctcagtaaacgccggctgttgttgttcataacaatagtagccacgtggaagcgagcagagcacccctccatattctagtcacttggtctcgtacaccagtgattcccgaagtgtggtctccggaccagcagcatcaacgtcatctgggaacttgtcagaaaatgcaaatcctcaggtcccactcagccctgctaaatcggaagctctgaaggttggagtccagcagggtttgcgtgcactgaagggtgtgtgtgtgtgtgtgtgtgtaattgtaaatatgcataacagaaagtttaccatcttaaccatttgtaactgtgcagttcgggggattaagtatatgcatgttatgcaaccttcaccaccatccatctccacaactcttcatcttggaaaacaaactttataccctaaacaataactcctctttccccctaaccctacccccatccccacccccagcctctggcaaccaccttcctaccttctgtctctatgaacttgactactcaaattcaagattcctactgaattgactgctatcatgttgaagtctgaccacactattatggtttccctgcctgtgttctcttctttccactttttaattctacaacagagtttggataatggttgaaaacttcccgttgccccccaccacctactcctgcctataggatggagcccgatctccttagcataacttcacatggaggctccatctctctttccagccccattttatgcccctttcctgactcacttcccacaaaccctacaatgtatccacacacaacttctagctgtcccctgaacgtgtccaacaggggttttcacacacatctgtgccttctccaacgctgttctttcttcctgaaatgtgcctacccctcttcaactggcaaaatcctatccatcctagacttccaggccagttcttgcctcaccctttctgtgccatttcctcttcccctttcttttctgggctgccaaagagtgttcacatgcctctatctcaacacttagaacatgttcatcattttgggggctctctgtccctctccatagacggtatagctctctaaggagaaaaaagtcttagatatctttgtagcccccaaggcccagctcagtgccaggcttaggtagatgcttaaacattgttgaaagaatgaactggctgggcgcagtggctcactcctgtaatcacagcactttggggaggctgaggtgggtggattgaggtcaggagttcaagaccagcctggccaacacagtgaaaccttgtttctactaaaaatacaaaaaattagccaagcatggtggcacatgcctgtaattccagctacttgggaggctgaggcaggagaatcgcttgaagctgaggggtcgagcttgcag

SEQ ID NO: 315828 - DNA, 4001 bp, Homo sapiens
aattattattataattctgtttgtcagaattacagaatgtcaagctggaaaggaacttaaaagccatctcctttggcagtttctgaacttttggatttcaaagaaaactaagatttaaaaacaaaacaaaagaaacaaacagaaaaagagaaggggagcttaacatagggttgtcagattttcttattttgccaaaattaaaaactactaatattattaagaagtattaaaagaaaatgttcccaccaaaaaaagaaaaagtgcctaatttcaaactaaaggaaagtccttgtggagcaggggagcgttgacaacaatacattcctgtgtgatgcaggctacatcttcctgctcctcgctttccctagggacccatgaaaatatccgtgatgggcactggctgccggatgggtgtttggaatccactcatctactctccaagctctggagtgattattttcccatttaaaacaaaaaccaaaaaccttgctacagtattaagtttgaattagggtctgaacgaagttattgtttgctcagacccctcctccgctcttaaacctaaacctccactgccttcatgtaaatgagacaccgtgggggaacagtcctcccttcgggcagccaggcaaccacttggctcacaagagcaatcaagtatctccggcttgaaagttaatagagcactattatttcctaaaagaaaggagaaaatccgcatcccaaacaagtgcatccttcctcgagggcctccaaactaccacgtccaatcatctcccaactctgaaaagttagagcaggtaaccgagggatccttgcaacgctgccagcccaccgcagcgtcgggctaaggcaatctccacagcccctgtcctctgctccagaatcctccacagttaggggagtgtgaggctccgagcgtgtgcaaatcgcgggataaagtcgggcagaaggaatttaatagggaagtcccaggtggggctgtggtttgggacgcgggtgccccctcgggtttgcggtggcctaggcgaggaggaagcaggcggggggcggggagggtgggggctgcatcttcaaaggcaggcggctagcctaggcgcagcgaactccaggattcgctgtgggccctgtgcacccgctgttccaggaggcgagccctccggagtggaggtggccccgggctttggctggggtttcgagactcccttgcttctccgggaacagggcaccgacggcatccccccagcagcccgcccgctcccggccggccacaaggaccgctttgtgcccgccaacggagagcccgggccccaaggcagggctggcggcggtcctccccgtgccctgggcgcgggccctggcgggctaggtcagcaggccggccagcctgtttacacaggaagggaagctcctcctcagcccgggagggaacaggagactcacgacagcccggcggggctgcgcgcggggagcgccccgcggggctgtcccccagcgactggcccaccagggagtgccccgaaggcgccctccgccctcaggcaccgcctgcgctccccgcccctccgagacgcccgcccgcggctgagtgtgcgacaaagtttctctgggcgccgtgggcggcgcggcttacctgcgagccggggcaggagcgcgcagagccccaggaggcaggcgtacagcggcgccggggcccgcggcatggtggggcgcctccctcagcggcggcgcggtcgctgcactccgcgggggccggcggccggggctggggccggagcgcgggggccgagggccgggggccgcagccgcatgccccgcgcgcagctccggctcacggcgcccgcgctggcccgcgccccgccgccaccatccgtcccgcagcactcacggccgagtcccgggaccgcggctgccctggctggccggccgggactcctagtgtgtcgccgctcgggacggccccagcgggctgctccgggtaggggaggggctggctccgctcggcggccgcgacttgggctccgagacgcgcccagcgccgagactcccccgcgcgccggcacactctgcccctggcctccgccccttcccttcctccctccggcccgccaggctccactttcctcctctcctttctcctccccttctctcccctgccaggccctcgcccggccgccacacggtcagcttacggtgaggcggggcggggcgagctccgggccgggccagctccgccctgtgcggggaccggcccgggacgcggaggccctacgggcccaggtggaagtcgcttgcgactcacttggggcgtggggggctcgaaaccactgagtagagcccgctcccgttgcttagccgcccgtcgccacgggaaaggggcggggcacgctgtattaggcgagccgagattacttgggccaaaggcggttgctagactgcgagagggagagcaggtacgggggtcgtgccggtaccgcctcatcctcccaaagcctcactgccggcggcctgagatgggacgtagacgcccgcgcgtggaaccgcaaagcgacttctggatgagcaagggagggcgtggtggggcgtggaggcacaagtaaaacctacatttctttttcttttcttttttttttttttttgagacagcgtcttgctctcactcaggctggagtgcactggcccagtcttggctcactgcagcctggacctcctgggctcaaaggttcctccaccttagcctcctgagtaactgggactacaggcgcgcgccaccacacccggacaatttttacatgttttgtagagatgggggtctcgctgtgttgctcaggttagtcttgaactcctgggctcaagcattcctcctgtgtctgcctcctaaagtgctgagattacaggtgcgagccaccgtgcccggcccacttttcactttttaacttttgcacctttcaaggatttgagactggccaatatgccgctatatttcgttgtccttactgataatctgtcagtttccatgatcaaactgatagactcaaaaacatatgctcaggctttcatcttatcatttacatataagctggatctgaactagccaataaagagtggggtggggtcttcctcagatggtgcaggaaaggatgccttgggcttggattcgctacaagtgcgtttagagtggagtggttgataggcaagagaagaggcgacattcaggtaggggaaaataacgatagaatacctaccaagtacagagagcacactgccagccaggcactgttctaagtcctttacccatattaactcatttcatcctccgacaaccctactgttatccagttgaggaaccgagggacagaggggttaactgctggaggaagtgacagctaggatgcctcgttcaaaagtgcagcatggcttggctaaaactgaagcagtaagggggaaagaacaaaggggtctcacctttgcaggccagggacctggtggaagaatggcttggagggcccagtggaaaactgtcctaactgcccagctcaaggagtttggatgttaacctttatttcttggcctcctcccaaactctaacaaggtggtgcctcaatgcctgaggaagtaaacttcttgaagtacaatatagtgtgcctgggggcaaagatgcagcagtccatagcaagctcctttatagtatttgtgaaaggaaaataaatctcagggcccccaaatcactaagccaggagaaaaatcaagctgggaaccgtgtcaggcaaacctgcctcccattttatgcctaattaagatagctaagaagctacatacctccctcacaatttacccacaggaaattccttttggacaaaggacagacagaactcaaagtcatccctctgaggctcacctgagacaaatgaatacctgattgctccctctggcctattgtttatgtaaaaatgcagattcactgagccagactaaattgtgtattcagtggaaggctgatc

SEQ ID NO: 315829 - DNA, 4001 bp, Homo sapiens
agaccacagcccctgcctggtttctgggctaaggctggacattccataaggggtgggcaggctgagaagtctccaaagggcccaccaccacccccttgctatcccatgtaccttttttcctgagaaggacttcttgatagtttgggctgccagttccttcggcaggaaagaggcctgggcatccagcttgctgatcccctggggctcgaagatgtccacatcaatctgcaacattgaagcaaattatttttttaaaaaaaaagatgggatcttgctttgttgcccaggctggcctcaaactcctgggctcaagccgtcctcctgcctcagcctcccacgtagctgggattataggctcacaccacactgaagcaaattctctaccagggctcccactcaccaagtctcagccaagagccagcatgtgtcctggccacctactgtgtgcagcacccacccagccctgatcacagggcctggtactcagtaggcactccaaaaatactgaccaaatgaaggtgtacatgcctgcatccctcaactcagccaccacttaggtgccagcaataattccaggccctcaggctgcgcgggactttctagtttacaaaattacctggacattcagtacttctcgtgatccctgtggcggtcctgggactcacagaaaccccccgtctagcagatgagcaaaccgaagctcagagataaagaggaagttagagaattcagggagttccctgcccaagaagagcacatcagagctcaccctgaggggttagtccccatccctgtgttctcaggcctgggtggtgacacatggtgggtgctcaaccagtgttgggagccatggtgacggagagaggggcaggacccctgccccgggacctgtgatctacctcaaaatgatgcaccagctgcttgggcttgactttgatgacaatttcatactgcatatggtttctcttcagcacttcctcataagtcagctgaaacgtgaccttgctctggggattgacggtgaggtggatggtgaattgctccatagttctccccgaggccctggatgtgccaccagaggcaacagcagacagacagagggtaaatgacatttgggtccttgtcacctaacatgtggcccacagaatttatttctcttagatgagtgttgctcccaggtttccctggacctcacaaatgtgttagctggctggtcagggtcagggcccaagatggcgggggcccacttctcccagtggcatatctgggaaaagggcaactgcacggcagcctgttcagtgcaccgtgctggcatctgggtttgggcagtttgcttacccttccatcatcctgggctgttctccactaaagccaccttgcagccatcagacctgtcctggctggggagggcagccctagagatgagaccagcaggcccagaactcacctgacaaggccggcattctctcctgagatagctgctttccggtactgcttccatgcagtcaccttgtcctttatgtctccgataaatgcgtttccatctgctgtactgcagggagggaaggacaccctcaggaaagatgagcctcctgaccacacaggtcctgagagggcctgtccatgtgagcccttggataaggacgtctcctgacgagccttccactgcccatggtggaactcaggggtccatgggcaatgaggtgagcagcccaggtcagaggccagcaagaagcctcagactctggccttggctccttgggttctagcctgaaacatgctgtgatgggtcccagtttgcctccaagatgggagccaagcacagacctaaagggcttcttcctcccctcaaagccagggctggtctgtggcccttctagaatgaggagatgctctgcgttatctggccactccgatccttgttcttaagctgggactagtaagcggcacccctgggagaaggcatgggagttgggcaggcacgcacacggcaaagtcactgatgaatgctgtcttggggatttccaggtcgaaggccacttccctggcttcattggcagtgttgaccacttggctggtgacaacatagtgggcgaagcgagaggtgactttgcagttgactttcaaactccggatgaacacgccatcgacagcctaaagtgagacatgaaggagctgtggcctgagacagggcctctgtcagcgagggacttcctgtggtacggggacttggcacttagccccagtgcatggtgcccagatgcaggaagaacagaccgcaggaagacccctgctctctggctgagaccgtgctgtgggatatgaggtgagatgggaacaagtccccatttctaggaccctggagagtaccccatgcctatggccctgatagaggggtccacccctgacaggttggggaaagcaagcctgtaaaaagggctctgtcacagacccctttgccaggactcttactcacggtgtccacagcctgtcgcttctgcaaaacaaaatcagggtcaagtgtgagaggaaaactcaggggaccaccggcctgccagttcagggatgggagtggaacacagcctgtgtcctctgccccttagcttcacctccttggtggtgctgggaggtcacctctccactcagaagtggtggaggtggtgggggtgaccctggccccttgaatgggggtcttgtgtcccgcccggggcctcatccaggttcagctgcctatttctgccctgtgggcttagccatatacctcgctgctcttggacctgcctgtagccgagcccagggcaggcatggcctgcaggatgaggagagataccaggtacatgcacaacagcagcccccgaggccccatggcaccgtccatgctctaaggctcctgctgccctgtcacctcagtcagaccagtaatcaatacagtgctggataaacatggattaaacattagacaaggtgcaggcaaatattaatgacaaaaaccgcaatgacttttgcatcaacctaacacatttagaggaatcaaaatttggcagtggaagctttttgcctcaggggggttcccagctctgggtggttaaactactgatggggctccagaccatgtccctctgtgtagaactgcgcttagcctatgtgaactgtgaggatccccggatggctcatctcatcctcgggctggcacaaggcagcaccagtgacacggtgacatgtggcaagaagcaacagttaaaaatggatttctaaacttcattaggctttacttttttttttttgagatggagttttggtcttgagtgctagagtgcagtggcaggatcttggctcagtgcaacctccacctcctgggttcaagtgattctcctgcctcagcctcccgagtagctgggattacaggtgcacaccaccatgcccagctaatttttgtatttttagtaaagacggcttcaccacattggccacgctggtctcgaactcctgacctcaggtgatctgcccgcctcagcctcccaaagtgctgggattacaggagtgagccactgggcccggccaggctttactttcaaatttcttttttttttttttttttaagacagggtctccctctatcgcacaggtggaatacagtggtgcgatcttggctcactgcagcctcgacctcccagactcaactgatcttcccacctcagccttctgagtacctggaaccacaggaatgtggcaccacacccagctgattatttttattttttgttgaaacagggtttcagtcgggcgaggtggctcatgcctgtaatctcagcactttgggaggctgagggaggcagatcacttgaggccagaagttccagcccagcctgggcaacatggtgaaaccccatctctaccaaaaatacaaaaattagccaggtatggtggcatgcgtctgtggttccagctactcaggaggctgaggcaggagaatagcttgagcctggaaagtggtggttgca

SEQ ID NO: 315830 - DNA, 4001 bp, Homo sapiens
tgagccattactggtctgtgtaaccacaaacaagatgtttgcaaagacaacataagaaggcatgcgtgtgtgtgtgtgtgtgtttgcacggacagagaaacgagttcggtgggccactcactcacctagctgctgagagcacacacctgtaggtggtgggagagatgacccattcccttgcttatatgcttctgaatcattgggattttctacaatgaacatcatcactttgggtatataaataataacaaaataatagcaatgtgatacatctgacaactcaaactgttgagtgaaaaagcagcactacaatactgtggtgagaaataaaagctgcccaggttgacaaagaacaaagactggaaggaagggtgcagaatggaagctgaggtctggttggagttggtgatgtgcttggggaagctagtgatggtttttattcaatactttctatattcctggacttcatatatttttctataaagaaatttttgtttgttataaaagtaaggtaggctcatcaaaaagaagcagaagcaaaaggaagaagaagcagcagaaaagaagaggaagaagaagagaagatagaagaagaagaaggagaaggagaagaagaagcagaagaagaagaagaggaagaagaagaagaagaagaagaagaagaagaagaagaagaagaagaagaagaagaagaagaagaagaagaagaagaaaaaaaaaaaaagaagaggaggaggtgaaggaggaggaggaagaggagagaaaggatggaggataaaatagaaccttgaaaaagtcttgggaagacaaggacccatccctttgttcccccacagaaagcaagcatgtttgctaacactcttgaggtgtcatatttagtttaaaaggaaacccctctaaactgtaagaagcacttcttttaaatgaattgtggtgcaggctctacataagtgggaactaaaggatttgttcctggctcgggttgggggcaagtcaggaagcagggcattgcccatccatacaccacactcctccaggaacctggggtgggggtgagccaggggcttctgggattcctgcaaatagtggcaagcgacaagtcgttgggtaggccaaaggtctttccaaacttatgtttccaagaaacctgaagcttggagtcctaaccacaccagcatatgaggtttacttatgtgctggatatttccctgaatgctctcccatgggcgtgaggcgggcaaagagggcactgaggctcaagcaagccagcaactcaccctggaccatgcagcccgtgtgtggtggagctggagctggctccttccccacctcagcatgcaggcttttgctaaattgctctgagaaccaggatagctgagttctcctaggcaccaatcacatgacaccagcttctctcatcctgagggcagaccacagcccctgcctggtttctgggctaaggctggacattccataaggggtgggcaggctgagaagtctccaaagggcccaccaccacccccttgctatcccatgtaccttttttcctgagaaggacttcttgatagtttgggctgccagttccttcggcaggaaagaggcctgggcatccagcttgctgatcccctggggctcgaagatgtccacatcaatctgcaacattgaagcaaattatttttttaaaaaaaaagatgggatcttgctttgttgcccaggctggcctcaaactcctgggctcaagccgtcctcctgcctcagcctcccacgtagctgggattataggctcacaccacactgaagcaaattctctaccagggctcccactcaccaagtctcagccaagagccagcatgtgtcctggccacctactgtgtgcagcacccacccagccctgatcacagggcctggtactcagtaggcactccaaaaatactgaccaaatgaaggtgtacatgcctgcatccctcaactcagccaccacttaggtgccagcaataattccaggccctcaggctgcgcgggactttctagtttacaaaattacctggacattcagtacttctcgtgatccctgtggcggtcctgggactcacagaaaccccccgtctagcagatgagcaaaccgaagctcagagataaagaggaagttagagaattcagggagttccctgcccaagaagagcacatcagagctcaccctgaggggttagtccccatccctgtgttctcaggcctgggtggtgacacatggtgggtgctcaaccagtgttgggagccatggtgacggagagaggggcaggacccctgccccgggacctgtgatctacctcaaaatgatgcaccagctgcttgggcttgactttgatgacaatttcatactgcatatggtttctcttcagcacttcctcataagtcagctgaaacgtgaccttgctctggggattgacggtgaggtggatggtgaattgctccatagttctccccgaggccctggatgtgccaccagaggcaacagcagacagacagagggtaaatgacatttgggtccttgtcacctaacatgtggcccacagaatttatttctcttagatgagtgttgctcccaggtttccctggacctcacaaatgtgttagctggctggtcagggtcagggcccaagatggcgggggcccacttctcccagtggcatatctgggaaaagggcaactgcacggcagcctgttcagtgcaccgtgctggcatctgggtttgggcagtttgcttacccttccatcatcctgggctgttctccactaaagccaccttgcagccatcagacctgtcctggctggggagggcagccctagagatgagaccagcaggcccagaactcacctgacaaggccggcattctctcctgagatagctgctttccggtactgcttccatgcagtcaccttgtcctttatgtctccgataaatgcgtttccatctgctgtactgcagggagggaaggacaccctcaggaaagatgagcctcctgaccacacaggtcctgagagggcctgtccatgtgagcccttggataaggacgtctcctgacgagccttccactgcccatggtggaactcaggggtccatgggcaatgaggtgagcagcccaggtcagaggccagcaagaagcctcagactctggccttggctccttgggttctagcctgaaacatgctgtgatgggtcccagtttgcctccaagatgggagccaagcacagacctaaagggcttcttcctcccctcaaagccagggctggtctgtggcccttctagaatgaggagatgctctgcgttatctggccactccgatccttgttcttaagctgggactagtaagcggcacccctgggagaaggcatgggagttgggcaggcacgcacacggcaaagtcactgatgaatgctgtcttggggatttccaggtcgaaggccacttccctggcttcattggcagtgttgaccacttggctggtgacaacatagtgggcgaagcgagaggtgactttgcagttgactttcaaactccggatgaacacgccatcgacagcctaaagtgagacatgaaggagctgtggcctgagacagggcctctgtcagcgagggacttcctgtggtacggggacttggcacttagccccagtgcatggtgcccagatgcaggaagaacagaccgcaggaagacccctgctctctggctgagaccgtgctgtgggatatgaggtgagatgggaacaagtccccatttctaggaccctggagagtaccccatgcctatggccctgatagaggggtccacccctgacaggttggggaaagcaagcctgtaaaaagggctctgtcacagacccctttgccaggactcttactcacggtgtccacagcctgtcgcttctgcaaaacaaaatcagggtcaagtgtgagaggaaaactcaggggaccaccggcctgccagttcagggatgggagt

SEQ ID NO: 315831 - DNA, 4001 bp, Homo sapiens
gagtgtgagccattactggtctgtgtaaccacaaacaagatgtttgcaaagacaacataagaaggcatgcgtgtgtgtgtgtgtgtgtttgcacggacagagaaacgagttcggtgggccactcactcacctagctgctgagagcacacacctgtaggtggtgggagagatgacccattcccttgcttatatgcttctgaatcattgggattttctacaatgaacatcatcactttgggtatataaataataacaaaataatagcaatgtgatacatctgacaactcaaactgttgagtgaaaaagcagcactacaatactgtggtgagaaataaaagctgcccaggttgacaaagaacaaagactggaaggaagggtgcagaatggaagctgaggtctggttggagttggtgatgtgcttggggaagctagtgatggtttttattcaatactttctatattcctggacttcatatatttttctataaagaaatttttgtttgttataaaagtaaggtaggctcatcaaaaagaagcagaagcaaaaggaagaagaagcagcagaaaagaagaggaagaagaagagaagatagaagaagaagaaggagaaggagaagaagaagcagaagaagaagaagaggaagaagaagaagaagaagaagaagaagaagaagaagaagaagaagaagaagaagaagaagaagaagaagaagaagaaaaaaaaaaaaagaagaggaggaggtgaaggaggaggaggaagaggagagaaaggatggaggataaaatagaaccttgaaaaagtcttgggaagacaaggacccatccctttgttcccccacagaaagcaagcatgtttgctaacactcttgaggtgtcatatttagtttaaaaggaaacccctctaaactgtaagaagcacttcttttaaatgaattgtggtgcaggctctacataagtgggaactaaaggatttgttcctggctcgggttgggggcaagtcaggaagcagggcattgcccatccatacaccacactcctccaggaacctggggtgggggtgagccaggggcttctgggattcctgcaaatagtggcaagcgacaagtcgttgggtaggccaaaggtctttccaaacttatgtttccaagaaacctgaagcttggagtcctaaccacaccagcatatgaggtttacttatgtgctggatatttccctgaatgctctcccatgggcgtgaggcgggcaaagagggcactgaggctcaagcaagccagcaactcaccctggaccatgcagcccgtgtgtggtggagctggagctggctccttccccacctcagcatgcaggcttttgctaaattgctctgagaaccaggatagctgagttctcctaggcaccaatcacatgacaccagcttctctcatcctgagggcagaccacagcccctgcctggtttctgggctaaggctggacattccataaggggtgggcaggctgagaagtctccaaagggcccaccaccacccccttgctatcccatgtaccttttttcctgagaaggacttcttgatagtttgggctgccagttccttcggcaggaaagaggcctgggcatccagcttgctgatcccctggggctcgaagatgtccacatcaatctgcaacattgaagcaaattatttttttaaaaaaaaagatgggatcttgctttgttgcccaggctggcctcaaactcctgggctcaagccgtcctcctgcctcagcctcccacgtagctgggattataggctcacaccacactgaagcaaattctctaccagggctcccactcaccaagtctcagccaagagccagcatgtgtcctggccacctactgtgtgcagcacccacccagccctgatcacagggcctggtactcagtaggcactccaaaaatactgaccaaatgaaggtgtacatgcctgcatccctcaactcagccaccacttaggtgccagcaataattccaggccctcaggctgcgcgggactttctagtttacaaaattacctggacattcagtacttctcgtgatccctgtggcggtcctgggactcacagaaaccccccgtctagcagatgagcaaaccgaagctcagagataaagaggaagttagagaattcagggagttccctgcccaagaagagcacatcagagctcaccctgaggggttagtccccatccctgtgttctcaggcctgggtggtgacacatggtgggtgctcaaccagtgttgggagccatggtgacggagagaggggcaggacccctgccccgggacctgtgatctacctcaaaatgatgcaccagctgcttgggcttgactttgatgacaatttcatactgcatatggtttctcttcagcacttcctcataagtcagctgaaacgtgaccttgctctggggattgacggtgaggtggatggtgaattgctccatagttctccccgaggccctggatgtgccaccagaggcaacagcagacagacagagggtaaatgacatttgggtccttgtcacctaacatgtggcccacagaatttatttctcttagatgagtgttgctcccaggtttccctggacctcacaaatgtgttagctggctggtcagggtcagggcccaagatggcgggggcccacttctcccagtggcatatctgggaaaagggcaactgcacggcagcctgttcagtgcaccgtgctggcatctgggtttgggcagtttgcttacccttccatcatcctgggctgttctccactaaagccaccttgcagccatcagacctgtcctggctggggagggcagccctagagatgagaccagcaggcccagaactcacctgacaaggccggcattctctcctgagatagctgctttccggtactgcttccatgcagtcaccttgtcctttatgtctccgataaatgcgtttccatctgctgtactgcagggagggaaggacaccctcaggaaagatgagcctcctgaccacacaggtcctgagagggcctgtccatgtgagcccttggataaggacgtctcctgacgagccttccactgcccatggtggaactcaggggtccatgggcaatgaggtgagcagcccaggtcagaggccagcaagaagcctcagactctggccttggctccttgggttctagcctgaaacatgctgtgatgggtcccagtttgcctccaagatgggagccaagcacagacctaaagggcttcttcctcccctcaaagccagggctggtctgtggcccttctagaatgaggagatgctctgcgttatctggccactccgatccttgttcttaagctgggactagtaagcggcacccctgggagaaggcatgggagttgggcaggcacgcacacggcaaagtcactgatgaatgctgtcttggggatttccaggtcgaaggccacttccctggcttcattggcagtgttgaccacttggctggtgacaacatagtgggcgaagcgagaggtgactttgcagttgactttcaaactccggatgaacacgccatcgacagcctaaagtgagacatgaaggagctgtggcctgagacagggcctctgtcagcgagggacttcctgtggtacggggacttggcacttagccccagtgcatggtgcccagatgcaggaagaacagaccgcaggaagacccctgctctctggctgagaccgtgctgtgggatatgaggtgagatgggaacaagtccccatttctaggaccctggagagtaccccatgcctatggccctgatagaggggtccacccctgacaggttggggaaagcaagcctgtaaaaagggctctgtcacagacccctttgccaggactcttactcacggtgtccacagcctgtcgcttctgcaaaacaaaatcagggtcaagtgtgagaggaaaactcaggggaccaccggcctgccagttcagggatg

SEQ ID NO: 315832 - DNA, 4001 bp, Homo sapiens
gatgcaccagctgcttgggcttgactttgatgacaatttcatactgcatatggtttctcttcagcacttcctcataagtcagctgaaacgtgaccttgctctggggattgacggtgaggtggatggtgaattgctccatagttctccccgaggccctggatgtgccaccagaggcaacagcagacagacagagggtaaatgacatttgggtccttgtcacctaacatgtggcccacagaatttatttctcttagatgagtgttgctcccaggtttccctggacctcacaaatgtgttagctggctggtcagggtcagggcccaagatggcgggggcccacttctcccagtggcatatctgggaaaagggcaactgcacggcagcctgttcagtgcaccgtgctggcatctgggtttgggcagtttgcttacccttccatcatcctgggctgttctccactaaagccaccttgcagccatcagacctgtcctggctggggagggcagccctagagatgagaccagcaggcccagaactcacctgacaaggccggcattctctcctgagatagctgctttccggtactgcttccatgcagtcaccttgtcctttatgtctccgataaatgcgtttccatctgctgtactgcagggagggaaggacaccctcaggaaagatgagcctcctgaccacacaggtcctgagagggcctgtccatgtgagcccttggataaggacgtctcctgacgagccttccactgcccatggtggaactcaggggtccatgggcaatgaggtgagcagcccaggtcagaggccagcaagaagcctcagactctggccttggctccttgggttctagcctgaaacatgctgtgatgggtcccagtttgcctccaagatgggagccaagcacagacctaaagggcttcttcctcccctcaaagccagggctggtctgtggcccttctagaatgaggagatgctctgcgttatctggccactccgatccttgttcttaagctgggactagtaagcggcacccctgggagaaggcatgggagttgggcaggcacgcacacggcaaagtcactgatgaatgctgtcttggggatttccaggtcgaaggccacttccctggcttcattggcagtgttgaccacttggctggtgacaacatagtgggcgaagcgagaggtgactttgcagttgactttcaaactccggatgaacacgccatcgacagcctaaagtgagacatgaaggagctgtggcctgagacagggcctctgtcagcgagggacttcctgtggtacggggacttggcacttagccccagtgcatggtgcccagatgcaggaagaacagaccgcaggaagacccctgctctctggctgagaccgtgctgtgggatatgaggtgagatgggaacaagtccccatttctaggaccctggagagtaccccatgcctatggccctgatagaggggtccacccctgacaggttggggaaagcaagcctgtaaaaagggctctgtcacagacccctttgccaggactcttactcacggtgtccacagcctgtcgcttctgcaaaacaaaatcagggtcaagtgtgagaggaaaactcaggggaccaccggcctgccagttcagggatgggagtggaacacagcctgtgtcctctgccccttagcttcacctccttggtggtgctgggaggtcacctctccactcagaagtggtggaggtggtgggggtgaccctggccccttgaatgggggtcttgtgtcccgcccggggcctcatccaggttcagctgcctatttctgccctgtgggcttagccatatacctcgctgctcttggacctgcctgtagccgagcccagggcaggcatggcctgcaggatgaggagagataccaggtacatgcacaacagcagcccccgaggccccatggcaccgtccatgctctaaggctcctgctgccctgtcacctcagtcagaccagtaatcaatacagtgctggataaacatggattaaacattagacaaggtgcaggcaaatattaatgacaaaaaccgcaatgacttttgcatcaacctaacacatttagaggaatcaaaatttggcagtggaagctttttgcctcaggggggttcccagctctgggtggttaaactactgatggggctccagaccatgtccctctgtgtagaactgcgcttagcctatgtgaactgtgaggatccccggatggctcatctcatcctcgggctggcacaaggcagcaccagtgacacggtgacatgtggcaagaagcaacagttaaaaatggatttctaaacttcattaggctttacttttttttttttgagatggagttttggtcttgagtgctagagtgcagtggcaggatcttggctcagtgcaacctccacctcctgggttcaagtgattctcctgcctcagcctcccgagtagctgggattacaggtgcacaccaccatgcccagctaatttttgtatttttagtaaagacggcttcaccacattggccacgctggtctcgaactcctgacctcaggtgatctgcccgcctcagcctcccaaagtgctgggattacaggagtgagccactgggcccggccaggctttactttcaaatttcttttttttttttttttttaagacagggtctccctctatcgcacaggtggaatacagtggtgcgatcttggctcactgcagcctcgacctcccagactcaactgatcttcccacctcagccttctgagtacctggaaccacaggaatgtggcaccacacccagctgattatttttattttttgttgaaacagggtttcagtcgggcgaggtggctcatgcctgtaatctcagcactttgggaggctgagggaggcagatcacttgaggccagaagttccagcccagcctgggcaacatggtgaaaccccatctctaccaaaaatacaaaaattagccaggtatggtggcatgcgtctgtggttccagctactcaggaggctgaggcaggagaatagcttgagcctggaaagtggtggttgcagagaggcaagattgtgccactgcactccagcctgggtgacggagcgagactgtctccaaaaagaaagaaagaaaagaaaagaaagagagacagagaaagaaagaacagaaaagaaaaaagaaaagaaaagaaaagaaaaaagaaaagaaagggagggaaacagggtctcactttgttgcccagactgtttcaaaattctttcagcatcaacacacttttcagtcatgctttggccagggaggcagacacggtggcttagaaagtgtgtgacatccagccatgctggtgattctcacagtgctaacctggtattagctctgtcagagacagtctggacggtcggggtgaggcatgatgggagatctgcgctttaggccagttgcttcacctctctgaggttcttacccagttctagaaagaacagaagtgagcttcctcgttcctgcacctgggcagggaggcctggcagataaaggggagctgaagatgaatgacatgttttcataatcgaggactcatttgtgtcatgcattcctctaaaccctttattgtctaattttatcctcgcaacgttcctgggacactggccccataccaagagacagaacagggattcaaaccaggtctctcaggctctaaagcccaaggccatcatgtaatgacagagaagcagacttgaagatcctagagacaggagttcccagagacccatcttgcacctgcagtttcttatttttttattgccaaacccaccctgttccccaaaaaccacagcatactgggcagacagggcccctggccagtctagtctgtgacctgggttgggatgtgctggctgctgtgaccctgataagaggagggggcccagagccctcactgatctctgtttgcttgtcctggactttgt

SEQ ID NO: 315833 - DNA, 4001 bp, Homo sapiens
ttcccagggtaggtaacaccgtcgatggtcctgcagggaaagagagttgggggtagggagatcacactgggccagaccccctgttcccgagcccagagccagcagccatggtggtacccacaaggtgaagttggtgatgaaggccgtcttgggcagctccacatcaaaggaaacctccttggccgtgtctgcacggttgacggctctcatggtgacaacattgtgagcaaaacgggaggtcaccttggagttgattttggtactgtagacctcgatgccattggccacctttggggaggtgggtggagaatcagccagactgggacactggagaagcaggtttgcaacccagccacctcccttgcaaacccttggaggctctgaggcccctgcccggcacgcaaccctcatcctccaggtcttctacactggaagacttggtggcgtctccagtctccatgttctggtggccaccattattcagatgcttgtcctgcctccttaattctgcgatccgtttacacaccactgcagccagtgagagcttgccctttcccgtccagtcaccctgagctccagctatgcgtgggacactggctctggagcatctgcccctggctcttcctgctcatcctccacacctcacactccctcaagcacacagcccagcccacctcctgggtctttaggtaattgcctcattctgtctcccaaagaggaactgatttcctgtgccaagggaagtctccaaacaccctctttccaataggggtgttgaattttgagaggctctagggaggtgttccagccccctccccctagggatataaagatgcttcgtgagggtgtggcagggaccgcttcacagagccaggtaccagcaagtgctaaggaagtgtctgcggaaggaagggatgcctgtgaggggccctcttgggctacatcctgcgaggttggaggggtcgtcactctgtggtgctctttcccaggagtcctgcgctgttggaggctgccagggcagagggccgtaagctgtttgccagctgtgaggagtcagctgttatagcctacaccttcagcagttggggaaccagctccatcctgccctgccccactcggtcccaccccctggtgaaagttcttaccccttccgggaggctccgtttctgaaaaaacaaaaacaaacacaaacacaggaatcaggccaaggccaacaccaaggccgcatggcctgggaggctctgggctgagaccaggggttcagtggtgccctgccccccacacacctgagtggcccccagacataggaccctccagagccacatgtcagagtaggaaaaactctgaatagatggggaaactgaggtccagagaggggcaggtatccaggttaccaggagagcagggcagggggaactgaacccagagctctcttcacaccctacatgccccacctcattctatctcccattctgcctttccctggcccccaggcccctttaggcctccttccagagcacccctgcccccgccacaccccgcagggctcaactgagcattttgtagaggtcacactcgtttgagacttgaaccttcattgcccctcagtgaagtgagcagttcctggtgcattgctcttttgacaggtggggaagctgaggcccagggagttttaagagccttcccagggttagacaacaggttagcataggcctcagctggagcccggttctcccagtgtccacactactcccagcagctcagtgcccagccctctgcctcctcttcactccactcagaggccttgcccagcatgatgccttctgcccattccacaccaagacccagatggcaaagagggggcagactcaccccaagcagccgaaaggggcttctcgggaagccagaggctgccaagctggagagcagagccaagatgagacagggccaccatgcaaatgccatcgctgaatactcaggcctggcccacgctccttatatgagcaagcctggtgttttccaagcagggtcagtgacctgcagcgggggtgggaggagtggaggcaggaagggcctccgggaagctgggcatgggtggaatgacgggtccctcgatgtgtctgtctgaagaaggcctggtgggtcttgccaacagcgttggggcttcattcctgagagaccgggggactcggaagaggcccgcaggaaagcagaagctgtgggccaacaaatggaccctgggactccctggcgtggatgatggagatggggtgtggagttgcatttagggcaaagggcatctcagcattgttgcctcttatccctaccactgggacagcctctctctggcctcctggattgcagcccctcccttcttgaggcagccagggcgtgaaactagactgtcaccttcaggctgggacctccacagcagagcccctcgctcactacccttctatggcccccaaagccccagggaaaggacacacaacgatcccggaagcccagctgtctctgtgatctgaccccagcttgtttttctgagctcactctcttgcaccagcacaccctccccttctgcacatgtcacatctttcatctctctgccagtcccagtgcctcccctccaggacccttccctggccatcccctagaggactatgggacatccctgctccaagccccaagccccctgagggcctgctttgtcatgaccttatgttgaggtggatgtgctcaggtctgcctgccccctctgcacccagagctcctgggggctggaccatgtcatgtttccctctgtgcttccagggcccagccagggacttggctgccctcagccttttggggagtcattgccctaaaagtcgtagtgaggctgggctccagcttccaggacaacaggagctttagaggcaggacctggtctcagtgggggctgggacctcctgagccacctcaggaccctgccagcctagccccatcagggcagctgttgcacacccaccatacccatggcttctctgagccaagctgaccctgtgaccctcccactgggcagcccactactgaatggagtcgacaaggacggctgggtccaggacaactaacttatggggagttcagcggcctcagctgaaagctctggtgctgactgggagatgtgcagagagagttgttgggagcagaggaaccaagaaggcaaaaggcagatgccacggggcagcggaagccctgaggagggtgtggtctaatggctggaagaggcagcagccacagagcaatgatggagagttgccaaatcagccaggcactatggctcttgcctgtaatcccagctttttgggagactgaagctggaggatcacctgggcccaggagttcgaggctgcagtgagcgctgtgttcgtgccactgcgctccagcccggatgacagggcgagacccccgtctcaaaaaaaaaaaaaaaaattgaaaagagggagtttccaagccagtgaaatgatggccaagtggcagatgctgcctgtgcttggtgtctggctgggcggtgcctgtttccctcgggcctcctgaacccttacaccaacctcactggcagcaggcaccaagctcgggcctgatggaggccaaacccagcaggtgctggcgcctgggtgtggagagaagacccctcagagctgccgtgtcctcatttcctggcttctgggatgttttcagtcctgtggctgctggcactgggtggctggcactgttgcccaatggctcctcctcacggacctgcagctgcctgcagagcttctcctgtactctctcatctggaccactgcctcatccccaagtgcctggagtttggggagacggacaactcgaaatagggattctgtagctgctcaagcagcctcaagggatggctggggacttggaggaaccagagtcgtcatgcagactttataattagacggaatctaagagatctttgggttcaccgcctttccatt

SEQ ID NO: 315834 - DNA, 4001 bp, Homo sapiens
ctaggagaatcctcctcaagccactctccactgtgaggaagccaagggtctagaaggttttctgtactttgagctggaatgtgcattttggtgactccctcttgcctggtctggcctcaggaggcctcaagtctgtgctcctcaaaggcaaagtcacaaagattctgtggttctctgcctaacacctggacagcacttagggatgatgaatggctggatggagggaaggacgggggcatctttgagaataagtcctttggcaagcccctgttcctgtgtggccccaggtgcagggtgtactcctgaagatgtacaccctggcatgccttacttcaagaagagggtttgctggcacagagcgatggagtcatagcactggggggtgtggagaggggaggagggtgggaaggcacctacatggagaagttggtgatgaaggctttcttgggcagctccatctggaaggtggcctcctgcacagtattggccctattgaccactcggctggtgacgaccgtgtgggcaaatcgggatgagaccctggagtccacggtgaggctgtagatgtcgatgccattctggaccagcaaagaagaagggggttgcagggtttcaatgccacctcagctcggggtgacgctcttcaagagttggccctgactctggctctagaccaaaccctggctcccaatctgactgagccactgaccaggcctcaggctgaacccagtgaggcatctcatatgtgaacatttgtctcaggtaagagatagcagtgtgcttcattccccaccctacagcaccacagggcaggggccacgtccttcttgatctataggggcccagagcaccccttggagaagaacaagcatgcagggggtggagctggtgaagccagggccagtgtctgggaggggcatcacactcagcctttgggcaggggtgagagacctggtggggtcagggagctttgcatgctggcttagctttgcccagaaaaagggcagtgaccaggtcctttgatttctggagactttggcctctgtggcaacagggaagctcccaccagtctcctagaaggaagccctcagagctgggagaattcggaggtagactagagtctggtctctgagagttgggaatcttcctctctgctccgcagtggaccctccccaactcatccccacttccgcagggcactcccctagcaggtgccatttgccttgaggtctgtgtcccccgaggaggggcacacgggcacctcttacctgcttgtgtgtgacatgctcatgcgcactgcaccaactctgctcggctgcatgcggctgcctgaatgcagtttggcacagaggtgccaagtggcttgtttatgtgcttgggtatttgctctgcgacaagcactgtcctaagcacttcatagatacaatgggtttggttttcacaacaagcactgtcctaagcactttatagatacaatgggtttggttttcacaaccgccaccctctgaataggttctagtattaccctgttttacagatgaggaaattgagacatagtcagcataaatcattctcctgaggtcacttactaaaaggcggtagagccaggcttgtaaaactgtatttcctcatttggaaaatggaaatgattggatcatcccctctattaggtgggagaataccagtaaggcccttggggtagtgcctggcgggaggtctgcaccatttttttgcacacacagggatgcacacgcacttgtgctgacacgctggcacatgcggaggctcttccccacttcccaggcgttctctcatcccccagctcacgccacacccatggacactggctaccttttcggcagtagtagtctggtggatggccagcagtgaaagcaggacgagaactttgctgcaggtacggacaggccttgggggcttcatcgtggctccagtgtctgccaggaggcttctgaactcgacagcaagtggggaatggattagtaacttgtttgctgccccacccacatgggggcaggttctgggaaattgggatctacaagccaaaaaccacagtgacctcagataagcaaatgacgaacgtcccatggaccttggctgggggcaggaatgtataccaaagaaaggtaggctcagtttggagtgggggtacatgccccttctgaaaagtgcgaaaccttcaccaggacccttcacaccaggcattccaccaagctccacagggctgggagggaattgacagtgaagatgtcagtctgctctccctaagtccagcccggggagaaacagcgggggatggtggggaagactagggctacagggctaccctagcggcttcccggaagaagggggcttggccaccaggtaagtgtgtctggctgatgggagggcccaaaggcatggagtgactctgggaggtgtctgtgtggggcagatctagagtcaggatagatacgccgtatttctgaagtgagaggtgctgggcacggggcgcctccttctctctcctggggtcccaggttgctgtttgggtgccattaatctagccagggctttaggttcaaccccagcaaggcccccaaaacaagaatggcaatacaactgagtcataaacctgccacatcctgtggcacagaggtctccatgcggggagtttattgacagaagagcatggaacagaagacagacctgacagtgccagcagctcctgaggggtgactggggagtcatttggtggagcagagggagcccaggaatcgctggttgagagagggcagaatgctgttgtcatgagcagtgtgatgctgccacagcccagacccaggggagcgctgcccaaaggcctggggtgggtcccggccttgctaaagttgaagcgctctgctccttgtaaagtgggatcgagtgagtacatattatgcgctctgggcaccgctggggctcgtgttccctggtggctctggggaagccagctcctgagtctgtggccacagatgggtaaagatgagtcataaaagtgtggccagatgccaagtcctggatcagggaaggacggcggctccgtgacaccagccctgagggggccagctgccttgggaacctatcgggggccttggggcagccagtggcttccagaggctggggagggtttctccaccagtcctgtctccattagaggtggcggcaggcctggggcaaaggtgccatagactggagctatttctacagctgcaaggaagacgttccccttccttagcatgactggccagaagcctcatctctgcgcacgtctccactgctcacccttttggctctggatacgattgggattacacaggggaacacgctcctttcagtgtctgggggaagagtctccccatggagtccagcaagtaggactgggcccttcctcacagcagggctgctcccttggggcagagagcacaggcccagcccggactcagggctatataaggtggccaggctggccgggactgtgggaaacgttctgggcagccagaacctcctgggacaggaaggcatccccagcaggcatcagccccgagccaggcaccacaagcccaggctctgccagtccagctccgaaaagagccactgtcagcctgtccatggtcatggtcttgccatcacaacgggacaggcctctatgggtcttttgaacctggcacttccaggcacacaggggacagaggactggagagagaagggtcatgcaggctgagaatctggtgttccatgccccagacagcatggttggagcagaatgtgggagtcttacccctgctgtttggaagagacggtagctcaggaaactgactgccagagaggaatctcaatctggctctgacttggaggggacaaaagccgggaggaggcagtgtgaacaaaagtgtagggagggagaggggttttgaggtccctagtgcagtgcagggagaggggttttgaggtccctagtgcag

SEQ ID NO: 315835 - DNA, 4001 bp, Homo sapiens
gctaaatatttagaatgttaaaaaagttattaagacccagccacccacccccacctacctctgttaccctgttatttaccatgttcctgaacatttcaggagaaaaaactcctgatagccaaatctgcagcaatagtgatgtacgtgcacccgttgaaacctcccactcttcaaatgcagtctgaccattttggggaaaaaataggaactgttgtgtttacagataaatgctgctctcagctcatattccaccacgggccccaaaacaacagggacctgccagattccttgacactcaggtggcttgagtcaagggctggatgctaccaccttaagcttcaataactcacttccctttttaaagttctaattctttcaacttgcagcaaccactttcatttcttgcaatccaacctactctgattaagcacacgttcaaaattagaaaagagtgactatttcttgaaggagagaggcagttaatactgcttacacattttggcatatgaaatgcactgtatccttcagaatttaaatcatcagcatgcttttcagaccggcaatgggccgccgttttattgctccatttaatggccttttcccctcctctctcataaactttcaggctccttcaattctcagctacttccaagaaacggactgtccactggacctctgctcccaaaagccctcaccaaaggcagaggcaaattttgaagactgagccacggagtttctttttctttcttactccccacctccttggcggtttagatagaacttaaaataggcttaggacaaaaactcattattgactacagcactcaggcttccacactcacctgacctgggtcaggcactctgttgccaaagcaagcccagcgaggggtgcaaatcctgctcctctgtagtcagctcctaaatatttagaaagaaagaagactgagtaccagaccgcggaagatgagctctaacagaaatgctccaaattacaagtttccaccttctttagcctccttcactggggacagcccccccgcccccaaacttggtaggcaggttggtgggatcgcttgggcgaagattccaggtaactacgcttacttatttccaggatgtaactgacaattgagactaggcacgcacaaacttcgaacgtgcgggaggctggaactaagggaagtgtttggcagatcccaaagcacttgtttcccggcgagaaggccaagtatccgaagcccgcatcctcattggacatgagcttcgtccacacttcatccctcaccgcttctccggttttcttccgtttttaaaaaccctccccacggggggcccctacacatgcattattctcccaaccacggagcgcaagagagggatacatttttagaaagattatttccttgagcagactcacatatgacacccccacaacctctcttcaaaaaaaaaaaaaaaaaaagaactatttcctgcagctgcagcaacagtttccaacttgggggaatgccacatcagaccagaatggggagcccccaaagccacgcactagagtagaggatatttgttttttaagcttcaaatgagctccccccaaaacaactgcccgcagtaaaggaacccccaaatgcatgccaagtgcatgcacatccatcaagatctccccgagagcggggcaaaaacttctgcgcccggggagccagtgccaactccccgcgccctctgcccggccccagccgctaccttggtgcccggggagccacgccggtttgggggagcagggcgaggagaggggttagcagccgctgggtaatcccatgtccgcgaagagggagctcgttccgttaggatggaagcggaacacccacacctcctctcggcgtgcgctttctctctctccaccccctgcctcctcctccaccaccacctcctcctcctcctctcctcccaccccagcgagcttgaggaaacgcttcagcagcacatccacatggttactgcactttaaagcggctccgggtggcttatataggccgggaagctccctgggcaatgtagtccaagtagcgggtcgtggcggcgcctgaggctgcggggagggactacaagtcccagaatcccctgggcgcccgggctgggccctaaatagacgcgtgcggggacaggggaggggcgtcctgcgaggctttcaggctgctgagcctgttccttggctggggtcggtagggcttggagccagccgttcaaagtcacccctgggaagcgcccgcaacccttggggacgcctctcctccggctgccccccttccctggaatccaggtgtcactggggccggggaggggctaggagctcggatttctgctttgggaagtttttacaagcccaccctccccctgccttggttccccgagccaagaatttcagaaatccggggcacaaaaacgccagtgtttgcggtcaaggattaaaggcgcgaggtgtctttatttaatctgctccgccctgctcgggtttgcacgagaaaccaagcctgggagcgacggtccacgcaagcggagacacaggcaagtcgcgtgagagcacttttctgagcccgagttgcttgtcttttatcgcccgtgaggaggtaaagaaaggcagacctctccggtgcacaaataaaggagccgtgttgtgacttgccggctctgagattgggaggcagaaaataaatacaaaccgcgacctcagtcctgaccgtacctctagcagcccctctgctcctgggagctgtaaatgcttaagtaaataaaccgcaaaccagaaaaataagggcttaggaaagagccgctcacacagagatgcgcatccaggcggggcgctctccaagagctccgaatggggcaaggtgggtttcacccgctgccaagtaatgcctgggctcccgggctacacgctgcttagggctccggcttttgcaaggaggggaagagctaagcccggaggcagtcagccgactgccctgtcttgcctcaaatgacgtatattcattcctcaaacgtttcctgagtgtttactaggtgccaggcgctggggcatagtggtgagccaaacgcattatagcatcccagacaggcacttcctgacgccgcctaaagatctgttataacaatagtaataataatgataataatcaatggggaggctgattttattgagcccagaccacatgcagttttcatgcgtcatgctattgagttttaccaactgtaggtatatttattatatctatttggcaggtgcacaatccagggctcagagaaatcaggtaacttcccaaatgacccctcgagttaagtggtacagcctggactcccgttccagactctacgtgtatgaaacccttgtctttggggaaatccaccgccattgccttaaatagcctctctccccatttaggagcagcctctgagcccttgggcaagtcattttcatctctttgccccagttttgccatctgaaggaaattcttattagaatatgtctactttttagcaggattccttaatataaaatcgagtctcatgaaactttaggaacaaattagaggagaatcatagctaatagttattactgacataataatgccaaaacgaatcataattattgacacttattgggtgaatgccatgtgtcaggcattggtctaaactctttctgtatagcacctaattaaatcctattaagccattttttacttatgagaaaactgagggggggcacaaagcgattaaattacttcctccaaagtcacacaaatagctgagtcttgaaccctggtcctaaactactagtctccgctacctccccaatgtaaacatgtgcactgtatttgcctgctcagataagcatttaatgtcagtccaggaaggggcaaagctcttgaaatagacaaagtttgtgttcacgatattcactcctgccctccgttccctgtcagcattatcccctggtcactgga

SEQ ID NO: 315836 - DNA, 4001 bp, Homo sapiens
aaaggcccaagtatttgtgttccaggaaagcaagtggttatgtgtggcaggaacatattgttagggggagaggggtagtgggatatgaatcacaaagactatgagagttaaaagtagaagaggctgggctcacaactctaatccaagcactttggtaggctgaagcaggaggactgcttgagcccaggagttcgagaccagcctggcaacaaaatgagaccccatctccataaaaaaaaaaaacaacaacaatactactaataaaaaggcagggctgggcgcggtggctcacgcctgtaatcccagcactttgggaggccgaggcgggcagatcacgaggtcaggagatcgagaccatcctggctgacacggtgaaaccctgtctctactaaaaatacaaaaaaattagcagcacgtggtggcgggcgcctgtagtcccagctactcgggaggctgaggctgagaatggcgtgaacccgggaggcggagcttacaagtgagctgagatcgcgccactgcactccagcctgggcgacagaccgtgactccgtctcaaaaataaataaataaattaataataataataaaggcagaagggtagctcagagctgtgtttagcaagaggacgctgactgcaccataggattaaagtctggcgggagaaggtattggcagagaggaaacgtactcaggccgcccatacttctccagctagattttttcatccaaaagaagtacatacttatcttattcttctaattctctcacgtcccaaacgtatcctcctcatatccctaaaggcaatgtttctactctgggctggcatgaaaacacctgcttaagttgtgagggccctttcagccggggcctagagatgtgaaacaaatgagagttcaaagagcttgtcattctttaaaactctggagagagagatgtgaagaacattctgggagagatcaatggatttaaggaagtaaaaattttaaaatttttatttaaaaatatttattgtagaaaatgtggaaaggttggaaaaaaaaaacagtcatctctagacttcaagctccatgaaggcagggaacagttttttttttctttaataaaattgtttattgaaggtataacatgtatacaaagaccacgtctgcttttgctcactattataacctagtgtctagcagtgtatgatgtttggaagctcagtatttgtcgaactagtaattgaatgtagaaataccccttacgtgggagtgtttataaaattcattttaggcaaggcgtccttaggaaaggctgccttttactgtctatatccccccaaacggcccaaaatataacacctaccatatattacgtggtaggccttatgctactttctttacacgaattactgattaatctttcaccaaaacctaaaaggcagattattctctccctctacagatgaggaagctgaggctcaaattagaaattcggtttcgaaggtgatacagcggggccagcatcgacgtgactcgggagcccacgcagggcgggagcccacgcggggctggatcccctcaaggcaccgggcggaacaaggggtggagctcgcgggggccacggggctttccaggatgggggacaggcccgaagccgtcacgggaggaggggacttggcaggtgagcgggggctggctggggagcaagaccctgaggccgggccggcgtcgctccccaagccccgcaggctccagcgggggagaaagcctccgtgctcctcgcctcacttcatacctcatctggtagtgcatggcgacgcgctcccggtgctgaaagtcgctgccgtcggtgccggccgctcgcgggcctgctcgagacgccattgtgcctgcccagaacccccgaacccctcacgcggacctggtaccgcaacgacaccgccaagcggcccactgaccctatttgcgcccccgcagccgcgcggctccgtgaagagaacttccggcccctctgtctctggaggaccgactctatggtcactcctctccgcgcaggcgccctcgttccctctcgcccccgccccgcccagccccgcctcttgtggagcgcgcaggaaattaatccccagcctcttttgctggcgcccagaggccgcttgaacacttttactttcttaagctgtaatatcagttaggatacttctgtccacactttacagagggggaaactgatatattctatgactttccctggagcacacatcattcacacagcctcacacctttaatcccagcactttgggaggccgaggtgggtggatcacttgatgtcaggagttcaagaccagcctgggcaacatggtgaaatcccgtctctactaaaaatacaaaaattagccaggtgtggtgggttcctgtgaccccagctacttgggtggctgaggcaggagaatcgcttgaaccagggaggcagaggttgcagtaagtcgagattgtgccaatgcactccagcctgggggacagagtgcagagtgagactttgtctcaaaataagtttctcacatttaattattgcaaagagaaacagggaatctctcagtgaggaaatctggcttgtctcccttaaacatatagtcagttaatttgatcaataatgagataaactgatatcttgtgcctcttttaatagactgaggacacagcatcacttctatgatgtttctgccaaaaatacctaactgaatctaatcatgaagaaatgacataaatccagacggagggacagtctagaagagagctggactgtactcttcaaaaatgtcaaggccatgaaagaaaaattatttccaaataaactttatctgtagagacaaagtagaatgaccattgccagaagctcgaggggtggacagagaatggggagctagtgtttaatgggtacagagcttcagttcgggaagatgaaaaaagttctggagatggatggtggtactgattgcacaactatatgtgtgtgcttaatgccacggaaactgtacacttaaaaatgattaacatagtaagttttatgttatgtgcattttaccacaacaaaatactaagcgaaactttaaagaaagaagttatattatccgaataaagaaaaaaagaaagaaaaaagcatgtatagtgagcatcttccatgcaccaggatgctctgctatgacctggggacgcagaaataaacatggtccatttcccctgagggatcccagcccagtcgggggaagaacttgtacccatgaagctaagaaattcaagaaaacacaggaggctgagggaggaaaaatgaggcctctctccctgacctggagggttaggaaagtctctctggagtggcagcaattgagctgaggtctgaagcctgagtgggaattggctaaagaggtggggagcggaagagcttttcaggcagagggaacagcatgtgtgaaggccccaaatccagagagcacttggctcttcaaagaactgagaaacttaagagtgactggagcatttggagggttcagtaaagagttaagtctttatcccagggggtttggggaaccactaaaaggtttaaccaggaaaatgacacagttttgcatttttaaaagataggtctaggtgggggcacagtgcctcaagcctgtaatctcagcactttgggaggccaaggcaggagatcagcctgggcaacatagtgagactcccgtctctacaaaaataaaaaataaaataatattaactggcatggtggtgcgtgcctgtagtccaggctactcgggaggatgaggtgggagaatcatttgagaccaggagttcaaggttacagtgagccatgattatgccactgcattccattctgggcaacagagtaagacactgtctgtaaataaataaataaagatagatctagttgctgtgtagagaatggcttgcaggggccaagggtgaagcagaggaatcacttgaaggctactgcagtaattcaggcaa

SEQ ID NO: 315837 - DNA, 4001 bp, Homo sapiens
tagaaaacaagaccctttatgttttaagtccttacccttagccatttattcaagggcacttagaaggcaatggagccagaacttgagcctaagtttgtgactcatggattcaagcatttctaaaagataaaaataaattggtagtattatagcttatacattaacatctagtttcttcttataattagcatcatatggtagtgtgaatcttgtttaaattcatgtaagtataaattgtctctaagcctctaaccattcttaattggacttttcttagttcccggttattatataccacctgttcctgtctttcccaggatgtttgttggagagtgagaattaactgccttggtaatgaaaactaccatttaaagagtactttgtttgtgccatgcactgggataagtatttcacttgtagtttctcacttagcccctacggcaaccctctgagttggtactaccattatcatcatcacccctttttacgaatgaaggaaagaagatacagagaggttaagcaacttgcctgaggtcacaaagataaggaggattcacatctagtggtctcttctcccttctcccagtctataatcttcatcagtgtgaagttctgatgcccttcttaacgccctcatctcaagtctgggctcccactggcctgtttctcggtgctagtgagaaactgcttttagtgtgtgctggtttggtttcctccatctttgatttctcccctgataagggccctgtttcacctgctctgtgcagctgtctgcttccacctggtattgatctcccggcacaccaagactattcctcacagagatgaatacaccttgggctgtatagcaaggcttccccagggccatcttttccatcaggagtttgatctcattcttgccaaaacctcttaaagaagccaaagcttttaaaaataatattcaacattttaaaaaatcaattaccaaacaagttcacagtggcttttccttacaaaagaacatctggatttgtgtcacattatcagaagactttaattgcattaatatttgataaaatgtattaaggtcagattaacctgagaaataaaactgattttctcttttctttccactaactgcaaattctgtaccggctgtatctgtagataatcaaaaaagggagctatcctcaggataggtagtaatagttctgtgaagctaagaggtgcatagggaggaactcagtatttactaagcacctactgtgtgcaccatatatgatgttatatattttacatgtatgaattaaataatagctccagagcaacctcagcacataggtcttactgtgcccattttatagatgggtaaacaagctcagaaaagtcacataaatcaggctaaggtcagtggcagagctgagacttgagcctgagtctgtttgcccccagcttcttactgcaggaatcattctccttctgcactgcttctcagagagttctatcaagagccctgcaagacagggcttaacttgtatttgactagagtactgagcttgatgaaaaacccagcaagaaatgagatcctgttatacagatgctccccaaatgaccctgtgctcccgattcccagctgggtcatacatgtccccagaaaaacagcctttctttactttccatgggtttgctacttgcctctgtttcattccttctctctcttcttgacccccctcccctctctgctgtgtctttctgcatgtctctttatgtctctatgtgtatttatctctctcagtctctcatacaagcatacacacactcaggatacctcgatccagcagccggagcaagcggagataccagagataccactggtcccagaagcggtccgtcatcccaccctgaactcatccttcacagccagtcccctcggcagagcctcatcccaccaccgctgactcgaggaggccggaatcacttgacgctgggctcgcacacagcctgctctaagcaaatgcctgcctgcaaagacagccaccagtcctcccacacagaggctgactgtgccgggagccggtttcacagcaacaaaggaacaagtgcagaacaacgccgtgtgcagaccgagcctgcctggacccaaggggaggtcggagatgcgtgggagggagtcaggaagggttttcgcaaagacgcgaggtttgcagtggtcttgagaatgaaaatccacagtcaagtccatgtcttaaattttttccagcatctcctgccatcctggcctccatacctcccacaccagaggccagtggctcctccaatagaatatgggatgggaagccagaagctcggccattttggactttgaggccagtccaggagcctgggagcgttactgcctcactgcctcactgtagggaccactggctctccttgcccaagactgcaggacctgcatgactggtaaaaggccacagatcctttttccctacgtcccttcatggaacctttgttatagtagagacagcatgggctttgaagtcacacagtcatgggtccaaatcctggttgccacttaatacttgcctggcctggatcaagtttttcagctccatgtgcctcagcttcctcctctgtaaaccagagagaacagtatttgtgagcctcaaagcaaaagaagaatataatgtttctggtgttgcacctggtagatactggtagatagaaggttctcccttacctctcaacccctctccctcttgccagactctcagttccccacacattcatacatcccacggttttctatccccaggactttgctcctgcccttcctgccaataggatgctctccccactctccacctcatcatggccaaatccgcctaatttttccaacaaataactcaaatgccacagaatccaggcagacttccctgatcttccttcctttatattttatttttttcattccaccttctcctttgtatatgactcttctcccttacttgcccataaactccatctttgtgtccctcaaagaaccctgaacttcgcagttactcgagtgattactaactagacaaatgaacatgcaagggcatctgagtccctgatacaatgttattttcaaggcaaggagaaaagtaagctgcagagacctcagcccctgggcattgtctaaggcctttggggcatgacggggtgcccagtccttgcccaatcacagcccctcttacagtgggccagcctgtgacccaggtgactgggagtgctattcactgaaatgaaacctgaggagtccccaggtctaggatgaccttgttctccaagcctaaaaactacccaacagccatctgcacattcatcacagctctgtgcagcctaggccatgccagcaatgccttctcactgtcctaacagaatggtggtctcccaggcctcctggtctccatcaggcaactggaggcatgtctccctcagcaccagctcttccttggaacttatacctccaagatgagagagggtgcagatttctgaagaactcagactggggaggaggcacgtccagggggtaggagcaaggagggagagggagaaagcaagcagagtcacaacctccaccgcctgcccctgccccccaactgccttgtggtttcttcttaaacggcagcattgggtctcggcagagacatcaccacccaagaagctacctctcaggctctgttagcattattttcttattaccttaaatggacaagactccagtgtgtagttaacacaagaatgcaaacccctcctcctccctccagagagaagtaacccggtgtttctcccttcacgagtaacaagaatccatcgctcacatgtggccagtactttttcgttcacaaagtactttcataactatcatctcctgtttgccctgcaaggtctgtaggatgggaatcactttctccagtatacagaagagaaaatccatgttccaaaagattaaataacttgtttaaggtcagataactcgt

SEQ ID NO: 315838 - DNA, 4001 bp, Homo sapiens
cttttcagctcccgctcctacgatagccactcgcacgcctcctctcctagccacggagccagcagccactgccttcacaggccctaggcaggaggcacttaccaggccctggagccagctccccagccctcccctgcatcacagcgagagtgaaagtcgggcaattcctcaacaaagcaagggccagcaagacgcccagagagttaccctgaagggcagccagggctgtcacacatctggactcaaggaggcagctgtggggacttcagataagcaccaccccagcccccacattctgtctgacaggaaacggactcccaagaaatcctgcagagaaactctttgcggggaaagcagggcagccttcgagcgaacccacccactcagattccccttggccatttcctgcttcctccgcgctttattccccctttccctcaattcccagccttggttttgaatgtttctgaatcagacttagagggtccctggcccctcacattccttcttcatctgaattctggtttctagagctcaaaaccacacggttccaggctgctctaattaaatacagagattgagaccatctgatgctaagattatgaccttaatgacgcgcaggaaaagtcattcagatttaattagttttggtaaccttatatctgctcaggatagaaaatttctcagggctatgttgtgtgtttgtggcacagaggatgctgaaaggtggcttggatgaagtttattcaccagtaactcagccagaaagttccattaggattttgcatagcagatgggatgggagactgggtggggtattgtaaatgggggtggaggccagaggcccaaaaggtgaaactttttaaaagggcaaatgtcaagtagggggctacattctcatttctacccacacaaaaacagtcttcccccgctatcctagcgtgtgttaaagtgacatgaacagccttaggagcatctgcttatcctatttgggaaggttctgattttttttttcagaagaagccacacaattgagaaccctccctctgtgatccttctcgccctcctgttcgccggctgctttgggggaaattggttgcttcctgcaagtctcttccacgacgttaagattagcagaataattaaatacagtcctaactgggcacagagagagttgttaattaatgagccaagctccggcccggagctacaaatccacgctggcctgtgaaaacccaggcagaaaaaaatgtgctccagtcccacgagaaaattgtcacttggcaaaaatagttcctggtgtacagacaggtgtcaaacacattcctgtagccaggagtcacacgttaatcccgcagctgagatccatgtgtaaatgagaggtgaggtacttctccgccactatagggacacacgcggctctgcgtccccttcccacccccgcgtccgcatcccactccctagcaggctggcgccctgacatccaaagtcgctgctaggtgactgagttcccaaacagcagctccgcatccaagtcagaacctcaccgccagccagcgagcgcgcgcgttctgtctgggaaactgtgaaacggatcgcagcaaactctctcacttcgccgccctcctgatccccagccccatccgcctaccccagaggcctccccaacccttccctccctaccaccctccctcgcgctgagcgcgaccagtctggctaacagaaggcaccaaggccgccgacagccactcacctctacacgggaagcaacagcagcacttagcaaagagccaccccaaagagggacctcgggtgtaagccctgtcgccgcccttcatgttgccccgccgccccagcgctcccgcatggcacggggcgccagcccggggtgagagcgcggcgggaaggaaacttcagcgccgccgcccgagagccggctcccgccctccccgctgtgctctccccgcaccgcggccgcagctctgacttactgggagccactgccaccttgggaagcggggaggggccaggcggggagggagggcctaaggggcggagttccaaggtccagctgtgggcaggagacctggccagcagcggccggagcctcatgtaacgctgcctgtggcaccaacgctgtgggcacggggcaaacgggtggagtttgagcccttggcaccaaacaggtaggtactccttatgtgcaacttcctcccttcaaaggccaccacaatgggcgttggcttaaaaaatacaactagatggggccaaagaggtaagagaggggcagacttagatgctccaagactcaaggatgcccttttcttcctcgcagcctcacccgttccctccccacagcctcctctgtattgaaaacaccgtccccaaccctttcctttccttccgtgtaatgctgattactaataatgataacagtgcctcatattgatcagctctccaactgtaatgacgtgaaaacacactctgggtttggaatcatacaaccaaccttcaaagctcagttttgccacctgctagctgtttgaacttaggcaagtcacttcaccttttatcttcagtttccccatttaaaaaaaaaatgtaaaagaattcctatattccacggttgtagattttctttaaaaaattttctttaatagaggcagggtctcgggtcttgctatgttgccccagctagtcttgaactcctgggctcaagtgatcctcctgccttagcctcccaaaacattaggattagagatgtgagccaccacatacagccgatggtagaatttaaaaatatctatggatgtctcccagagttgctgatttagtaggtaggaggtggggcccgagaatttgcattgctacaagttcccaggtgatgctgatgttggtataggaccacactgagacctacttgagattcagactttttccttgcctatttggcaactgtccccttttctttttgtaacagccccttgacttgtctttgaggaaccagtcctcctcccttctcaggccatgtttctgggctaacatcctgttacagaggtgaagtttaatatttccaggtgaatgaatgcctacagagaaacttcgaacatcttacttacggtgcaagacttccattcaccatcccctcggcccaatatgcccagtagacctatcattcctttacttatatccctatccctatcttttaaatctttttcatgtttcaaggccaagcttgctttccacaacccccttgaagcccacttggaccacatcagtgggacctttccatgaaccactgtattactcacagggtgtctctcccattcctttgtgtccagctttagggcaaagggcctgctggaaacacacaacactcataaagagggcccattcatcagaaaaaagggaagtttgtgggaggaatgaaaaacagaagcttgatcacccaggtaaccaatgccttcctggaagaaacacactcatgggacaaggcttttaaaagttaccaggatttggggcttcctttcccagttggaaccatgcttagatttgtgctttatttatctatgtgacagccaggcatggttgctcatgcctgtaatcccagcactttgagaggccaaggcagatcacttgagcccaggagttcaagaccagcctgaacgatgcagggaggccctgtctctacaaataataaaaataaatgaataagtacataaatgagcggtgcttggtggaccatacctgtggtcccagttacttggcaggctgaggtggaaggatcacttgagcctggggatgtcaagcctgcagtgactcatgattgtgctgctgcactccagcctgggcaacagagtgagaccccatcccccccagctcaacccccccaaaaaaaatgtgccaaggcatctgccacatggttgggataccagtaaatgatcgaagcatgacctaatgagtaataatagcttacatttattgagcatttatatgctaag

SEQ ID NO: 315839 - DNA, 4001 bp, Homo sapiens
ttcactcaacaaatatttattgaaccagtgtaggatacagaggtgcttaacataaacctgagcatatggtgtggaaaaagagcaagcatagacattccattgtgactgagaagctcctgcaagtaccaagaagagtataacctagatgttctagtagaataaattatagttatgtcaaaattcagaagtggtcactgcagcttggttgtgacaatcgggaatctggaatctgggaacttgaccctctttacagcaggcaggaagaatacagggaggtgtgagtgtgtgtgagtgtgtctcttccctgcctcagccacaggccgcaggagctgacaaggccaagtccccgcccccctcagctgtcaccctgtcaaaacaaagccgctgctgacagcgcagggccagcctgccccgcggcctcgggcaatcctcccacctcgggaacacagcctccacatctggatctgcagctggaggtgacagggtgcctaaactggcatggagagtgggtagcaagaaatgggtgtcctcaaactgagcagtagcgcccgccgcgctgggctgtcactttgccaaatcctgtttacacctcgagcagctgggacagcgttttaactaaacaagtaataatacaataatgacagggctgtcaccgcgcgcggcagtgcctccgcccccagccgagggcgccaggcaccacaagaccctcgcctcggactctgcccaccttcccaccccgcgctttcctccccttcgctttcccaaagcgccaggagtccgggagtcttctccacccccactccttgcacccagttcctcccagtgggacacaggaagggatcgattgcagaagggaccactcagtcccccaaaagatttttccttgcccctgggtcacccgccacatggagagcaccgctccactcccgggaaagtgactccagcgagctcctacagagcaacaaaaccccaaggtagcccgggagctcggatgccgaagctactcctttcaagcggaaggaatgaagggctctccgtcttagtgatcccccttcttcaaacccagcaggactcttatccaagaagaagctaattgggcgcgggcgacaagagcacttccgcggtgcagcggccccaggcgggaggcgagaggcaggaggcgggaggcggaggtggaagcgggagggggaggggggtcccgcgggctgggcccctagcacccatccgcggtccgagagcggcgagcgcgtaccttgcaggcggagtacactccgagtttctccagtttcttggcccgcggagcggagcgtagttgcgctttcttcacggcgattcgggccgagccaccgcctcccggtccttcggccgtgcccgctgcagccactgccgtcgccggaccgcaggcgcccgagcccccggcggcagcggcgcagggggagccctgcgggggcgcgggcggaagcgccgcaggctgcgggggcagcgccccgggcccggcccctgccccggctcctgccccgcagccgcccggcccggccccgccagcctcggacatgccgccccggagcacggcaggaggcgccgagtgtcaggcgccgccgccgccgccagggtctccctctcgggctctggtagtcgggagagcgagaccctccccccacgccctcccgcccccttcgcccacccccctccccgcccccgccctccccctagcgcgccgctcgcccggctcgctctggccgggccccgcgcgctgatggtggtggcggcggcggcagcggcggcagctgctcccccaggagggaggggactagcggctccgctgccgctgccgccgccgccacagcacacgccctcccttggttctcctgcccgggactctgctccgcgccctggctgcggacatgttcctcgggactgcggactaggtgtgcgtgccggcggctgccagcctcacggtgtctgccagcgctgggaggccccccacggcctcttttccgctgcccgcggggtttgcaccccccaccccagtgcttcgacacctaccgctcgcccgccagggggcgaggccaatccctgggtgtgggtgagggtggggacgagggtgggggtaggggcctggagcccaggcacctgctggccacctcccccctccgcggccccccatccgacccccgcacgcctgcaccagtgggagggggcagcctctcaatcatttgtcctttcactctcttccaccctgtctctgacagagagacaacttcctccaccctagcgggagccagaggaaaaaaaatatatttttgaaaagtacccgtccatgctaatctttttctttgttgctaattcaccaaaataaagacgtgatgttctccctttctctttttaaatactttctgtcaaactattttttaatataattaacactttcttcccatagcaatttctgggtcaaatctgccggaggaggggaaaaaaacttactattctctgtaatttttgtttgaaagtgctggttgctaaaagaaagattgtctaaaaagcattgtcaaaaactatgcagtggaaaaagtttgaatacaaaaagtttgttaacaggattcgtttctgggtggtggttctataacgttacgtagttttcaaaattgtgccaccgcgtgcgtattaaccaggaaaaagatataagcataattcaaaagaataaatatcgattttggcctcaaactttaaaaagaaaaaaaaaaccctcaactcagtgtttccaactcttgttgaaaactgttgttttcactgttgatgactgtggagcatacaagtcagtgctgcgtttgaaagtggtgtaccgttgatcgccttcttaagcaggttttaaaagcccagggctttttctcaggacccttcagaagtgccctactttttgttatatgcaatgtgggtcataatgtgcttattatcagattttatgcatgctgtatagctctcaggccagacgctttaaggggtgtgcttttcgtgggaaacattccccttcttctttttccagattctctgtgttattttgacttgtaatgcaggttaatatataaacattgggaggtgggggagtttgtagatctaaacagtgatattagcttagacagggcaaaaggcaatattctctcccaacttgagtccagtcttgaggggatgaaatggcagattcttatcaggttccattcaggacaattaatttcagtgcttcctttcttagcttgacgtgcttcacgttaccagtgttactctctcctggctctgctgagatgtttcgcagatttttgccattctccgcaaagcagggtgagagtcttaaaggctgtgcttctctgatcaacctctaacatggatttaacagatactaataagagcttgggttccaccttgcaggcatttgtcaaactgatggaatgatccacttgagatctgtacatttcactggatataaatgttgcctcaaaaatttttaaaaaaagaaaaatcacaagcattgaactctaatggtgctctttgtactttgagatacatcaaaaataagatgtatggatgcctccatgcatgggtaaagggtggatgaacagagatatgataaagcaaataggggtccatataatagagtctaggtaatgggcacagtgcgcaattctttcaacttttctgtatgtttgaaaattttcacagtgacaattgggggagggaacccagatttaacattaagtcacctatcaactcctcctcccaagcgtccctcagaattcaggaggcagacaatttccaggatgttttgaagcagaagtagccaatctcctttcaatccactctgaaaaccatcactgtctgagtggcgaatggcttgtgccattaactgaacattatttttcattatttccctgctcagagtacccagatgacatactgccttaggctgaaggcccgtggtttcaagacctattcaaagtgtgttatga

SEQ ID NO: 315840 - DNA, 4001 bp, Homo sapiens
ttagtcccatctttactgctaagaattactttctgactgaaatgtctgaacaaaccatggtaaaagagaactgagaggagaaaaatattgggggaaagttttactatgtagtatttattccatgtgcatatttctaattttctcacttagatttaagtgctaaatactcatttaatacgggctgaataaacagtaaataaacctatttgttctcataagcaaaacctagatgatatgctacttcttagcaggcattctttcctcttactacaattctaggattaaagcattcttcaactacaaacattttacagtgttggagatttaagcaaaatccacaaattaaggacatagaatgaaaactgacagattattagtaatttatggttaaggaaaaaattacttattgctctaaattacgaactaaaaaaaaattcaaaggagtctgttttaataaactttccttcttgttatattaagatctttaaaaacaaagcagtatattaaaccctatatatggataaataaagctaagattgaaaactaaaatgggatcataacaaacacatttaacttatgcaaattcaactatatgttaacaaaggaagagaaaaaattttaaaatgtgggagatttaattatgaaagttatatatatgctacatttatattttatataatatacattatatatttatatatttttatatatgctatatttatgagttatagattatatatatatataaatgtatacacacacacacagacacacaaaagcatgttctgtatactattccttatgggagatgtatagggtaattttgactacaaataatttaagatgtgatgactttttgcagttctttcttctactgctgctagtatcaaaacaaaataattaagcaaatttgctgctagatacaaacctataaatttcaacattcttgttcttttgtctagagagtttagaggcacttgcttctccagccacaattatagtattattttccatgacaacaccagtacacacagttcctaaaccctctccgtacttgggagatgagatgaaataggttttccgtgatacaggatcataacaaaaactggcatccccatagctcctatgtcttgatctgattcctgaagaattgttgccaatgcaaagcagaagactggtagtctccataccatagcgcagatttagagagtgctgttggggtgtcttgatggctttgaatgcattttgaattatgtcaacacaatctgcatcacacagaagcattgtgttccttcttagggcttgtcttaaaaaagaaggatttacaagttccaatctgacttgcttcaaaagctcaacaagatgcactgtacgcaattctttgttatgatttacccatctcagaactaagtccagaatgctctcttctctggatatgttaagatcatctgatttaataagtgtcaaaaattggtgcacttcgatttctagtatttcttcatgtaagctcacctcggcaaagtgctgatataaatatttctttgatcgatcagataaatcttcagctccaatctgctttgcaaaataatagatacctaaacagttggaggcatccatgtggtccatcatatatttttgacacacactgaagacttcttccatctgcataaaataggcagccatagctacagtctgtacattggcattattgatctccaaagctgcattgtacatgtaatttaataacaccgacacactttctgctgtgatgtcataaagtatgacttccctttgattacattcaagtagtccacaggtgaacatagctttgaaataagggctaaatgcagccaggaccagtctgtggcaaggaaatttctctccttctgctgtgagtaccacatcaatcatttctgctaattctttcatgttctgaattttattcagtaaattcaagctatgttggtatttttcttttccctcaatcttgcactccatgatctactctccaaagtttccaactaagtcttctttaagtgtagcttgattcctgaggggctatttgcatgtctgattactcatgaagctacaaagatgtcaggaaacatttctaagggaaagaaaaaaggcagtttccttctaagaaaaaattctctataatttagatatgcagcattagttctaaaaaaagtatttataaacagatattattcactccaagcagagcagtttaagacaactacttttgtatctaaaaatattaattttgattacgtaaacagtaataaattaactgctgtgacaaattctcctaatcagtggcagagatttttctaggactgcaaagatttccctcccaacatgtatagaaagagaagtgataagctgggcacattttgcaattccatttccagttaccaaatacagctgacctgcaggcagagggtataggggcatcagttaatattctctccaaggagatgcaaaatcaccccaaaggttatatgcatcccctccaaaaaatacaccgaactgttataatagtcagtccataaattcatgactggggccttgtacaatataccctggaagaggaaaaactgaaaaaaggtccactaaaattctgctcaaactttgatgtgggacaaataattcaaagcagtagataacacaaagattatatctactgggctttggaaggcactaccaaatgtcagctgatctgaaaagtcacaatatttaaaatatacaactaaattaccctaaacttagaaaatgcctaaaactatatgatttctctgtcctccctccttgctcagcttttattttttccccaattcatagtggcagagactgaatctctcttcaccttaaaaagcattagtctaaattttttaaagttagctgtctcatcttcaccttccctggataaatggaaatgggatgtttcaaggaagttaatttaaattagcgtttgttttaaagaaggacattcctagagtcagaaaccttaatgttagaagaggatctcaagtctctaccaccttttccagttctaacttggctgtaagttgcaagcagtgagaataacattgatgggaaaagttaatacatttctagattatgagtaagataatatccttttggggtgactattctccacttctctgcttaaacccagctgaagagttttgagaagtgaaatggtcctgttttaaaaagagcatctggatatccccagattcccaaacataaatcaacttcttgaataaatattttgcttggatgcagtttgtctgtctcaaaaacattggctttgacaacaaccacaaaaaacaatttatttgaaaacggaaataactggcctatatgtatttgttgtatcccttccttccaactgcatttcatacaactcctgaaagctactctaattgttaggggtttatagaccaaatgaatttactgatggaaatccagaaaaatacctgggcagttatattagccaccacacctcaaaaaaacattctcagctttgtttcttgtacatataaggtacatagaagacactcgcattgtacatgggggctttccctggtttggatcccagtttagcctaaaccttggcttcttcatctgtaaaatgggaataatgtacacaagtaaagtagctaagttagtctttggcatccaaatgatcaataaatggacattattattagtttccagtgatatatcatagtaagctcaaaggttaggaacacagattttggcttgggtgaccgagacctggttttgaatccttactctattatctagcaatattaacacgttccttagcctctttatgttctagttttctcacctgaagttcattttgagaattccataagaatattcaggagaattaaataaggccatgcatgtacaatatgcaattttcttggtaaaactggcttggtaaaggtgaagcaggatatatctatatatttttcaaataataa

SEQ ID NO: 315841 - DNA, 4001 bp, Homo sapiens
tttttttctttccagctcactgtcttgcgatgattaatacttagtagtccaatgacctaccctaggcaagtctaaacggttacatcacaagcatcagactgaagtgactatatttaacccagtattctgagaaagaggaaccagaaactactgttggaacattatatggttatgtgccctataaaggtaagcaccttcaaaaggaaaaatcacattcagagtgtggttgataactttactattatttatgcaccacttgtgaatactgaaaggcttaaagtgagcatttgacacaaaagaagttaagcccatgcagaaaactgccttttccactcatcttaaagtaggaagttatttttcagacccaagtttttaaattttacttttaaaagttttatagtagacaatataagtaaaaacaaaaacttcgtttaacatacttctagaaatcttggatattattaatttggggccttaggcacaaagaaactatattcattcttgctttgacccccatagcatttaaacaatctattgagtggtaatttgtttttgaaggaacatgctacatgttttaaactattttataaaagagtcccatacactaaagaaacatgcattatggataactttttgaaagaaattctagatcagcactgtccaataaaattgtcaatgatgaaaatgctgtatttctgtgctgcccaatatggcagccactagctgcaggtgaccagcaagcactcaaaaagtatttagtgtacctggggaactaaatgttttattttatttaacttataatttaagtttaaacagccacacatggctactggcttccatactgaccagcacaagtctagattttctggtcatttacctcaaacacacacacacaggcccactaacttaaaaagcaatcacccgaaatctagaagaatccctcaagtcaaaagaaggtcttagttaagagaggacttgttttctagtctcaagaaacaaagtcattggtttcatttcattatcgcatctcaatataaacatcaagtggacaatactgagggggaaagggagcttggtgcagataccaacagaagttcctaccatcatcatacctgaagtaagggctgattgcagcaagaacgtttctatgacaggaaaatgttttcccgtgatccacttccactacaatgtctgtcaactgtccttcatcgtacattgttttgagttgcttaagaatactgcaagcatggaaggggtccatggcatcgctggctgggtctgaagatggaatcccattcggtgttggggaagacttacttaaatctaggaggagaaaaatcgtacaactacaagaagtgccgagccagttacggcatcgcgggatttttctgtttgtgtgtctgcttgctaggctttttccccctacaagatatatacaaatgtctgtggatatacgcacgacctcgtgggaccgcgagttaaggatctgggagacagagggcggagcgcgatcggcggaacaagttcaaaggccagcctgctcctgcggagcccggcgagcccggcacccgtgctcgcggaggaaacgcgctcgcagcccaggagaggcgtctgcgcggactccgccgagagccgagggcagagcctcacgagggaagctcgaacaacggcggccgccggtgccccctcaagccgcctcccgctgcctcctggggcgcagcgccggcgggtacccagcctccccatcccggtcccgccggaccgcccaccgccctccgcaccattcatcctccctcttctcattcccctccaccgcttcatccttccctctagctccgcaccgctacgtcctcatcccactgcctgtggccggccccggcccaccttccccctcacctccctccacgccgccctggccaccacacgacccacctgccgacgcggccatttctcgatggggccccgactccagctatttaaaaaggaaatgtcatttcgcttctctagctcccgggttccggctcttctaagcttcccctggccaatggggtgtcctgtgcatctggctccacccctagcctccgaattcctggcgctgattggccacgacgcgagcacatgcgtgtcgggaaatgtagtttgattgccccggctcccgcgtggtccgggtcgggcggaggcccaagccgggaattcctattggctgattcggatggaggtggagagcagggagctggccagcctgtggccgtcgagcgcgcagtgcctgccgggagaggtagtcttctggcggaggagaactgtcattctgaggggctggggtagggaaagctcttcaagtgcgaatttccccattttaggcctctctcctggcccccggcacatttttttacctttttcttcttccgtaaacttcctgccagtgactagcttccggtatgaaatcaagctctgcgtgagagctgtaaaaccagaaaaatgtggaaatggacaggagggctgttgtccaaaaatgcaaaggaaatctgacgtcccaccctgaagaaaaatatcacaaggcccaaaagcaaggcgtctctgatgagtcacctatgacacccaattgaaatagcatcgccttggccgggtgctctggtttccacagattaacttggtctggttacagcggctgcttaggatcttcaactcccactggtgccttgcttttctagcacacccagagaacacctgttcctcacgtgaacattacaaggggatccaagatgctttactttttgctcttgggaaatggaggggatacaatactaagtattccggaatttcctttgaaaaaataccggaatgccctgagcccggagccagggatgattactgaagccctggctctttagtcactatatgtgagaactgacataagacctttcaacccctgagcgcttagatccttcatctgtaacgtgaagtaatagtaatccgtactccatggatttcataggctgcaaccttttggaaagaaaatcaaaattttactgttgacgaatttttatttactcatcttgtgtttctaacatctaacggggtgcctggcacattatagatgtttcatattttaaaaataaatgtaaggtgcaaatgagctaacattgggaatgctatttctagatgttaaaatgtaaggaagtatcagcgaatgggaagaatttctagtagacatatagttagcccgtgtgcataacttttctagcactgaaaagatcaaaccgttgaacttcttgataaagaaaggatcttggaatttaaattgtgattgagaaagagaaataattatgaaaaacaattcagttctgtcttctaggtctgctgagaaatttagaacttaaaatactataatcccatgcaagttaacaggaagtggtgtttcctcatgactggggtttctgcatatacatatgcacttataatttcttctttgtgaatgtcctgtatgcacgtttctggatagatgaaattgacttaattttggttactcataactttattttttcgtttttatgatgttgctttctaatttattaaaatggtagcactttatgacaatatggttagtattgaggaaaaaaatggcgttaatccttagggtttgacaacatctgacgatattgcaaataaaaatacagggcatgcattatttgagaaatatttaaactgaaatatcatttgttgtttatctgaaatttaaatttaattgggtgttctgtattttatctggcaaccttttcaaatctgttaaaatagaggagttttgtttgtgctttgttgttgttttgtagccatctatctatttaagccttaagaaacttggccaattttttaaaaattcaattctcaacttagtaacaaacagacttgacaatattgtttgattagtgagaagacagtgttctgattctttgacccacaaagatttataaattggagatgcagcagaatacaaagaacaa

SEQ ID NO: 315842 - DNA, 4001 bp, Homo sapiens
cctgtctgaagaacgtgttcctctacttcataatcctttgaaaaatgctttcctagaacataccttcatctgaacattggcacacagcacagatctgtaattgatatttaaactagacttttgagagagaaaggcataccctctaaaggtttatgtaacaattcatggtaataccacccatcctatgacaaagacatggaggcagacttttttaaaagtgaaatggtccatcttccccttcgcccgatctgtgttcacatcaccatcactaccaccactgagggtcgaggaaacacggagaagagagaaaacgtggggggacagagaagcaggctccttccggtgacagattcagaaagaaacagcagcatctcctcctcatccatccctcctcattccatgagctaccatgaaaaggtgagctccccttctaaagcaggatgtggtaggctgtcctatcctccttataaattgagaagagttcatttcttttctgcacaacccttttattacatagagtctgtgtaaaatactttgctctccagagaggagccatatcattgcaaattgctttatgaatataattagctgataaattagagcagcagctactacactgaaatagaccttcagattttggaaaaatgaaatcactggggacatcttgtacatgaaaaacaatcttatgctgtgcagaagttttgatatgagctaggacaactgttcttacaattgctaaattgttttttcagttttcagtaccttgtccttctgaatagcttttactcagcttctgggctgtttaaaactccaggcgtacgtaaaggaagcacttgtgcaggagcaataattgctctgaataggaaagattcttcccatcacagagcaacttataaagattacacatccaaccctataccaagaaaacatttctcctttttgttaatctttcataaaataaataatgatattggaagtttagtgtacaaccagtaatttatcttgggtgacactgatttaaaaaataaataaataaataaataaataaataaataaataaagtgctgtcatttcaaggagaacttgaactactttattagctattagtacagaccacatgattcaagtttagaagaaaataagtcttgaatcccaggcagcattaaaaaaaaaaattctactcttaacttataaattctctttcccttaagaagaatggagtccccactcttcattttgacctgccaaatcacctccctactcagagccaaagatacttcttctggagcacatggttaggagtttccacagatgaacttgactgtcttttctgtaaccctctgagaaaagagaacgcttaaagctaaaaaaaaaaaaaaaaaaaaaaaaaaaacaagaatgcaacccaagaagagggctcactgcatttttccttctttttcttacagggttttgtcttgctatttcagtccttatttctttaataacaacctttgacatcagtgcagtgccctggttggatgactttgcaatcagcagtacctgtatgccatgcccgtctctgctctggtggtttcctgcaacgaaattccatgaacacgtagaaacttttccacatatttctgttcggctgctccactgggcctcacaggtttgcaggccgcctgaggctgagtcttggtcactgctaggtgccatctacattttagagccgattcactggattttggcagacccagcttggggctcgggatgtctgcacaggcaggtttatacagatgcatgtttcaaaaacccaaggaagcaaagctaattgcacggtgcttaactttaagactcactgtatcttgctgtgaataccttgggttatctggcttcagtatgtccctcaaaaggtttagcttgttttctttagatctctcttatcatttttgtaggcgagcaggctcctaagttcccgacagagctgttggttgtgtgtccctgcccaggcctgtgcataaaggaggcttttggtggccaatcacttttctcatccctttaaagtactcagagtcaaacataagcaactatgtactggccctggggaaaaaaaatatgggaactttttcccatgtctttctatttaggtaaaaggaaatattttggtgggatctgggccaatctgtttttataaggaccataaagccttagggatgattcatgagtatgtaatgagacttctctaaattattaaatattttgtaatcaaataattttttatactagaggcatgattcatttgggtgaaaggtccattaacctctttcagatgttgctgtcaaatgatagacaaatatcaacaagtggttgtaaaaggcaaagggttcacacaaatatggctaattatttttgacaaatatgaagagcaaatctgtggaggaagaatagcttttccatcaaatggtgctggagcaactggatatccataagcgaggcaaagcagaacagcaacaaacaaaaataaatgaaccattgacctaaacctcatctttatacaaaaatcaacgcaaaattgatcatggatttaaatgtaaaatgtaaaactataaacttgtaggtaaaaacaggagaaaatcctcagaacctagagttaagtgaagacttattagacttgacaccaaaagcacaatccataaaaggaaaagctcataaattagatttcatcaacattaacaacttctgctctatgaaataccacgtgaaggggattttaaaaagcaaattacagactgggagaaaatatttgcaaaccacatatctgacaaaagacttatatctagaacatacaaagaactctccaaactcaacaataaaaacataaacaatctaattggtaaacgggcaaaagatatgaacaaacatttcactgaagaagatatacagatggcacataagagcatcaaaagatcattagccattagggaaatacaaatgaaatccacaatgagagatcactacacacctatcacaatagctaaaatacaaatggtgataacactaaatgctgtcaaagattcagagaaactggatccctcataaattgctggtaggaatgttaaatggttcagccactccagaaaagtttcttataagactaaacattccaaacttactatatgacacagcaatcacactgttgggcatttatcccagagaaatgaaaacttatgttcacatgaaaacttgtacacaaatgtttataacatctttattcataatagccaaaatctagaaacaacccaaatattccataatgggtgaatgattaaactgtggcatattcatactacgaaataccactcagcaagtaaaaggaatgaactattggtcaaaacaaccagttgaataaatctcgagaggcttacgctgagtgtgggaaaaaaaaaaagctaataccaaaaggttgcattttggaatctgtatcattccatatatataacattctcaaaatggcaaaattgtagctagagaggaataacaaattcataattgtcatgggttagaaaagacaaaagggaagaagatggctatggctataaaagtgtagaggtgggattcttataatggaactgttgtgtcttgattatggtagtggtcacatcaatcaatacatgtaaccaaactgcatggaactaaatataaattactcaaaaatgagtgcatataatattggaaaaatctgaataagggcaggggcttgtgtcatcatcagtttcctgattgtgctattgaactgtggcaaggcaagataccatcatttggggaaactaggcaaaggatatatggaatctctctattgctgcttatacctgcatatgaataaacagttatctcaaaatagaaagtttaaaaaaaaaaaagcaaagaaactcctcacatatgggtttttccaccacatgattccagctgtgactctcctccaactgtgactcctggacataaactgttcattcggtcta

SEQ ID NO: 315843 - DNA, 4001 bp, Homo sapiens
tctacatttaatttcaagcagtaatttaggcttaaatatggctattcaatctaatttaccaatataggtggtttttcctgcaacaaagcttctttaaaaagctttgtatagcatttgttaacttggtctttcaaaagataaataaggccaggcgcggtggtttactcctgtaatcccagcactttgggaggccaaggccggcggatcacttgaggtcaggagttcgagaccagcctggccaacatggtgaaagctcttttctattaaaaacataaaaaatgagccgggtgtggtggcaggtgcctgtaattccagctactcaggaggttaaggcaggagaatcgcttgaacccaggaggctatttcccaggcgacagagcccagatcgcaccactgcactccagcctgggcaacagagcgagactctgtctcaaacaaaacaaacaaaagataaataagagagcagtactagatgagaaactatttctgatagtataatcccagaaactactgtctttatcataaaatagaacaaacacatttgctactgaaaaactatcctgatctaaataccagttccagcagttgtgtttttttctggggactggaatgtacatagtttctaaaatgttcataggactttagaattatacaaaatgggccacatttttaaaaatctttacacacacaaccaccctgggtttattcatccccctaaagagctattttagaaccacctgagaattctaaagtgagcaacccactgatgagtaaatcacttttcaaaaccgatggactgtctccactgcacctgtatagaacctggataccccgcacagagggaatcttacgtgcatacctatatttcatgccagtctgctttgcggtggactctttgagagaaatgtgatgctgaggcgtgaacgtccccaggctgcgcgcgatgatagcgaccgtgcggaatttggcccgggctgcgttcaccacattgggggcggtggagctctgcttgctcagaagtcggtcctcaccattccgactcttcaaattgtgctctgtgcaggctatggagacttgcattgcttccccaggcagcgcacggtccctctcagaaccccagaacacaggcagtcacgagaggttgagcagttgcggggatttctgcttttcttttaagccctccttgctcccccttcctggggatgccgtcagaggagtcctggcggctgactttcgagccaagcccacaaagtggcacaaggggctgcgatgcaggaaagagtccccggggacccagagaagtaaacagacggccccgaagttgtcacagcagctggagggagaatcaggtttgcaaatcttcccgggctgtaatctcggctgattaaacagccaaatccatgcagtgggggaggtttttacagaagcctagagctgagcattcatggtgactgcacgcagcccttcgcggagccggtccgcggtgtctgaatgcgggctcgcttctgggcgatggctcaaatcagcgcaggcttaccgcaagatgcgccgccagcatcccctggaccacaggcaggatgctcaactggcgcgcggagcatcccaagaagcagctaatcgcaagcgggtcccctcggactggtggtctccatccactccggctgtcagctccctcccgcctccgctccgggaggacgtgggggctcctcaagacccctccccactcattctcgagcgaaagcctgggttgctgagcctgcaccgacacgggtttgcagctgcacggaggagcaggcaggtccctttaaggagctctttgcctttgtgtgcgatgggaaggcaaagatcacttgcaccaggctcttgctgtaacaaatcgggagggttgctccataaaaaggggctctgcccagactcagaccaaatctgctgcagcacaacagttggaactgggggaaggcagagagggggtgcttatgccgcggaacacgccagtgaattaacacgtgaatactctgtgactggcttgctgaaacacagcttgaaatccctgttattagccttgtcagagttccttttctctctgcaagttatttcttaagcagataagtttggtttcctgagatgccacagtgcagactttttggaatcaactctgctaacttactgcaaaatttattctggctaccagaggagggactgggatgggggaggggcagcaatccagcaccactcaggagggggatgcactaggtgtgcagcaggtccatagtaccacccagtaaggtccaggcatgtggctgaaaccacatacactgcccactgatcatctgtggccacctgtgaggacaagcactatatcctgtctccaggtcaggtgggcagtaggacatccctggggactctgaacccacatgaggcaggaatattttctggtttgatgtcaggtgcaaagcaattgctcaataaatgtgactgaaccaaactaagcatcagttggctggtaatttactttccatttgaaatgtatggaaaccaaacccctctcacagatttacttacaataaaattatggcttctgcaaaatcagctttctaaatgtagttcccaacagatactgctgtcaagcaaaaagaaccagtatttaacgcaacaatatttctgaataccatcactgtattagtcaatgaagatcaatatggagaaaaaaggaagcactgtccccctcctcaaggagcaggccatctgggagggaaggacaaaatattcagccttaaagggtctgactaacaatgttggaaggcatattatgacatatctgaatggatggcacagacactaagtacactagagaaagtacactggagaaagttgttcattttgattcattccccacacttctaccaagtccctgactttgcttgttgctgggccacaaagatggctgaaacagaggctgggccctcaagaagctcatgggtgcccaggcgaccctcctagaagagtgggactttgcctggtacatgaaaaatgggttgaatttgattagcaggagaggaagaaggcagtgatcccaggggttgccaggtttggacaggacacacaatctatctacgtgattaaaaaaatagctggtctgaccatttcttcccaactaaattaaactgcaggaataaaattttcaaggagaatatgtgcctgtgttgcattctattccaaacatgaattttaacattttataacctgcagataagatttaaatcagattatagaatctcatcattcactctccacaaccttcccacactttactttaaaaaataaacatattgactaatgttcagtgattgagaagtaattttagaatcagtgagggttggggaaaggaacaaataagtctgggaccccttcttgtactctcagctctgagggaggagtacttgaagcatgtctttactccctggataaacaacagtgggcagagaggaagccagatcattagaacctttattttttcacactcagccggctcatcagagatgatcaatgtgaattgggaaaggagtcaaaatgagaagaggaagaagtgggaggaatcagaaggaacagctcagaaaaggaaaaaaataaagcagtctgggaggcgagacagagtgaatggataatcatccgtctagaggggtcaggagccaggaacttcagtttggacactggctgagcttgaggagatgtgtggggggctcagagatgaggtggagtgctgtcagttccacagggaggacagaagatcttgaaggtagggaaggtctggatgctgttagctgaagtggctttcagccttgccaagaactagcagagcaatttctgaaagcacaaccaacagcagaacagggagtaggttattagaatgaaacatgcaaggcagagtgcctcttagtcacctttttatcccccataggaccacacagagtgccttgtgcatagcaggccctcactctata

SEQ ID NO: 315844 - DNA, 4001 bp, Homo sapiens
ttattgtttaagtgaagcagaaaagagcagatatttgcttttccccaaaagtttcttgctaaacctggttaccttaactaatatgccactctgacttgttcaatgttgttccaatgtcagataatgaagaattctgtggtcttgtattagactctttaaaggaaatttctggtatatcgcaagtcaaggaaaatgttacggaagaaaaccattttcaatgctttcctttgccacttaactctttttcctagaggatctttaataatagctttaagatttgtagatgtgagatatgtaatagtttgaaatatgagatatgtaacactaacaagctcattcaaactttctttaaacgagactacttttcctttggtcttcctcccatgtaccccaaatgtgggcccaacagcatatacaagagcttcagacaaaccactctggccatgaataccaaatgtatttcatagaacatttccagaagctttattttgtgctaatttttaaatgttgatttttgaataatagtttaggttttaaaatatctatttattgctgccttgaaaaagagaaaatgaaagttagttgaggagttttaaagtgtacggtacaagtttttagtctatatgcacaagttaattcaattactaaataagtttttctgtagtgtcttttggaaatagaaatatagacagaaaggcagctcagagtgcactggatgctttgatacaggctgcattgcagaatttcagtgctaccatacagtctctacaaaaggagttttccatactttgactacgtaattggaaccatttttcatctcaaaggaatttttattaccatttaataacatagctattctaggtattattttcacagtattttttcttccaaaattatctttaattcctaagagattttttgcacaaattatagaaaataagcatccttaaatttcaggactccagacactttttactcagtacgttttgccttggaacactgggatttgtgaaattatccttcctctgctttatttgaagctgaggctgagtaaagaacagaaagaaaacccatagagatttgccttacatttatctcttttttaaaagttacctttttctcctgatgttatctgtcttagacacggggctcagatccctatattggtggtcaatatgtcccattctgcatccctatggccagcctgacccctcattcaacaagttcacactactcaactccacttttcaaccaggcaaaacaaatgttcttccctcatccccaagttctcagagcaaaggaaatgctgaaagattgcaaactcttttttgtagttattttggaagggagcactttcctaccatctcttaactcctctgatttttacttaagaaaaatcataatgctcttttgtcctgtcagctcctaagcatctactgcctccttgtaagaggtcttttctgaataacaatgcagggaacattatttgccatttgcaccaagatcctgctctttgtggttacacattctgaagtgccaatcatctctaaggcaattagagccgttaagacttccagctgcagaggaaaagaaatcaaagcattctccagagcaccttcgaacggcgtctcccaaagcccgcgcagagcaggggcagcttacctgtgcggcatgcctgtggtgcagacggtggtgtgctcgctggacaggtcgcagagctttaggtaccagttcatctccacttcgcgcagcagagccagttgacgcgccctgagctggctttcccctgagggactaaggctgctgtctttagcgttttctgaggctttcttgggagatttgtctttccctgctacagaaaacccagactgtctccttaacttggtgttctcctctgagatctgactccccgctgcccctgtccgggctgccagcatcgtggagatctttcagagaagactggaagtcactgtcatcaaagtaatctgaattgatttttctgcttctgcctccctccctcgtccctgcccactccacctctcttaaccttatcctgccacaaagctgtaattgagcccagtctgtggcttgggatgaaaatgtatctctaacctttcctagtgaagaggtaagctggccaatacctgtggtatcttcgaacacggaaattttaaaaacaactcccaacaactttgtaatactgaagtttggcagtggctgtttcttccgcaaagttaggacttttgctttatttaatagtgacaactctgaacttttggtcatataggtttggtaaattacattcgataatcatgttagagttataaaagatttctggaggctcattagccattcctgattagagtccctttggagttttaaaagttttaatgtgaatttcctcaaataagttcaacagtatcaatgcaagggaaagattatttctcttgtgcaaacctgaacattttaaatttattttatatttctttgaatgtcagtgaaccacataacgtatgtcaggcactctttcattcctaatgtgagaatggtaatccctcataaccgattcagtaactgcccctcccagcacttctgacaaatagaagccatgagaatcatctgataattgggaaggtgaaggccaaaactggtgtgaaaaaacagaagagtgggagggaatggtgggagcctgtatgtgcatggatgtgtatgtgtgtgcccagtgtacatgaaaactagtttgggagaaacaaagaaagccaagctgatggccctatggttaagatgcatggggttgacccacacacacccatggatctcactctgttttagtttaggagataatgatgtcagtgtccacctaggggtctatcacagagttgtttagtgacccgttaagcaccaggcaccctccccctcaatcaacttaagtctcttctggatcaactatctcagtgcctgctgcatgtaaagaacttgggaaggtgcatgtatttttctttccatgacaaaaccgtaagttaaaaattgtagagttatagcaagtccttagagtccctgagaagagcaggagaggaaggaggaaagaagcatgccttcttaaagagataggaaagtgcagttagctcttttggaaagtctgtcaataggctgtcataaggcctcctctgccaccacggtatggaggaagaatttccttcactgctattctcatccctttactatctgaactaatgtggtcacctcggtcacatggcttggtaacaagtcatctactgctgtcttggattatcttgcttcctttaatgtacgccttgccccctttcacttgcccttagtccactgtcactctcaaagacctgccaaaggtctttgaggatccctatggctgttaattaaccaatatcaatattaaccaattaacagccatgtgggctcttgcacatttgggtgaaacctgtttgatattactgtccaggatagtctagggttagaactgtaaccaccaagtaatgtgcagcctgaagcatgtatcaaaggaggcaactgataccaactagcagggtcagtcccatctgatgctgtggggtcttaggaacttttagcaccagcaggcgacagcctcttcaactactctctttgctcccatcccttgagtcattgaggagttctggcaacattatatgcatagcaactagactccccgaagtgtagactggagataatcaccccagtttaatattcttggagatgtttcaatggggggctctgcaatggaactgtggaaagggcactatgctcattcagccaaagagacagagggcttcccaatgtccttggcttgcagtgctgttgtgtttaagagctctgctctggagtcagactgcttgggttcaaatcctaactccatcacgtaccagtgctgtgatcctagacaaatttcttaactcccatatgctttattttcttcatctataaaaatagagataattatctacttg

SEQ ID NO: 315845 - DNA, 4001 bp, Homo sapiens
tgcagtaattcccaaggctgtgctgggatgattcactacacattacacttcattcaactttaaatggcaatgagataaacaattaccatttgccaattacctcattttcaatagacaaattcaggatcaatgtttacagccttttagttttggatgttcaacttcaaaaaaaaaaacatccacattaaactgatcagtacctcaggtaatgaatagtaaaatagtagtatccgccatcatgcatggtaaaacacagcagtggtgattttgtgtggcgcttcagtggtgtggtagtggcaatggcagggacttgaagttttcctataatatttatcattattatctaaaaaagacatacgtaataacattacacctcatacataacatctaacacatttagaatataaaagggaaaagaatggctagatgtaaagataaaaacacttatgaagtgaccaaatatccacaccaactaccatgattagactagatgtcaaaaataaaaactgaacaaaattaaagtgattcatttctttctcatgtaaacttttccaactatccctgaagcataagtccaagacttgcttcccacccaaagataagactgtgtatttagactactggagtggaaatgaaattagtattgctctcccatatcagctccaagaaatatacagagtaaaagcaatgacacttgaaccactaagaaggactttaggataaatgagtttctctgagtctcaacagaaaaatggaagacagtgcacagaagcaagataagctagaaagaagatgaggatattcgtagtgaaaccaactgagagcatttgttaggggtggtagtacagactcctaattacagggttaaagccagctaggaagatccacagggtcaagtagagagcttgaaaagcctgagaaggagtggggacctgaccgtggtcctgaaagagaacaacttgcagatgataacgaaccgtctgctagcaaccacacaacatcctatctattttttttcctactgtagcttaaatgagctaaatgtccaataatattcgtactcaaaaaaaaaaaactaaaaactttctcttatcatcaaatcgtctttattcatgtccttcttcctgaacagcctctgcttgagtgttaggctcatttaaggattaaaagatacgctattctagctcaaaagcaggaatcaaggttctgacaaactcacaacacttaaaattctacagaaagcttacacttggcaatcctgcatttcttaaactcagatagaaaatcatacctatccgaaatatatcacggaatgaagctccaagaaagaacactccaagctctccttttgatctagggagccttgaaactctagaaagattaggtacaccgatattccccttttcacctcagaaaattacaaccaattccctaaagatacaccaaaatgcaggtcccacagtgaatacgggcgtcggtctttcctcaggctgcgtttcagtccttaacaaacccaagaactcaagagagccaactattacaccaatacaaagtgttaatactacaccaaaccatgagggaacaaatttctccgcacaaaagataccttggcaagaacagaagaaaattcactccgctggtgcaaaagggaaggtgggagcaaaagtaatgtgtacgagaaaaatcagtctcagaaaatgccataccactcgttcaagtgtaagacttacgtgttccgtcaaaacgggtggcgatggtgtccaggaaggtgttttgcggcgccagtaatcctttcataaccggcatttttccagcgtggtgtgaaattctccatcaaagtttgtccagaaggatggttcgaaaggaaagtgccaagaagggagaaggggaacctgatgacggcagggaagggggacccggcctgacggcggggccgagcaggggaagtggaaggatggagggagaaagggagagagttccagccgccccggctgtggcaggaggagccccaagagcgctccccgagcccgccccgcacctccaggctcagcccggcgcaggctccctctcccgccccctccacccccgccagctgctgaaacccccccaccgtccctccgcgggcaacagtgcccgccaggcgccgccgcgcggtgcctcgccccccacgtcgcccgcccggaaagagcccgcagtggcccggggcgccgcgccctgaccgacgtctctggggtctgggagggcggcgctgagagctgggagaggcgctgagcctcccggtctccacgggacgccgggaaaggagagcgagcgcaactcccacgccccgggagccagtgaacaaagacccctttgttccctctccgtcccactcccggggagactggagtcccgtgggtgtggtattggagaaagggaggagacaggtcggggcaggtatccggcctcaacctagaacttaggagggggaggccccccagtggtgtccaagggagcagaggcagccaggagccccacggggaggcggcccccttccggagcacttgccattgcgagcccacgcgacaggggcagggcagcccgagttagttgtgaggcccatccccagtcaccagggtcttttagtccgggaaactggccccgagctccaaaaaggggtgcttcagcccttctccccaaattgccattggcctccccaagccatcccaaactttaaaaaaatagccttttgaacggacaatggatggtttcccattctccggtaaaatgtgaataaagcatttctagaaaagtttgctatttttattaatttgcaaaataccacgtaagtaaaaacagtaaggctgccttccaaaaatagcttcaaacacaaatcccctagcctgcccccctttccccagcccccactcccgaagactgacacctccaagaagaaagcctggcggacggccaggaactgaaggcgtctcagaaaacgaaagtggtctctcccagtcctcccccctggccccccccgcggggactccctctcggccaacgttctgcggggaaagtcgcccaagcctgcggcacagccctgtggggagtgcaaggggacacccagagcccgaactttatagaaaactctgcaagggaggtggagtgtggaagggaagttgagagccccagggtagaaaaacaaacgtaagcccaggtgctagtgcacccggaaggaaaggagggaaaaagcaaacaggtgtcagagccgcggcgaggcagctctgatctccaggaactcgggcgtggcgggaggagggagggagggcccaccccccgcccccttactaagggggtttcttgtttcaattatctcggctgttggggcttcgggggggaccccgcgggtttcgtcacgtctgccttgggctccgggagggagggggagaagagagagaagcggcatccccctctccccgcccccaggccccctttctcgtgatgcacttcctgcggccgaggattccctttgtgttgaaattcgagaagatccggcagaggctctaggctagctgggcgggggcgcgccggggaggggacaggattccggagtgggcggcgcggggcggccatcccagaagagaagctaccaacgtggggttcctcgcccagctgcaccctgcttctgccgcaggtccgtccctgtcctcccctcaatccttgtgtcccaccccagcttcgcttttcggaaaccgagctcacgcgggtggagtcccccacgcggcgagccgatcgcaactgcaggtggctatgtggctcagtcttgggcggagctggggagaaaaagatgagggagtccctgttgtttgggtggcgcatcgtgtcccagaaaattcaggctgttgctgccgatgtaaaacggagataaacgccacccgtgaattggctcgaagttcaggatgaaatgtattagttgtaagctatgactgtggttcataacaatttgcactgtagggccgtgtgtg

SEQ ID NO: 315846 - DNA, 4001 bp, Homo sapiens
tttaaaatctttatcaccttaagtcagtgaactctctatcaaagaacagtgtagagcaaagccaattatctcgctacatttaggaaaagaaaactttggctttggatagatttcattgattggctgactactggttgattgatctaggtgtgcttgtgcttgtgcggctcagtggagtgcatttgcccatgcagtaatctcaagcttggaaaaagaattctaaggataaagttgggaatagcaatcgcttcagtggggtgatatctttaatttaattttgcattatttgttttcatgagaaataccctccagatagaagtctccctccctttgattgtcagtttttattagtcacctcagattcttagacaaaggcctcctgattggatgtcaattacttgggttctcatcctttcttatctctaactcactctgttgttgctaataaattagcccctcagaggaaacatttgagccaaatggtacaaactatcttggaaaacttgaagtattttgtttggtgatctaaaataatcaaatgaactgactaattacttgccaattattttctttcttgtggttcttaatttatatatatataaaaagtaatttatatatattagtaatttatatattcattttccctgtttaataaaaaagatatgtataatatataataaatatgctgtgtattcataaaagagtatataaatatacatatattgttttaatatatattttatacatatttgtattatatattttatatatatataatttttattaaacagggaaaactaaatatgggcaaggaaaatgaccttaatacatctgtatagtctgaaaaaataaattatggctaatttaaaatgaaaggtttcttaaacaattttgcagtcaggctattaataatcattttcgcaaagtggacaacatataccaggaatattagagattcatgaattgctgtcagtttgaatttgtatatatttcctcatcactaaaaatactgtgatctagtatgcagaggaaaaaagggtcctggaaaataatagtgttgttaaatgtttttgtaagacaatttctaggtgtgaaaagttaattagtgatataaaatacatatttggataattaataccagtgaagactagacacttgttgcctaaaacaatgaagatactttttttatagagtcatctagatgcttatatccattttccaactcagtttgcgtgtctagacagagcttcttttaaaaaattgttcaaatacaagaaaattctcatagtaaaatacttgagaatttgaaaggctgagaaaaaatcatgattccaatgtattatattaaagttgaaatctgagacttgtgaattaacatcacgcaatgttttaaaatatgagaaaatatgcactagaatcaagaataaccctaaatccaactaagaaaagaaaaatcacttccctgtgaaaaaaaccattctcacaagtcctcatgtccctccactcctgactttatagtcatacagatagttccaaagccagcaaatattgcattttctacacttttccatcatgtaatcattttacaaaacatccaaaccagtacagctcttttaaattgtagcctctcctctctttgtgtatcaccaattctttttattaattcatggggatgaatgcaaaataaatacagttctttgggtgagtccagcttacccacagcgcgtgctgccctctcacaccactcgccgctttgttgctctttctctcagttctttccaacatgcccctgggtctcatgagacgacccaagagcgtactgcatacttggataggattaagaaaagaaagaaaacagaacggtgcccagcagcatttataccaaggtgcagtgcccttcctggcacacaatgtgagaagagagcagtcaaccatgcaaggtaaacagcaaccagcctagtgcaactaactaaaggtagtgaaaagcccactgaagcacagagctgagtttagaatatttacaccaacgctcctctattttactgataaggaacctgaaattgagccataaatttatttatgattttaaaaaaacctggaactatgatccgtgaaatattctttatagtttgttttgaactattttagaaatgttggtggagggatgacaaaaattaaaatacagacagaaatgagagaggcttaattctgaaagaagtgttctagcttattcatcttgttttacagatttaaaaaaccccaggcccagagaattgcagctcctatccttgtattgtagccatgcagaggagacccactgatcttgttactacacacacagctcctttttaattacttaaaataagtcctgtgacagcttgcaggatctatcctgctgattctgtaggattgcaagttttccttttgcctttcattggatttcaaacaatgtattgagtgtggcaactgaattattacagtcagttatctgtgtattgtatgggcaatttaaaattgacttgggttaaaatgggaaacttcacactagtcataagaaactcttcagagatgcagcaattcaatctggttcacataataacagcaataaagaagaaattgcacatagtttttttttctctcttgcaaagagctaaaaccaatttacagattttcttattaatcctcccaaaagaacgacagccattttgctaaccaggaacctcacagcagaggtcaggaggccaagtgtgtgcaggagctgaaggcactggtgtggggctccaaggtttcgtttcaatgtctcttggtgttgctaacttgctgtttgatggtggtcaaatcacagaatgtctctgaaccctagtttactcataatttaaatggtgggtgagataatctccaagataccatcaaggatgaattctcactgatttcacagagatctcaatgcactgcttagatttccttattcttgatacctttacttaaagccttcactaaagctctattaacgttactattcttctatctgttccccaattataatatttctttttctctttttcataagagtaacaagaaacacagtaatgccctttctttgtaaaggcatggccaacgaataagggtagagagaataaagcagtaattggacagttaccttgtttatctctgtggaaatcttaatagttattcggaatgctttaaatttctttaatggcccagtcttacttttgcaccctcaatgtaagcatctcaccttctactttctcagttcgaagccattcatcaggagtcctttcaaagtctttctaaatgtttccgctcttaattcatccttttcttactccgccaccccggtactatactaccctcatctcagaggaaaaagagagcctttgtcatcccaaaataaccatctatagtggtcttaatccaatgtccagttcttctaagtaagtgactctcatacctagatacagatttgaatcacctgggaaaactagtaaataatcctgatcagaatcaggaccaggtgttagtattataataagggtcctaagtgagttttatgttaagaaagggttgataaccagtgctgtggaggtcttgattgattaattaatccttgtttattcttcagctttaatccattttactggctccttccctcaaacctgcaaatgtgtttaggctattattatcctaataaaacaccttcccttgtccctcaagctacgattctatgcatcctcctctctcccactttatcttctcaatggttctgctccttgttagccctgaaacagctttctatgcagtcacctcatggcatacacagtcccttatgcttcatgctactcaggctctctttagggcctgacattcccaatcacccttgccactgtaaaattcgctcttcctttggcctctgtgattctgcattctcctggtttccttcccagttgcacaaagtttcctttaaaagtatgtgtcggcag

SEQ ID NO: 315847 - DNA, 4001 bp, Homo sapiens
gtcatagctatcaaatgcaccaagaattccatacagtcatttcgtggacatgtggtctggtcacgtaaagaccagccaagagagttcggctggttcagtaaaatccaccacactgttaggaaaaacaaacaggaaactgtaacatagatgccatctactatggggcaatgatttcaactttgtatgtggattacagtatatatatagaagctcacaaatacacaaactcaactgcatcagagaagagcaaaagccctatttatccttaattgcagtatttagctgaaaacaaacatactctaatcatcttccaattttatttctagttaattctgcattagtatggaagttttagatgcatttgaagaatattgcattcttttataaatttataattatttcacatatctgccattcgttataaccaatctatgcctcagaatacagagtttttcagaatataaagcaacatctttacagctcggagtttgtgaagtccactggggaaacaacacaacagcactgagaaattcacttactatgtttctgccacttcacattgagggtcatatgcaatgacaaagactgaaatttgcaccatagatcaagttgagaaaacactggtttctgatcattgtacttttgccttagaaatctcagcctgtgatttcctgacatttccttttctgattgtgctataccgatcccatataaagtacaaagcagtataataagttcctctgcaaatctattcattatcgactggactttggaacccaactgcccctcccatctttgaaggagaattgtgtttttatgctgttcatttaaaaaacaaaacaaaacagaaaggtaaaatgtcaagtccataacctctaactaatcaccatttccatctgcagccccagcagttgttgaaaagcaagagcaggaaccgagagaaagccccttcttttagtcgaaaactcttactctgcttaggaaaaccatgaacccaaacagtgtgggtcagcctttcaatatgcaaaacggacgaaggtacccaattttcttttataatggattacataggaaatagttctttgtcagggaaatttgtcgtaatcttccaatttcccctttgaaaaatcagactctgaccatcaaaacacattgactgtagaaataaaataacaggtttcaaatcttaaggacagcttcctctttatttttcttggacctttatgccttccacccaccaaagtcttcactcgaccctaccagtacagtagcccagccggcaccacaggtaagaggcaaagtgtttccttcgtgacctctaagcattctactccacaggaaaagcaacgtggaatgcacactcagcaagctgtaagcctggagccagtttgtcctggaggcatttctgccataaaacataatactgtccactgtgttttgctctaagcagagcgtctcccactcccctctccctcctcttgctgcttctcactccgcacctggctgcaattcacgatcctcacgccacagaacaaacaaaaagcatgaaacagcaacagattcctttgttttacatgcaaatcctacctccggtagttgtcacatcttcctcaaaagccacgcttaatttttaatgacagcgatccggtgcagtcctccaaatagccaccggtaatcatcattacctcttgtgcctaaagcctttgtggaccattaatgtcacaaccctttctaactcatagctttaatactccctgctcaaaatgtctgaaagagtttggaaggacaataggagtgacaggcacgctagacagccatgcttgaaattagttatctggagctccgttaaagctgcttcatactgttttaaagcgtgcaggaggtaggatttattagcctatgataggcatgctgtttctgtttttattaaatactgtaataggctgtctgttagcaatgctgtgataggtccaacatcacttccccactgctttcgaattctcatattaaaaagggagagagggctcacagtcttccttcccagaccgacatcgccctgcactggatcagatttccaaatcctccttaactataggagagagagccaaatagatattttctatatggaaagcgaacttggtagtaaacactctaggattctccaaacaattttctcactcccagtaagggattcctgctcttcccagttacaaaaataagtgttctctggagttaggtatgaaaatcaatccaaataggaaaagttctcattattactgagatatgacttaaggtacacatgtacacaaaatctcaaattatagatcaactagactgaatggatcattcagtgcataaagtgtttattttatgctgacttacaaagctttgtgtttcaggctgaagcaatcacatgccatgcacaactgtcaaacggcaagaatgaatgatggatggaaagaatgggaatgtgtacgttatcttgctccactttggacagtcatgatcatggaagatagaagagggatttcttaacattggtcagagaagagggtatcagttagctggaagtgctactctgaaaagttaagtacctttgcaagtaaggaagcggagaaagttcttaatagaactacacaatttattcattctcttccgcatttcctttcttcctgctactccaggagcaatagtattgtagtagttactacggaaactagatggtgtgctccagggaagggcttaaagagagcagcagatgtaatatggatggacatgtattatactggcctatagaactaaaaatgagtagcaattaacaaacaaaaactgctacaaactactacaacaaaatattagagagaatgattataaatcaccactacttaattattggtagttttgtaatctagaaatgctctaatgatcgggtcatagcatccattattttattatatgtaataactgaatatctgaattgctcagatgtctgataaagcaaagacgctgtttcctctgctcctttgtccctccctccctccctccctctctgtcttccttccttccttctttcctccctccctctctccctccctccttccctctctccctctctctctttcttttcttttcctctctctctctctcactctctctctctctcactctctctctctctttcgagacaggggtccactatgttacccagggtgttctcaaacctttctttttctaaactcctagttgtcagtttgaatatgccctaatggtgtgtgagttttagttgttacttgactggttacagtttcttctcaggaataaaacgtgatttagaggaaaactgtcctagtatcacaaaccataattttgttctctttgagtatccttatagtggttttcctgggacaaccaaagtcagaaaatacttattgcaactcaaattaaaaaaaaaaaaaaatctttgcccattaaattggtaggaaaaagagaaaaagactttttcaaattttcagttttccaagtagtaaaagaaaaaaaattcttttatgttaagagtccaagacatttcactagcctcatggtcatccaagaggaactatttctcaccagcgtaattaaattttcacagttgtgaggagtccagcgaatacaaaattattttctttagtacctcaacttcacagtttgtaattggagtaactgataccactgaagtgtgagtataaaaactccgaaaagaaattgttgaaaaacaatgcttaaagattttatgaaaatcctgtcttttataggcaagcaaataatccaaacatttgtaatagaagaattatttcaggggaaaagtatttgtgatattctcttttaataataatggggctgagcacggtggctcacgcctgtaatctcagcactttgggaggccgaggcaggcggatcacctgaggtcgggagttcgagatcagcctgaccaacatggagaaaccccgtctctaccaaaaata

SEQ ID NO: 315848 - DNA, 4001 bp, Homo sapiens
actgcctttatatctagttaattgtgtgacgtatgggacactaaaacttgtttgcttgcatgtttgtcatttgatcttttgccataaagtaattcattttaattgtctgttcacaaaaaaattggttcatgtctagcgagaagaacacctttctttcctctgtagtctgtctggtccttcttccctgaacccccatcttatccaaactcctgtatctcactctcctcatgctccctctcaaatacccctgagtgcagttaagtgataatggaagtgagtaacatgatgaccattaccatctttaatgttttccaattctcagctcccaactccactagagccaataataaatcatgcatatttccagatagtgagtgaacctggttctgaaatgtacccctcccaacaggtttttctttgtttgagacagagtttggctcttgtcgcccaggctggagtgcaatggcacaatctctgctcactgcaacctcctcctcccaggttcaagcaattctccagcctcagcctcctgagtagctgggattacaggcgcgccaccaccatgcccagctaatttttgtatttttagtagagacggggtttcaccatgttggccaggctgctctcgaactcctgacctcaggtgatccactcacctcggcctcccaaagtgctgggattacaggtgtgagccaccgcgcctggcacaaaaggttttagtatcccatttgtccaacaccctcaggcatcactcttctctccattttggttcccacattgactgccccatgccccaaccctagggcaggcaaaaggggtgcaggtcactagaggctttcagcttctttgcttttcatttccctggggagaaaacgggtcctgaaaataatctctcacttccccctttaaggagaagagtagggtgggtaataacaatagctaaaaggctagagtttagggaggtgtagagcgtatacccggtataacagtatagtttagagaggatgtggtatactgtgctgagacacgcaggggctcttactatctgcatttcacagataaggagatgaggcaaacagagaagttaagtgacttgcccagtcatatggctgattaagtggtgagctgggtttgaatccaagggctgtgactccagggcttcaccaatgggacctgcccagtcatatggctgattaagtggtgagctgggtttgaatccaagggctgtgactccagggcttcaccaatgggaccaaatgctggtctaatttcttcattcctcattcaaccaacagatcattcttgagcaccaactatgggctgggctatgatcagtgctggggagctacaggtgagtttaaaaggtctccagtctccaagaactggcaacctagaggatagagccaacaggaaaggctgcagccccgtgatgtgagtgctactggggaagcctgctgggtaccctgggaggcatggcaagtgggcatcctcagagaaaaaggaaacactcactccccaagctcgagatgtcccctcttcttgcaactgcttgttcagccagattcccactaccggcagagcttccggaagtgacttacctcccctggcgcctccggctgccctgaagtgtgatttgcacggggatgctgaagggctgcatgaggccaggggtctgagaaaatggctccctttcacctgagtcatgcccctgcgggcgcaagaaaggtgaagcttagacatccacggaagtggagtcccagcgggagcccccagcccccagcgcagctgcagccattagaagccccccgccttcctggagaggtgagaacttcaggcaggctagccacgtggttctgcagactcctggcaaggcggagcggtcagttctagatgatcaagaaggacctgcgtggtttgctgcagccgaagctgcttctctctctttgcactgtgcttgccgccacctcatcacctgtgtttccgcctcggcagccgggagcatcgccatagagacctcaacgcttgtggaaagttctgaggcccaaggggaccctctataattggtgagggacgtactcagttcaaggtttataagaagaggaaatgttttgccctggccgcgtttccttttccacgtattgtctgttagagtgcaagctgaaataatgggttttctagttaatggcatgttccaattaagataattcgcttttaaaccatatgtgatttcccaatttttcaagatacaaagggccataaaataactcgccattaaaattatctcaaattttaagaaaagctgtatcaaatattattttatctttctctgatgacttaaaagacatttggggatctttccacactcccaaattaggaacatcaattaccattatattatagtaccacacattgctacaggcacctgtagatgtggatgacagaatgccaaagagaccatgtttgctgtatgtttttcagtcaaggcgatattatcttaacattttccaagatggtgtgggcaagaatgtaagcgtaatctcatctataaatatccatgtacatatagctatataaactcttacttgcagtcattttaatattgcttaataaaaatatatacttaatagacttttcatttgtattatttttctatttctattttataaaatatttgtttgggtttttttgagatggagtctccctctgtcacccaggccggagtgcactggctcaatcttggctcactgcaacctccacctcccaggttcaagcgattctcctgcctcagcctcccgagtagctgggattacaggcatgtgccaccacgactggctaatttttgtatttttagtaaagacagggtttcatcatgttgaccaggctggtctcgaatgcctgacctcaagtgatctgcccgcctagtctcccaaagtgctgggattataggtgtaagccactgcacccagtccgaagtattttagtgaacagatgcaatttggaataaaaaataatgataacaactggaatttcttctttctgcctccttcttccaacttaaccttgtatatatggatagcttttccttttcagacttatttgtgctaataaatttcccctgcaacttggtaactctcttcgaagaagtgtgtgatttgctgctgcttttatgtatttgattcaacctcagaaatatgatcattttttagtccatgaggatcttgtcacacaaaacttgcacctgcctttaccagagcctcctggtcattcttatcttatgattccggttccatttaaaagaaaatactcatggacaataagtgagaaggagcaacatagctttttgccctctgaactttttccctaacgccccttcacttgataaccaactggcctctctgtccaccaagtaccacactcactccactcttggcctgaaagccaagccccctacacacacacactccattcaggactcacagcctatctctcaagaagaacctaaagtggtcggtgtgagttgcaatcccaatgtgtgcattcaggaacacagcaaggctaagccacttagaatgcagtgataagagatgccaggcactgtacctctggtctcctggaccctccctcagcttattccttcctctgagtcactaaaggtcacttcctgctccataaaacagcaaccatgaattaactgtcaagttcacaacgtgggccccctcccaatctgacccagaggctttgacactgggttcaaattctagctttgtaactgcaaggaaccctttaaaaacttcctgccctgcttttccagagtaaaaagggagtaaataaaaactcagtgtgagttgcaggagcatggaaaaacttagtgtctacaaactgttgtgagatctatatatgaaagaggctattactgcaaagtgctagcatcgtggattccagattccagagtccacaatcatttcttttgcatttagtagatgctttacttaggggaaaaa

SEQ ID NO: 315849 - DNA, 4001 bp, Homo sapiens
tgagccaagatcgtgccactgcactccagcctggcgacagagcaagactccgtctcagaaaaaagaaaaggaaagaaaatcataaggaagaacaagatcatgtcatttgcggggacatagatgaaatgaagctggaagccattatcctcagcaaactaatgcagaaacagagaaccaaacactgaatgttctcacttaaaagtgggagctgaatgatgagaacacatggacacctagaggggagcaacacacactggggcctctcagtggagtagggggagggagagcatcaggaagaatagctaatgcatgctgggcttaatacccaggtgatgggttgatctgtgctgcaaaccaccatggcacacgtttacctttgtaacaaacctgcacattctgtacatgtaccccggaacttaaaacaaaaattgaagaaaaaaaatcataaggaagagaaaacatgtttactatttactaaatggaagtggatcatcataaaggtcctctccctgtcctcttcatgttgagtaggctgaggaggaggagaaagaggagggattgatcttactgtctcaggggtggcaggcacagaagaaaatccatttataagtggattcccgaagttcaaacccatgttgttcaaaggtcaactgtatcactacatatattgaataaagaacctaattaaaaggaaggaaactaatatgtattgagcaactactatgtgccaggtagacactgtcaaactcaaaaaattcagactcaaaaaacttttattgtgctcacatacaaggtttaactctctcttggaataccaacattttaaggggaggatttatgacctaaatgaagaaactataatttgtggattacgtgtttggaggtatatatagattatgagatgggaggaggcagtgcagggaaatatctttgaccttctcgccacctcttcctccacacccagctgcccccagcactgacagcggaagaggaattgtatttttctttttctagaccatggcagagagtcacagattgagaaaccaaagccagcctctcctcctttaccgctgtgcctggatcttatctgaattggaaactctagatttccttcctctgtttcttacctgagcataaaaggctttagaatggttgttccgagcaagaagaacattaggactgagaagcccatcatggcaaaccccagcatcacggctcggtcctctccagcactggatggcagcctcttgtgcacatctagtgggtctccatcactgtagtctgtctctctcttcttccctgaggcaggaaaggctgtcctttggggaaagggagaaggagatactgcagtgagctcataaagaagggggaacatttccaatccatggggactggagggataatctcatttgctgcctacctgtgtctcgtgagcaggatgaatgcaacaaaatgaaatcccagttcagagcttggtgaaaagtccatctaaataagctaaagtgatgtgtaatcaagtatttttaaagatattgtagcaaacaagcctaagaaatgttgcctcatgcaagtctgtagagatctgtttaatcaataactagagaatgttgtatgtaaataagtgttacgaactttgttatctttcagggatattgcacgtccctcctgaaaatttgtttacattctcctttgaattccacatggaaagaatgactcaaaaagttcacatttggaattaacagcgtcctgaacagggtttgacttattctttcatattcacctgttggaaaggcagcatatccaccaccagaatttctggccactgcccagtccactcagaattatgaagttgtcatggcttctttgctcctctcaccctccttctcctcctctctggccactcatggttctgcataagtgtcccttcatttcttctctcctctctccactgtgcctgcaaacctgctccagcaaaggatgagatacattctcgcagggcagggtgtctggtgaacagaagagtccaacacaaaggtcgcaaaccggtgggcatggcggcatccagcccacagatgtgttttgtttggccttctctgtcgttttttgtttttgtgttttttggttttttttgagacggaacctcgcactgttgcccaggctgggtacgatctcagttcactgcaacctcctccgcctcccaggttcaagcgattctcctgcctcagcctccctagtagctgggattacaggcgccggccaccatgcccagctaatttttgtattttaagtagagacagtgtttcaccatgttggccataatggtctcgaacgcctgacctcatgatccacccacctcagcctcccaaaatgttgggattacaggcgtgagccactgcacccggcctggtttattattatttttttaatgtgggataacttgttaagaccttaaaaatcatgacatttctcataaaaatgctgagttctgactttggaaataatcccaagatgcacgtccctgcagatgaacagcgggcccagcagagcagtggctgcccctgtggaaggtgtgttctctagtttgccaaaatccctccacttcctacagtgtcactgatttgccattccctgctcagtagccatttgagttccagaagtatctccattttaagaagcttaatgaaatcttaagccaaacaaatgcagcactaatggtagaaacacaggctccatcaagcttcctaaaagcttactgcattttaaagtcaagcaaaaaccccatcaaggaaattactggttgtttttttcccacaagcatagtttatgccttatcccacatccttccccttccctctccctagctcccttttcccccagcaacatctttaggttctaaagcgagtaaaaggaatgtcagacaatccagaatgttccaagagcctgtgccaggaagcaccaacctcagaaggtggggcactccatggttaacacttctttgggacccgaggatctagtttaggaatttttagttgtctttgatattttactcatcccctatcatcctaccaccagagaaggggcatggaaaaaaaatttaatgaaatttgaacctgtacttttttttttttttttttgagatggagtctccctctgtcacccaggctggagtgcagtggggcaatctcggctcactgcaacctccgtctcccgggttcaagccattctcctgcctccgcctcctgagtagctgggactacaggcgcccaccaccacgcccggctaatttttgtatttttagtagagacggggtttcactgtgttagccagaatggtctccatctcctgacctcgtgatccacccacctcggcctcccaaactgctaggattacaggtgtgagccactgcacccagccacattttctaatttatcaataaatatgacagattgattaaaagaaagttttagccctaaagtagagtttgatggtttttgtagtttccaggacccaatatcctgcattttcccttgtgctctaaagctggactttagttgctctgtagcgtaaggtatcccagaggtttattgtaagatatccttggaatccatgggtgaagaggcttataatgaggtcgctcttctaatgcatctctaatacattctttaacatacccaattataatggtatgttataaaaaaccggcataacccgattctgatctaatttaggaataagacagacctgtactgtcctagacaagactttttatttataatttttctgcccactttgttccaaggctttatgaaaagttgacaacttcataagtcacttggaaagaagttatttcatgtgtggggaagggataatataaaataatcataaaaaactaaaacatagataggtttggccaggtgcagtggctcatgcttgtaatcccagcactttgggaggccaaggtgggcagatcacctgagctcaggagtttgagaccagcctga

SEQ ID NO: 315850 - DNA, 4001 bp, Homo sapiens
gtgtgtgttttttagacagagtttcgctcgttgtccaggctggagtacaatggcttgatcttggctgactgcaatctccgcctcgcaggttcaagcgattctcctgcctcagcctccggagtggctgggattacaggcgcccaccaccacgcctggccaattttttgtatttttcgtagagacagggtttcaccatgttggccaggctggccttgaacttctgacctcaggtgatccacccgccttggcctcccaacgtgctgagattacaggcgtgagccaccacacccggccaaaaacatttaaaaaatgactgtccctgctcaaatactgcagtaggaaatgtaatttgacatgtatcacttccagaaaaaatctttaaactttgtataaaatgaatttgatacatcatcagcatgaagttaaaatctcctacaaagtaaattcaagtatcatcaacaatgagatccaaaagcattggttcaaaatcaaagacttatatgaggtgaaggcaaataaagcccctcatgctttcagacctttacttgttatccttaaaatgattattgttctaaggtgcaaatcttttcagtgacctatttgctatttggcggtttatctcctttaaataaaataccatacaggttataatgtatattttaaaatcaaatatgaaagtacacatatatgaacaagacattaatttaaatatcaattatattcataatacagaagtctaagaatgctatttggtcatttcaattagatgctgatatatttggtcaagaatattcacattcctatcagcctaaggcaaatggtaaatgcttctatttttattaagtggactataaacagtagacattattgtttgatactactggatatatgctctcaattagaatgtacactgataacaaatatgtctttctaatctgggtgataacctcaatgattacatggaaatctacaagtaacagtctataacttaaagcagtagatcacctggtgattggcatacagtgcatctctatgaatttagaacattctacttacattggcagtggagagaaaagagcccctcacactcagacttcctgtgcaccacgcctgccgcctgcctcagcttaggacatggtacggtcttctttgcttttgcccttctcgttccctcctctggtatcttctctgctttctggattgaagtcccccggctctcctcctggtgccaacaagtcatggttttttaggctattgctgtctaaagctttcctgatggtctgacttggatgttctgacatcccacacctctctgtactttctgcttcacaggcatcactaatgtcctgtgagggactttcatttttgggtacggtgcagtgatctgcatcttcgctctctggttcttcaggattgctttaagtggcaccagctattttagcattatcttttgcaacaccttcatctaattcttcaccaccagccctcgggcctgatgattgaactgtgacatcctcaaaatctaatgtgtctctaccagctagtacctcctcagctgctgtttttacatcattgccttcttggtcaagttttccatccaacttcattttaggattctctggacaatcaacattttcactgctttctgctgcaattttctgttttggattttcagtcacctcgttttgggcttccactgctgactttctgtcagtagactttacctgctcttcttccttaatttcacttaaatctgtgttctgataagttaactctttttaaacatctttaagggtttctatgggtactggggattttttcctcttctttttctttttcttgttctttctcttctgcaatgagtccaatgcctctccctgttggtcattcttttcttcatctggctctttcatatctgagggttcactttgagtgtctactgtacttggacctgtcgcctcctgacccttgctctcagttcctgctggagaaccaggaacttctgtcttgattggtttctcatcccttaatcctttttcttcaccctcttcttcgttgtgatccctacctgcttctgtactctgcactggaacctccttgggctcagctgcttcctggttggtgaattctttctctaaactatgccctatgcttgtctctaactgttgggggacctctaccatacatctgtcatcatgataaactgtgtcatcactatgccctaaaggacatgaggccactgtgtctgcctgctctccaacctgagtcaccgctgcctctcccacattctctgtgtggctcccaccatctaagtcactccaacagttggatggctcaaggggagttctggtcctgtcatctggtgcacccatgacctcatttgactcaacctgtgctgtgttttcagggagagaagcgctctcaagaatttggctttgaacctgttcctcataggtagcacctgctaaggttcctaggaatggggcagtgtcttcagaggatttctggtcctcggtattctcaccagcagtgaatacctctatgtccacacaatccttcactgtgtcctctgtgtgttgttctttctcagtattgtgcaagatttctcttttccccacattcgccacgatttcattcttcacctccacctcactggctttcctagggtcccatcccctgtcgacttgagggcatttaactcttctttcgtcatcttggtaggatcttggtatcaaacattactgagagtgtcggaagtctctccattggtaactatttctgaatttaggattattccatgtttctcgagcatttcctctgtttgcttcagggcctccttgacttcagcaaactgaaactgcagtatactgtgggcgtgtttttccctttcaaattatttgtttttctcttcgtactgccgcctatattcagccagctgttcttcaatctccagcaacatatctttcagggtgtcaacttggtaaatgaagtttgtgttttcattgtctaactgagcattggaaaacatagccttcttacatttctcttcaacttctgctagagagtccttgatttccctgatggacgcctcggtgtcgatggatatagaggtgtctccgctgcctctctgagaggaagtcccacccagaaaggccagcgtggctgcagacgggcccagcatgttacgagaccccttctcagtaaaatatttttctggtctctcttctacctccttctgctgccgctccagctccttcatggggatctcacgagcctccgcgcgggcctcccgttttgcggcgagccgggcctccgccagcctctgcgcttccgcgctcaaacagtagatctcccggctctgcgtggccgcggggctggtcaacctgctgggctcggcccgctccacccggcgggaaacgctcggggaccgtgccggagcccccccccgcgggccgggccagggggcgcgcgctctgtccgcggagacggagccactcgccgcgaagtgaacgctcgcgcttccggggccaagagccagcccgccggggagcggctcgcgggactgggctcgggcgcagccggcaggggcggggcgtaggtggccgcgggctgagcctggccgggggtggaatggcgcgggggaagcggggctcgggcgcctccgcccgccccatggcccgccccgccccacacttgcaatttttttacattactatggtgtgaaagcaatatgaattcagtagaaactgtacctcaaattttgaatttgcattatttcctgggctagcgatatgcagtaccctactctcttgagatgctgggcagtggcagccagccatagttcccagtctgccacacaatcatgagggtaaatagctaatactctgaagttttcaacttacagtattttccacttatgatggatttgtcaggatgtaatcccactgtaaatggagaactatctatatgcatgtttttacaaaagatacatctaaaacaca

SEQ ID NO: 315851 - DNA, 4001 bp, Homo sapiens
agcaacacacactggggcctctcagtggagtagggggagggagagcatcaggaagaatagctaatgcatgctgggcttaatacccaggtgatgggttgatctgtgctgcaaaccaccatggcacacgtttacctttgtaacaaacctgcacattctgtacatgtaccccggaacttaaaacaaaaattgaagaaaaaaaatcataaggaagagaaaacatgtttactatttactaaatggaagtggatcatcataaaggtcctctccctgtcctcttcatgttgagtaggctgaggaggaggagaaagaggagggattgatcttactgtctcaggggtggcaggcacagaagaaaatccatttataagtggattcccgaagttcaaacccatgttgttcaaaggtcaactgtatcactacatatattgaataaagaacctaattaaaaggaaggaaactaatatgtattgagcaactactatgtgccaggtagacactgtcaaactcaaaaaattcagactcaaaaaacttttattgtgctcacatacaaggtttaactctctcttggaataccaacattttaaggggaggatttatgacctaaatgaagaaactataatttgtggattacgtgtttggaggtatatatagattatgagatgggaggaggcagtgcagggaaatatctttgaccttctcgccacctcttcctccacacccagctgcccccagcactgacagcggaagaggaattgtatttttctttttctagaccatggcagagagtcacagattgagaaaccaaagccagcctctcctcctttaccgctgtgcctggatcttatctgaattggaaactctagatttccttcctctgtttcttacctgagcataaaaggctttagaatggttgttccgagcaagaagaacattaggactgagaagcccatcatggcaaaccccagcatcacggctcggtcctctccagcactggatggcagcctcttgtgcacatctagtgggtctccatcactgtagtctgtctctctcttcttccctgaggcaggaaaggctgtcctttggggaaagggagaaggagatactgcagtgagctcataaagaagggggaacatttccaatccatggggactggagggataatctcatttgctgcctacctgtgtctcgtgagcaggatgaatgcaacaaaatgaaatcccagttcagagcttggtgaaaagtccatctaaataagctaaagtgatgtgtaatcaagtatttttaaagatattgtagcaaacaagcctaagaaatgttgcctcatgcaagtctgtagagatctgtttaatcaataactagagaatgttgtatgtaaataagtgttacgaactttgttatctttcagggatattgcacgtccctcctgaaaatttgtttacattctcctttgaattccacatggaaagaatgactcaaaaagttcacatttggaattaacagcgtcctgaacagggtttgacttattctttcatattcacctgttggaaaggcagcatatccaccaccagaatttctggccactgcccagtccactcagaattatgaagttgtcatggcttctttgctcctctcaccctccttctcctcctctctggccactcatggttctgcataagtgtcccttcatttcttctctcctctctccactgtgcctgcaaacctgctccagcaaaggatgagatacattctcgcagggcagggtgtctggtgaacagaagagtccaacacaaaggtcgcaaaccggtgggcatggcggcatccagcccacagatgtgttttgtttggccttctctgtcgttttttgtttttgtgttttttggttttttttgagacggaacctcgcactgttgcccaggctgggtacgatctcagttcactgcaacctcctccgcctcccaggttcaagcgattctcctgcctcagcctccctagtagctgggattacaggcgccggccaccatgcccagctaatttttgtattttaagtagagacagtgtttcaccatgttggccataatggtctcgaacgcctgacctcatgatccacccacctcagcctcccaaaatgttgggattacaggcgtgagccactgcacccggcctggtttattattatttttttaatgtgggataacttgttaagaccttaaaaatcatgacatttctcataaaaatgctgagttctgactttggaaataatcccaagatgcacgtccctgcagatgaacagcgggcccagcagagcagtggctgcccctgtggaaggtgtgttctctagtttgccaaaatccctccacttcctacagtgtcactgatttgccattccctgctcagtagccatttgagttccagaagtatctccattttaagaagcttaatgaaatcttaagccaaacaaatgcagcactaatggtagaaacacaggctccatcaagcttcctaaaagcttactgcattttaaagtcaagcaaaaaccccatcaaggaaattactggttgtttttttcccacaagcatagtttatgccttatcccacatccttccccttccctctccctagctcccttttcccccagcaacatctttaggttctaaagcgagtaaaaggaatgtcagacaatccagaatgttccaagagcctgtgccaggaagcaccaacctcagaaggtggggcactccatggttaacacttctttgggacccgaggatctagtttaggaatttttagttgtctttgatattttactcatcccctatcatcctaccaccagagaaggggcatggaaaaaaaatttaatgaaatttgaacctgtacttttttttttttttttttgagatggagtctccctctgtcacccaggctggagtgcagtggggcaatctcggctcactgcaacctccgtctcccgggttcaagccattctcctgcctccgcctcctgagtagctgggactacaggcgcccaccaccacgcccggctaatttttgtatttttagtagagacggggtttcactgtgttagccagaatggtctccatctcctgacctcgtgatccacccacctcggcctcccaaactgctaggattacaggtgtgagccactgcacccagccacattttctaatttatcaataaatatgacagattgattaaaagaaagttttagccctaaagtagagtttgatggtttttgtagtttccaggacccaatatcctgcattttcccttgtgctctaaagctggactttagttgctctgtagcgtaaggtatcccagaggtttattgtaagatatccttggaatccatgggtgaagaggcttataatgaggtcgctcttctaatgcatctctaatacattctttaacatacccaattataatggtatgttataaaaaaccggcataacccgattctgatctaatttaggaataagacagacctgtactgtcctagacaagactttttatttataatttttctgcccactttgttccaaggctttatgaaaagttgacaacttcataagtcacttggaaagaagttatttcatgtgtggggaagggataatataaaataatcataaaaaactaaaacatagataggtttggccaggtgcagtggctcatgcttgtaatcccagcactttgggaggccaaggtgggcagatcacctgagctcaggagtttgagaccagcctgaccaacatggtgaaaccctgtctctcctaaaaatacaaaatttagccaggcacggtggcatgcgcctgtaatcacagcttctcaggaggctgaggcaggaaaatcgcttgaacccgggtggcagaggttgcagtgagccaagatcatgccactgcactccagcctgggcgacagagtgagactccatctcaaaaaaaaaagtaaataaataaatttaaaaatttttttaaaaagcccacatag

SEQ ID NO: 315852 - DNA, 4001 bp, Homo sapiens
atagtcacaaaatcataacattcctcttaaccctcagtttccgcaagataaaacgggataataccaccttcccaaaacggggtaattacaccatttaggcacaacacaaaggcaaaaattggcctataagagtaacacatcaggacaaggaaagagaacaggttcccagggaggtcctgtagttgaattctgctccgttactgattatgagaccctgagaaaatcactctttatgcccagcttcttctttggggaaatggagaaaataagggagatcatgaatataaaaccatctgtaaactagcaagtattagacaaatgtgaaaacattagtggcagcagcataaacaaaatttctaggttaacatgagaaacttgagtgtgaacacaagtaatttagagcattggcctggagacggcaaatatggaggaggcagcctcttaatttgcttcaaatctccccaggtcctccttttcccagagctccagaagggagaactatatacaggtaaaggggagtgtctagttttcccagagttcaccaaacacctgagctcctgatctcagaaggaacttctttaaagcatgactcgggattatctccaagttaaagctgaatccaaatacatacaggtactccattttaaatggaccccaaatatcaaaatccaagcgcactgaaggattcatagggttcaccctaagattcctttaagtagtaatgctttggttaaaatatgatttatgaaaattcaaatcacaaaactttggaatggcatccatggctatcctgaccactccatcgttcatatctaaggcatagcacaaaatcaagtatcagtatggactgatggtttcggccaaagagaaaatactctcaacctaccaaccctgctgacaaacacattttccttttcctagctacatattcgttcatttgaaaacatctcaatcttgggctcaggactgtgctacatgctgtccccaagcttctctcctatcccaggatgattcaagtaatagggcatttgtgacagcgaaaaaaagaacatgccagggggatatagaagagatacttaggctaccccaaatattcttagccgagccgggtcatcccaggtcactttgccacccaaacctcttctatcacaaagtcctaaaattggatccatcaacttgttctagaactggtatacttgaacagaaacatggtaacttcggcagaatatccaaacaggatctctgtcacgtttcatttccccgtcccacccccagacacagcctccaccactgtcagcccagcaggtgctgccagggctccccattaccatggccatttatcacctctgacatcaagcattaaaaacgccaccacacacacacaaatctaggcataaagaactcagctgcgatctgagagtctcttcagggcagaaaatcccaaaggcagggttttgagtcctgcctcaagctttaaactagggcaattggtggctaataagcgccatctcccaaaaacaatcattttcgagcacaccccaaatatctccgtccgggccgcccttcgctgctgccccgccagcgaagcccccgcaacccgacccggccaggggtagggcgggcgatgctccgggcccggacgaggggcgcgccgcggggctccgaacccgggcccgcagaaaccgcgcatccccgccgggcgggccccggaacccccgcccaggccccgccgcgggcacctccgctgctggctcgtgccagcccgggacgcgcggtcccctcaacgcggccccgccgccgccccgttccaggagcccccgcccagatcctcctcagccccgctcccctggccgctcggcgcagacgtctcctgaaacccggccctcccaaaccccggccccgcaagccccgcgccagccccactcactgcgcggcggcggcggctgctgcggccgggccgggagatgcccgcggccggagagcgcgagcgcggggacaagcgagcccgcgcccggcgacggcggcggcggcggcggcagaggggacgactgagcccgcgcccggagttgcggctccagctgcccggcgcgggcggcgccttcccagcagagccgcggcgccacgagcgcgggcgccccctaacggcagcgcgggctggaagccagagagcgggcggcctgaggaactcagccagcgcagtcggagccgcgcggtcaagaccacacgaccgcagccccgaagccccgccccgaagccccagtcccgccccttaggctccgctccgaagccccgaaaccccgcccctacgtcccgcctccgcccgcagcctggggtccgcccaaccccaggcccactgcgtcctcaggggtggtgcctccacagctgtttctccttagtcatttcacgaacttgtatgggccccccactatatctcaggcctgggggtttaggagatacagcggccaccaagacggaggcgggtcctaatcaaaggagaagacagacaagactcaaggaaacagctaatagacaaaataatgacaagttatggccgtaagtgttgggagggacatgattagaggacttagatggagaagaagggaagggagcccctgctccaaacgcagtggccgaggaagacctggaccccgacctgcggccagagctcctcctgcctgccctgcattggggagacaaccctgcgatgaggcctgtgaagaagcccccggggccaccggggcaagacggtctggtccggcctgacgggcaagacagcaaagggctgctgggcccagaagctcagcaacacgggcagccaggtggagagaagggcagagctaccttcagcagacaaaacgacccatgcaaaggctctggggcctggaggagctcgaccctagatgagactggcgctggtattgtccccacttcaccaggaaggaagccaaggctgcagaggatgggcagcacctaacgcctcagggctaattggtctccatccgtccactcgttccaagtccattcacttcctgctagccaggccactgtccccttccggtgggaccagttacctgatgctgggtttaaccttctccaccagaataaccactggccttagaaactcacttgggtttcacgtctgcatgtgtgtgagctagctctggggttgaaattgtatcagcatgatcatcacagttatatctgatacttgatttgtctccaaaagctcaaattgataggttaaataaatgacatatgcttcatcaacataactgagtgctacattatcaaattcacaaagactaggtgagaatacagggaaatgtgtgtgaaaatgatcaatacacaaactagtacacatgatatcctgattttatttttaaaaacataaatatatacagacaaaaattttgaaggaaatacatcaaaccattgaccatcgtgttcaagataacagtatgggaatgttaatggcattacttcataacgttcttctgaattttcatgaatattgaatttataatcagaacacataaatattgaatttataatcagaaaaatacaatgagttttggtttggtttttctttttttttttttttgccccccactcctccccaccccactgggttttgttgttttttaatagaaggacaataccaaaattacccaatactcagatctccagaatttggtgccactgaaaacccagaattgcctctgatttactgggtatccttgaaagagtcatttcccctctcagggcttctatttccccatataaaaactgatggattaattttgttggtgattttgtcagacctagtccctcctatcttaaaatttttataactagtgctaattgtactttcacttttgtattttataattgatagatggctattgaaatgcagttgggttttatataatcttatattcagcaaaagtgaactctttcagttctaataagtttgtaggttctcttgaattcgctgtgcaaat

SEQ ID NO: 315853 - DNA, 4001 bp, Homo sapiens
ttgcctgagctcaggagttcaagaccagcctgggcaacatggcaagaccccatctctattaaaaatacaaaaaaaaaaaaaaaaaaattcactgggtgtggtggcctgagtagtcctagctacttgggaggctgaggtatgagaatcacttgaacccaggaggcacaggctgcagtgagccaagatcatgccacttcacttcagcctgggcgacacagagagattttgtctccaaaaaaaaaaaattatttaaattaaattaaaaactgtgcagacctaatcttggtaactttttcatggaagtgatactttcaaatactaagttaaaatatacagtttagtcaatacaaccaagccagaaaagcatcacatacccaaaagcttacagcagccataaaatttcataatctgatagtgtattcacttttgtaacattaatgctgcaatctggcctttaattctgagaagcaagcttctcttaaaaaacataccttcagttttagaaatactatttacgaaaaaaataggccaggtgtggtggctcacacctgtaatcccagcactttgggaggccaaggagggtggatcacttgagcccaggagttgctgaccagcctgggcaacatgacaaaactccatctctacaaaaaatacaaaatattagccacacatgttggtgcccacctatcgtctcagctactcaggaggctgaggtgggacaatcacctgagcttggaaagtcatgagccgagatcacgccattgcactccagcctagggaaaagagcaagaccctgtctcgaaaaaaaaaaaaaaaaaggaagaaagaaaaaagaaaggcagacagagacttcaggtataggcaagtaaaatataccttacaccaaaggaatagaaaaatagggagacatatgcacacacaaaaaatgcaagtggggagaagaggcactttctcaaccattaatctcccaaaccacaacaaaatatcctccaaactcactagatccctttgtagtcactattcatgaagaaagagtcttcagagcaacacacttgaaaaaataaaaaatcacgttacctctccagtgattataaaaagtatttggaaaatccattttgagtttgattccattaaaacaccaaacaaaggcagaggatcgtttgaggtcaggagttcgagatcagcctggccaacatggtgaaaccccgtgtctactaaaaatacaaaaattagccagatgtggtggtgcacgctgataatcccagctactcaggaggctgaggcaggagaatctcttgaacctaggaggtggaggttgcagtgagccaagatcgcgccactgcactccagcctgggcaagaaggcgagactccacataaaaaaaattaaataaaaatttaaaaaacaccacacaagacaaaaacgcctccaaaatacatctaaactaagtaaaagggggaagagaggttacacaaattcacaattttcttttcttataagatatacctaaaaatacataaggataaaaagacacacaaaaataattccccagccttcaaaatgcatctccaagaagcactcaccatatagccccagtctccattatccatctgctccagtgatgcgtcttcaagagcccaggtttcagggaaacttcaagaggagaaaaacagacatatgatagcatatataactaggaaaatagagaagaaagtctttttccacccaacagaggaggccaaacaccagaaaaactactcgtccttgctcagctgaaacctactacagggcaaagatctggggaagaaagcattcccctagggccttctacatgtcctgtattcttaccatagagaacccatctggaactaagagactgaagattttcagagaaagaactatactgtacttaagagaaggaggaagagtctaggaagtaacccagtcattcaaattctacctctcttcttagaacatcaatttttagaatttatataagagaatattatgattaactctacaaccttatcctggtacaaacctataatggtcctcaccaaaaaggtcatttaagaaaaagggacaggctgggcgcagtggctcatgcctataatcccagcactttgggaggctgaggcaggaggatcaccaggtcaggagttcaagaccagactgcccaacatagtgaaaccccatctctactaaaaatacaaaaaattagctgggcgtggtggtgggcacctgtaatcctagctattcaggaggctgaggcaggagcatcacttgaacccgagaggcggaggttgcagtgagccgagactgtgccactgcacaccagcccctgcaacagtgcgagactccatctcaaaaaaaaaaaaaaaaagaaaagaaaagaaaaagggagaagggaaaactccttttcatcagcatttcagctatacaagccaatcacctgagtaaaaacatcaaaaatcataaacctcccaggataccagcatccctttccaagagaaatacatcagaatggtatttatcttacaatataaaaaaaaaagatgatgcttttaaataatgatgtatttctctttgtacaattaaaacaaatagaaagtgatttaaatgccgaagtgttaaagagcacaatttggggcaaaaagaaccttaccgatatagatgagagtcaatcagccagcactcatggagagccagccttaagacactgagaaatgctcagatactaatgatgccaatgtgaatttatttttatctacaattcaaaagcatttaaacaaacagtttcccagctactgaactgccttagtcagttccctctcacacacttcaatcccaaatcaacctgtaaagcaaactgcagagcaaatttctaaagctctggcaagacatggtaagaaacatggacttattggtattcatccaggaaaagcactggcttttttacgtggtcctttaacagattcacttttcccacttttagaggaatctggcacagaattcccagaacaagccctagctacagaagatcacaaaggctctttctcaaaaggtcactcaggcatgtagagaacatttgcatagcacagcatgggctgaaatcagagcctgaagcatctatttctctaccttgcaaatccttcaaagcacacaactaaaatgtggaccagactatggggcagtcagtttttattctttacactcagcagttggatatagacaggcctccacatgctatggggtgagaaatggaacaaatgtcaaattcaagactgttatgacagtctttcattcctctgacttgcttcacaaatagtatccgaagtaaacaggaccaagaaatgggctttgccaatttgtcttgccaggatctgattcagttactgataacaacagattagtaactgagcaatttaaaaggccactcatccaaaagttctggtaagatgctcatctttggcattttcccatcacccaaagtattcattctgacagcctcaataatcattcattcagccaacaattattgtgggtcacctatggagtggagggggtgcctatgtgcaatgcggacacacagaaagaggaaaaagacaatctttgccctcatggagctttccatctataatggaaggcaacatgcaatgactgaagtacagaacagaattcaaagtgctgtataacagatggaccagcagaggcccgtgagaggggaaaagcaagatttcaaatgggaaatagaggacttctgggaagagcccattcagttgaatccttgaaagaaaattcggacaacctgagaagggattctagaaggaagaaacaatttaatagacaggggcatgaaagactttttttccccctacaacattcctgataccagtaggccgagcagggattactatcctcatcttaaagatgcaaaacagagaaacaaggcagattaagtgactagctgagggcgccacagctgggaagtaactagataa

SEQ ID NO: 315854 - DNA, 4001 bp, Homo sapiens
tggtagaagttatttctagtgacagaaggtgaatgtggagaaaaatgacttgtgcttagaggattttaaatatacttttcatactcactattcttactcctttttctggttttgaagatgggtatgaggtccagagactctcccaaaatcatacagtgaataactaaagtcagtgaaaaagttatcactcaataaaactcaggtctgggcccacaacccagtttctgtagttttttttttttttttatttgagatggagtcttgctgtgtcacccaggctggagtgcaatggcacgatctcagctcactgcaacctccgcctcccgggttcaagcgattctcctgcctcagcctcccaagtagctgagattacaggtgcccaccatcatgcccggctaatttttttatttttttatttatttttattttttagtaggggtttcaccatgttggtcaggctggtctcaaactcctgacctcaggtgatccgcctgcctcggcctcccaaagtgctgggatgacaggcgtgagccagtttctctagtttttagcagtccagacaaatgaaggggcttcagggtgagagagtagtaaaatcaagcacattatgctaaggacatacatgatattctccttgacatgccaaatattgttcttgagtttccgagtccaaactttcctccactattaaagtttcttgtgccccttgataggtgtgtggttcactcttcctatattgttatgtccttgtcatgataaaaaaaaagagacatcttaacctttgagaataagaagttatttagaatattcccaaaagcctaacaaaaatcatacatttccccaagataagactactaggcttacaaaaaagtcatggttctttgagttcagctggaaacataatctgtgtgaagactcctggttttatccatgctacatatacaggaaacgttcacatttacttttattgttaaggtgaccgcaaaattgtcactgcaagctttgctttaaattcaggcctggaaaggggagctggaacagctggctttaatttttaagtgtgacatgcataagaaatattttaaaacatgggatccccaagcaaaaaatagtaaatgtgtcattggtgttgaagttggaagccacatgacattgtgacatgactaaattaagcaaaggctactgtggttttgagatggctggtttccatgctaaaggaatttttgcattttatgaattggagaggagaaaggcgacagagatttctaggtggacagaatgcatctggtattgtccttagatgtaaatatccgagatagttttaagctgtatgagggtgatataacctaaacgcttccacataaacgcagttacttcagggaaggagaatgaggtaagaagagaggtaaataccgtatgttgtaaacggaaaaaagttatcatgcaggaattcatcaaatattaaactgttttcccgtagggatgattaaaaagtaaacgaacccttctatccattcccaatgcaaatgaattagaagaaaatgcagctacatcaacagaggtacttacccctcccgagggaagctgaggtcttattagggtagtgaacaccgtgccagatgttttgagagtgccgattgagagaaggtacagacacgggaaacgttagcatttactttggagttaaggtgacgcaggaaccgtcactgcagcgtttgctttgcgttcagatgcggcagctcagcgcagctgtaggtggaggagcgtgccagggaggggggagctgggatgcagctgcaatctacactcgcaggggtctgtcctgcctcccgaggctgcgttgcggtgggcgcgaaaggctcgtgtgtaccgaagtataggggacctgtctgcagcaggagggactcgaaggacacggaggattatatcactgaaggcataagattcagaggtgcccgcggtctagcatcccccagtttgggcggaaagtcgaactgctcacaacggcggtcctcgcgagcgcctagcacagcggctgcaatgcctcgtccgatcctgcgagggccgctaggagcgagtcacggcgcggggccgctctggtcgcccgcgagtgtcggtggccccgccccgcccgcagccgcgggtggagaccgaggacggcgccggcgcgtgcgcgctccctcggtgcggcgggctgcgtgcgcgagtgggaggtggcaggcctgcgactccggccttgtccgcgcccgctctcggcgcgacgtctccagccatgaaccggtttggtacccggttggtgggagccacggcgacttcttcgccgccgccgaaggcccgcagcaatgaaaacctcgacaaaatagatatgtctttgggtgaggggccgagttggaccgagttggagtgcgggggagggcgcgggtggaagccggcggcgcggtttgtgggggcaggggcggtcggcagcagttgccggcggagttttctcgctggtgggcggacccgagcggaggcccggaggacagccgggagcgcaggctcgacgccaggtgcccggctggaccgcgagggacccgggcgtcccctcggccgcggcagtcggaggaggggctgtggaggcgggggcaggggcgctgcgggcccgaaggttcgcagggtcgcggggggcgtctcttctccccggaggggctacggctcgccgctcgccggctctttgtgaggaaagatctgccggtttccccggagcgcgttcgcggtgggcgttatcggggagcgaggggaatggtccgaccgagccgttctctctgaagaaaggtcttggagagcccggccggggctgcggtcggttaaaccagcgcttccggagctttccctggtcgccgggcgttccaggccggcgccggccatggctgccgggcgcgactctcggggccacctccggccgcggccccggagcgtctgtcagaaaggaagcagcgctcggccgcctgtgggatgtggttgtgtattgagcgctgcctagaaaagcacagtctccctctccaggcctcagagctagctaatgggggagaaagcaaacatctttgaaggagagatgattgctgtggctcgctgagaagccaggtaaagcgtggggttcttgagcgcatctgagagggtggcgtggtttcttgccgattatataaaaaccgggaggttggtgattccattaaaatccagccctgacactaccgaggcaccagccgctgtggttagcttaggtgggctaaaagtacgaatatttttgtcgggattcaagtgatggcgttgggtgtaagtcagctctgccaggtgtttggctggcagtttttcggatatttgaaaagtacctgactagtggattccgaggcgtaccctttcccaggacggtctttagagtgataactgtcttggaaaccttctttcggttttcatttcttcccatttgtcttgtgtgtcttttgttgtggtttatctggaacgtttttggttccaggtgagatgggaactattgatttctacgattgccacagtcagaatccagtatgtgaactaagcaaatgatcagaaataataggtttggcctcaagtcttgccttgctgctggttagtagtgagcttgtaagaaatgagaaagctggggctgggcgcggtggctcacgcctgcaatcccagccctttgaaggcggaggcggaggcaggcagatggcttgagcccaggagttcgagaccagcccgggcagcaaggtgaaatcccatgtctactaaaaatactaaaattagccgggcgtggtggccgcgcgcctgtaatcccagctaagacatgagaatagctggaacccgcgggcggatgttgcagtgagccgattgcgccactgcactccagcctgggcggcagagcgagaccctgtctccccccgctctccccccccgcaaaaaagagagagaaaccttttgaggtaaggccaacaaataatgtaata

SEQ ID NO: 315855 - DNA, 4001 bp, Homo sapiens
aggccactttgcacataaaagtagagtcacccttaaaaatagcaagtcttcacccaggaacatctcataaatcttcccttgttgatattttctcagaggtaaatattctgcttctagtttttggatcccagctgctcctgagaccatcattatatctgaaactgtttctaaatgtcaagtgaggtcaggcctggtggctcacacctgttaattccagcactttgggaggccgacgtggcgggggagaattgcttgagcccaggagttagagaccagcctgggcaatatggtgagaccctgtctctacaaaaaagttttttaaagtagccagatgtggtagctggcacctatatccccagctacttgggaagctgagctagtataatcgcttgagcccaagagttggaggctgcagtgagccgtgttcacggcactgcgctcagcctgggggacagggtgaggctgtgtctcaaaaaataaaataaaaataaaataataaatgtcaagtatgactcccttaagccacattcctgctctcgcctgtcagcattccagcctctttaaaaaagattaagaccagagttattaatgaagcaaaccctaaatatggaaggcatctctacagactccgattcatcatttagtcaaagtagttcggggtttctttggctttttgttttttgaagacagggtcttcctctgtcacccaggctggagtgtagtggtgcgatctcggctcaatgcagcctcgacttattggactcaagtgatcctctcgcctcagcctcccgagtagctggcaccacaggtgagcaccaccacgccgagctaatttttgtatttttgtagagacggggatctccctaggttacccaggctggtctcaaactcctggactcaagcgacccgcctcagcctcccccaaggtgctggaattacaggtgtgaggcaccgcacccggtccaaagtagtttttatattttaaatcccccaatttctagaagatatgagctttctgacatggttccatataaataaatgtgaacttgcttagtttgcattgtgaggaaaaagggacaggtttgaagacgaaaaggaaatggcacagaggtcctgccactctctgacagggattcggcaatgacaaagtgcagagtttctggtctcattagcagtccccgccccaccgcactgccatgacactcgctcactttctccccaggctctcctcgccttcatccccatgctcatctctgcctaagcttcttccgaggccactcataacgcttcacctctgctcccaggaattctcacatcctcttcgcgttggccccacttgctgtcacggcaagtttcagtccgggtggtgccctgcccctgtctatagactctggcctgtaaaacctcactgcacccctctggcctcttcgcccagtctctcagctgccacctcctctccagcagtcttggatctgagcttcaccctcctctgctgcccttgccctccgcaaatcccacccaccctcctcaccctaagccggttccttcgtcccatccccgccccgcccgtccttcctctgcgaaatgcttcccaaacaagtcctccgcagccgtcgtcctcaagactcgtcgcgcccggcccttctctccgtgaccccgcgccctcccaagcctcccggggctccggcgcctgtcgctgccccgactccgcggcggctcccagcccacctgctctcctcaggcaggcgctcctcgccgcctccgagctccattcccgcgccctccggccgcatccggggcggtgaggccgcctcttcgcccaagagaggcgtccctgccgcttcgcccttcagggctcccggggccccctggggccggaggaggcacctgcggccggtgggctccgggtgatgcgctacacccgggcggcgacagcgggagggaccgccgcctgggctgcggcttctatcccggccacccccacttccggctccggggactacagcccccggcgagcactccgaggctaggccgctcccgcaggacgcgtcctccaatcccaggccgcgctcgcagaccgcgcccctccaacggcaggccgctcccgcaagccgcgccctccaatcccaggccgctcccgcaggccgcgccctccaatcccaggccgcgctcgtggattactacgcacccggtggttggctgggccggcttgcaagcggcgggggaccttggtctcaggaatccgtgccggggcgtatccttattcacccccgtgacattacacgctggggaccgaactcagtccgagatgtagactaggcaataacgctaatctaatcccggtacgattaaccccactcagcccgccctggcttaatgtccgctggtggtgtttggagacctcgagcatttaaatgaagcgctcacaaacaagagcacaggttgctttgggatcataaaagagcaggagagaaaggcttctgggggctctcggaagatggatgtcaacgcagagttttcaaggctgagtacgggttagccaggagaaagaagagaaggtggagagagcaacacggcagatacaaggaaggaagtgctggcttgggaactgcaggtgctgggtagccagagctgggaaggagtgagcagcagcatggtgtgggcattctggtgtggggaaaccagatcatgaaatgccattttaaggagtttggattttatcctgaaaacaatcagcaaatcaagcatatgcaaatcaagaagtgatttgatcgaatctgatgagaaagccacttttgacaatgtggacaggagatggggcagatataatactatattgaggtaacggtggaaggctagataggagactggtcatccttatgggggataaccaagtaatgctaagaagtgaagcgaaccagttgaaagaaacgtgggcctagggttgccagatactctggtttctcttttttctttttcaaagacggggtctctctctgtcgcccaggctggggtgcagtggcgcaatcatagctccctgcagcctggaactcctgggctcaagcagtcctccttcctcagcctcctgaatagctgggactacaggtgcgagccaccacacctagctatgatattttgattttttaaaagaagctaggatctgcatttttaagcactacttccaaatttttaaacgttggcaacaaattttttaaactttcaactttgcacaggccaaacacagcttgtctgtaggctgaaggtggcccttgagttgctagtttgcaaacccaggcttaaactacagcagcggttgaagagaacaaggaggctcagattacagcaatgtgaaggcaacagaatcagcactactctataaaggactgactgtggcaagtgagggagaaagagcgatcaagaataactccgtgaaaaactaatgactctatattaaaataatatatggcttttaggtattttcaaacttgacaaaagtgttttggcaattaaaaatgaaatgaaagagcctcttgaagccatttatgatttcatttaggttaaaaaaatactctctttcaaactttctcattttcctactaaacgattatacttctttaagaaaggggcaatattactcattgggatttctcttccttctgtgactttcttctcttttggagacgcagtcttgctctgtcacccaggctggggtgcagtagcgctgccacagttcactgcagcctcaacctcctcaagcggatcctctcacctcagcttcccaagtagctgggaccacaggcagtgccactatgcccagctaatttgtttttttttttttaatttttggtagagacagggtctcactgtgctgcctaagctggtctcaaattcctgggctcaagcagtcctcctgcctcagtcacccaaaaagtattgggattacaggcatgaggcaccatacctggccttacttctagttctataaatgtatgaactttatt

SEQ ID NO: 315856 - DNA, 4001 bp, Homo sapiens
ccaggagtttgagaccagccttggcaacacagtggaatcctgtctctacaaaaaaatacaaaaattagccagatgcgttagttcatgcctgtagtcccagctgcttgagaggctgaggcaggaggatcacttgagcccaggaggtcaaggctgcagtgagctgtgattgcaccactgcactctagcctgggcgacagagtgagaccctatctcaaaaaaaaaaaaaaaaaaaaagtcctagatggcatcttcttccaatagaaggctgtttcatctacattgaaaacctgtttagtgtagccaccttcatcaactatcttagctagatctgaataatttgcttcttcatctcatacttttatgttatggagatggcttctttccttaaacctcatgaaccaacctctgttagcttcacacttttcttctgcagctttctcacatgtctcagacttcacaggatttaagagttagggccttgctctagattaggctttggttaaagggaatgttgtggctggtttgctcttctatccagaccactaaaactttctctgtatcagcaatgtagctgttttgctttcttgtcattcatgtgttcaatactgatccctccggccctagacaacaatagtcaggtgtggctctttcctgaagctcctcttcttctatttagacccaggatatttacggcttctgcttactcttcttttttttcttttttttgagacggagtctcgctctgtcgcccagtctggagtgcagtggcgcgatctcggctcactgcaagctcctcctcctgggttcacgccattctcctgcctcagcctcccgagtagctgggactacaggcgcccgccaccatgcctggctaattttttgtatttttagtagagacgcggtttcactgttttagccaggatggtctcgatctcctgacctcgtgatctgccgcctcagcctcccagagcgctgggattacaggcgtgagccaccaggcccggctttttttttttttttttgagacggagtctcgctctgttgtccaggctggagtgcagctgcgccatctcaactcactgcaacgtccacctcccgggttcgagcgattctgtctcagcctccggagtagctgggactacaggcatgtgccaccatgcccggctaatttttgtatttttagcagagacggggggtttcaccatattggctattggctctgctggtctcgaactcctgacctcaggtgatccgcccacctaggcctcccaaagtactgggattacaggcgtgagccactgtgcccgaccttctctatattatttttatttatttttaattaacaaagcatagaaacagattcaggacattcctccgaagacgttccagactcgagtcctaggacatggttggggcgggggtcatttgatcgagtggcctgtgtccttatctggaatacgggacgacgctgtaactctaactcaccctgcgaactcacagcttttgaggtaaacaagtgagaaagaagagacaataaagtgatctttctttaccatctaccaaggaccaggtggtttacacgtcagttcattttcaggaacacagcagcgctctgaaaactacagagcttcctgggcgtagggggctgtggtcgcttgaaaagaaccagcctgggggtccgagttccaccggaattgggttcgagcgcgggtgaaaagagggacccgacagcacccaccctccaagtagaggcaaaagttgaaagtggcgggctggctgcgcttccgaagaaacacgactggcgaaggctcaccttagtctctacggtgggtccctccctgtagccgacccgttccttgaagcgggccagaaacgccggctcggctggccgcacgtacgatacctggttccgcttgctcatggtagctctgggtaaagacagaagacaggttccgcgacggattcgcgacgatacagaggcgcttagctgtgacgtcactgggccacgcccccgatgcgtaggccgggcaacatggcggcctccatgcgggcgtcaacgtccgatccaagcgccaaattcaaatttgcggccatcttgagcgggcggaattcagtcgcgcgcggtgcagtcgggaggtggaggcaccggctgcattgttttcgggatcgaggggtgagggcgctatggcacccggctgcaaaagtaagtctgggcccccggcttcgttaccctatttttgcccccaaatacagctgtgaaaggatggcagcctcggaccgcccgcaaggttcttgctaggcatgaactgcaggagctgagtgaccggcggggacgtttgggaatcccgctctgtcgctcaaagacaatacgctagccgaaaagctcatcccttccttcagtgtcctgtgcgcatgccaggagtctggcgcagttctaggcgctcgggatgagcagtggacctgacgttcttccctttctttcccttggttctgctgtttcttcgcaggcctcttcccacatcccgaccagggctacctctctagatatccttgtctcaggatcggcttttgctcccaccagcttctgcgtatttctacatttctgaccttcctatagggaagggtttatttatattccaaacatttctttctcctctttccttaaataaatggaatgttaaaacacagatgtcagcaatgtctttatgttctcacagtctctattttcacttaaaggagacccgtccgatttctttctctttttcacggaggagagcactgtcattttgcttatgataaaccctacagttttcactaacgtagtcatttgctgtgcctgtgtacgtgctccacttctcacattgccacatctcttaaggagtcttatttttgtaaacctgattatgagctgatttaatgggatctttgtgagtggtctgaatggtaatgaggagaggcctggattagatgattaagaatttgtgaacttctgtcatttgagctttccaacgccgttaatgtttctagctttctgtcaattgtagtcgtttttgatgggtttgttgtttcattaatcttttaggtcgatcacacctaatcggaacacctccttatgctacctttttgcatataaaatattccttttcctttcatcattttcagtattcaaggactatgagctcacaaaatggtaccttattggagagaaatgttcatcctgctttctgaacaatcatactgtttgttctttgtttccactttatggatcagtcactaaatctggactcaagcaaaaaatttgatgcctgttaaataagtaaaacatctgcttatttaatgagatatatgtatgtgactgagggctcttgtctgaaaaccaaatttgagaacctttctaaagtggtgggagcactctcctttatgatggtggtgatgccatggggaacttttccactcctttaagtttgttggcaaaattgaggttgatgacttcccagttaaagtgcttcttgcattcccagcagcccagaggcctggagcatgaagtgggaacacatgggagaagagagcccgtgcagtggtctttgcaacttttactttgtgccccgaaggctatctctctctctcttttttatttttgagacagagtcttgctctattgccgggctggagtgcagtggtgcgatattggctcactgcaacctccgcctcccgggttcaagagattctcctgcctgagtctcccaagtagctgggattacaggcacgcgccaccatgcccagctaatttttttatttttagtaaagccggggtttcactgtgttggccaggatggtctcgatctcctgacctcgtgatttgcccaccttggcctcccaaagtgctgggattacaggcatgagccaccacacccggccccatgaaggctatctctagtgacatcattgacaccatgagttgctgactgtgaaatcagagaaatgaaaaagtgaaatatacg

SEQ ID NO: 315857 - DNA, 4001 bp, Homo sapiens
acctcaggttcctgtgtgcagccatgagcttgggggcttgtttgggtttgttgcaccgcatttttgtggcaatagctaattgatacacctttacattcagagattgattcaacagatcagagaaaatgtattttttggccgggtgcggtggctcatgcctgtaatcccagcactttgggaggctgaggcaggaggatgacctgaggtcaggggttcgagaccattctggccaacatggtgaaacccagtctctactaaaaatacaaaaattagatgggtgtggtggcgtgcacctgtaatcccagctacttgggaggctgaggcacgagaattgcttgaacccggaaggctgaggttgcagtgagctgagatcgcaccactgcactccagcctggtgacagagcaagactccatctcaataaaaaaagaattattattttttttttttttgacagagttttgctcttgttgcccaggctggagtgcaatggcgtgatctctgctcaccacaacctccacctccggggttcaagagactctcctgcctcagactcccggaaaatgtattttaaacaaggtattaggtgatgcacaagcgcttatgagaatcaatgccttaacctctccatggtttttttttcttctgtaaaaagcagacagaacatcacctgctttagggttgttgagaggattaagtatgtgaagctgatgcagccacagttgggcctctcctaaaattgctgtttcttttcaacctctgctcctggctggcactggccagcccgctttggggtggggcaggtggagagaggatgtggggtgtatgcgccctaaactcctgcagaaagtcatgcacctccttttttcagagggtgttaaacttctgctctagcacctacccatattcacagggaaggccagtgagatggtgaatttgcaggggaccacgtggggcacgtcggagctgaaagtgctggcaggctcagatgaggactcgatgctgctgcacgggcggtcagagtcagactcctgggccctggccttggccttcaggtgttcctccacgtcacactcgctcgtggactggtaaaagctagtgatggaggagatgggctctatgcttgcggggtcctcttcccactcccaggcatgtagcgacatgctgcagagcgcactgctggccgccggcgctcctggcagggagaaagtgaaggctgtccccgcctgtattccagggctgctccaggaggtaagcccggcctcctgcagaagcacccacccttctcttccctgcttcccccgcctgctcctagatgaacgccggggctccttcactgcctgccacacagtcggtactcaatcgacttagagaatgaatggatgaaggaacaacagataagggtggctggcagtaagcacgacgacgagcaaccccgtttccttcgcctaaccaggagtcagtcgccgggcttctggaatgcctgccccaggtgagcagctcccgggagccaccaggcgggagaggggacgtctgctcaggcaggcctgctgcgcctaagcacaagatgcgtttgctatttggggagaggcaaaccaggccgggggcagcacgtgcaggagcctggcgaggtcggggagggcaagccctgtccccaagacagaacatgaatgtgcactgggtgctgggctcggggcatcagctcaggcccatggaggcggaacgccgggcaaacgccgaagagggaacacgcatcgaggcgaggcgggaagagtcccgggctgcggcggccgaggtgggggcaggggtcggggttcccctccaggtgctggcggtacctgcgagcggatgcgctgggcggcagcggggagttggaccgcggcggcaactcccgtaccggatccacagccacctgggcgaagagactccaagactgagaggagcgtccgccggtgcagggagggccgcaggcccagccactcagctacgtttggcggttgctaggagacgcgagggcgtgcggcctgggggcggggctccgcggggcggggctttccccctcagccactgcgcgcagtttgtcaaatggctacatccaggttcagaaaccagctgccttcattccttcactcatgcattcactcattaaggagtttctactcggaacgtcagcacctactataagcctggtccttgcccgtacgatgggaggtaggggttgatggctccttcctccccctccatcagctcccacctcccattctttaataaaagcaaaggaagctgtgggctctgcaaactccagacctccccacgatccctctcattagattctctgcttctgtcgccgatgtccttaaaaaccagacctccccacgatccctctcattagattctctgcttctgtcgctgatgtccttaaaatagcatgagaattcttgttagtgatcatgagcgccaactcagagatcagaaaacaaagcttagagaggtgaagcgattcgcccgaggtcacacagcaagtagggcgcagcactgtgttgaaatccggactgcctgactccaaagcctccgctcgtctgctaaaccacccaagctgagagccctggctgcggctcctaatgtagaggacctcagcacagcaagcggctgggacagagggctggggtaggcctcatggaggaagtgagcaacgccaaatctggggggtgactaggcagaggcggtgaaagcaagagaaagcatcccaggtagaggaacagcatatgcaaaggcccatagaggtgaaagggcatggcaagtttcaggaatgggtggcgaggctgtagcagtgtgcagggcccatggtacatagccccacagggcaggttagggcacaggactatgggcaatggggagccaaggcaggtcttctgttgagggagggcaccctgctccggcagtcagtttgttcaagagaatgggagctgaggctacacacaagcttggctattaagaaaactttagctgagttgagctatgacctactttgtgtcaaagagcaaaactgtggcgcagctggggctgagacccaagtcctgagcctcccagtgcatgcctccccagaccgctctcagggcatgggacagcccctttaatactgggtgctccaatactcctcgggttcagtctgaaaaacagcctcaagtacagctgttagggaagacaccaaatggcagtgggccctgtgaggagtgggttcaaactcttagcacgagaacggcaaccaccttgcccacaccccacctgcagcagcctggagactgctgtctgtatgccaggaagtgctcaggagacacatgaagggctggaagaatacaaagctactcagatacaccagcccccaaaagggccctttaacaagggcagttcaacactaccaccactcttggacagacatcaggcctcctgctccccaggtcctacccactggcctgaggctggtttccctccaaaggttcctagatcacatcaccacctaggacagaagccaatctcttcccaagctcaatagtgagaggccagaggtcttggaccaagggccaatgtgccatcctggatgtgcactggaaacacctacatgtcaaaaatacaattctgaggcttcattaaagacctgtggaagtgactctccaggggtggagcttagaaaccagtggcagattgtattttccaaagacagccacctcaaaagatcccctcccacataatcttccggcaggcattgtgaggttcacattcctcccacccagttggggggtctagtctccttctctggaaactgggcagacctctgtgactggctcagtcaaaagagtgcagaggaaatgacactatgtgatttctgaggccaggtcatataaattccatctacctctgccctgttcttttgaggtatagtattcatgctaggaatccagctagcatgttgtgaggaagcccaagcagccatgtgaaatggcca

SEQ ID NO: 315858 - DNA, 4001 bp, Homo sapiens
gcgacagagcgagactctgtctcaaaaacaaacaaacaaacaaacaacaacaacaacaaaaactggggaatggggcgagggttaatcaatctgacttttactgttttacaaagcagaaaatataaatttccacccagatcagtcaggtattaatctgaaattagaagtaaaactatcaggacatttcctttcttcaacctctgaaactcccagaagcttgcagaattccctctaatagtcacttaacaaatagagttatcttcttcactaaaaattcaggtgtgtttttaaaataaggggatatcctgatgatttgtcattggagcactaaatctcttttggtttggcgttcccagttcatgaattgcttcttactcaaatatactctttaaaataataataataataataataataaaataaggggatatctaaactagcatactgacacatggaggtgggaaaaatataatactctttcacttacctaacactttaccttcaaagcatcttactgataactaacgcagctgtactgcttaataattttgtcactgcaacaaagaaagagctgatctaattaaaatacaactgaacttgaagaagccctatgtttttacctttttttctctaggcagtaataatgagcactagcagcaaaaatccttccttttggagtcctaagaaattattctaaatttttacctttcatcatcaagtccatatctatatcctatcttggatccaatacattatgcaactgatgtattgaaatagcagcagcctcagtttccaagtctccctgatgcttcagtctgtgccctctagtatctagggcaacatatttgtcatgtggaatatgtccaatgcatttagctggtaaatttagaataaatcgcaagaacaatcgcctggggccctcaaaaaggccacatacatctacagaatattatttaggaaagtataacttaagggtgaaaacagctggtgaaactgctctgtagctgaaagctgagaagcttctccattttagtactctcatttagattttaagcatctttttggggactgttaaaaaggtagtctgtggaaagcacacggtgcaactgtgactttgcacatgtcacatatgtttcaagtttaaaatggggttattatttttttcttatcttcaggtgctaatgcatccaaatgggtgatagatacggagagaatctattttttgaaagttggttgaatttagaaattactatgtgaatcaagtattaatgtattcaatatccatttgcactcctgagtttatttagatactttacgtaaaagtgaaggggcaggaatataggcagggtatttaatgtgaagctctctcccgttaataaagatcaattaccccaagatttgcaaaaaaaaaaaaagagagagaaaaagaaagaaatgtgcgagaagtttcctaaaatttaaggtagggggaacggagtttgcaaactcctttcaccccgatgggcattagcagacacctccggttttagaaaagcgttacaaacagttcttccacgatgctgcccaccaaagccgtaatgtgcccagaccccagagctcctagagcatttcactcagggtaatgctggctttggggcggtcaaggcaggggcgtgtcagctcaggatgaagaggcaggaagcacagacgggccgcgactggcttcctgactgcgccgcgccttgggaaagtccccgccctccaaagctctcgattgggatcaccttgggactcggcttccttgtgaaccgtttccagcgattcagccccatccttttctttgagaaggaccttccctgaggcgccaggagcattttccaagttcgagcccgaacctcggccaaagctgcagcaaccgcccttctgcccgggctgcctccgggtcacgctgggaattgtagttcctccgcccgcaaggaaagcaggcataggacaccgtcgaaccaccactcccacgaggctctgcgcaggccgctcgcgttggctcagttaccatagcaacggcagaggtccctcgctcttgccgtcatcaaggctcgcttgaatgtcggctttgctttttttctggcgcccagtgatgacgcagtactccctgattggctctgcactggaggcagtgattttggggcagagaattttgcaacacgtggtagtgaactgtgaggagtttgaggggtctgaagactgaaagagtcgaatggtttgttggcaggtaagtgcccctttgccctgctggtgtgggagctgctagagatggatgagtcacgtcgcgtccagacgcttcctggttgtgttgcagtaacggtgattgtactcccgccatgtctcctctgcttcccttttcagggtgtcctggtggattggtttctgtaagttcagattctcataaatcgtgtgagcgtcgccgacacctctgagataaaagggcccctttcgactagcctctgctgaaaggtagagttttcaggaagtttttattccgaactgcccatgggagggtgggaccgtcttcaatctctgagccaggtgcctagggaggtctggggccatggagatggcccatggagcaaagataaatccaggcttattggcttagccgaggtgtttccagagacagcccatttaggggtgataaatgggcttataaagcagagtaaagatttagaacaggagttttgaattcaactactttgtggctatatgaccctaggcaacttgtttaataactcagagaccctgttttctcatgcaaaatggggacgataatacctgaatcactggagtgttgtaatgattaaaaataaatgtatgtgaagcattctgccaggaaatgtaaactaaagttgatttgaaattggtgaaaatgaagttagggaagctatgccctcggactgttgcagcgatcctaggaccagctctgtaactggtctgtctgaaaggcggttgaataaattgtgctcatacaaactatgcagtaccacgaagtagtttttttcaaaagggtaagttagctttatgtctcttcttcaggaaagacgtctaatgtttattcttgagagaaaagcaaattgcagagaagtgcatatattatagtataatatgtttccatttttgtaaaagcaaaccctgaccaaaacactccctcccatatgcaagtatgtttaaatatttgtatgagaatggagaaagattgcagagactgggaggatggattagaggcgggagggagaaagggaaaagaagaagaacactatagcaaaatggaaactaagattataatgtgcttgtgtaccagatggaacttctaataagctcccagcctattagagtacagcgctgaaaactagacttcaataattaaagtccttgctctgccacttaccagctggggattttatcagcctcagtttatcatacataaaatgcagataataatggtatctatattatgcatttgatctgaggattaatggagtgaatatataaagaacagtgcttaatacatagtaaatacccgataaatgttagttgctattattgtctttctatatgtgaaattaatttaacttttattgtgattactgacatttggaattctaccatcttattttgtgttttctatttcttttttttggtctcttttcctttcttgccttttattaggttaattcatttttctttatcttcccacttccctctccagtgagtttggaaattatgcattctgtcattaatcgtttaacagttacttctgaatttttaacacacatactcaacaaagtttaacgtcgtcgttatctctttccccctaccaaatggtgtaacgatttccgaatgccttggaaaaatcttcatttactgttttctagaattgtagcgttcttcatttcttttttttgagacggcatcttgctttgttacccaggctggactgcagtggcatgattttggctcactgcaac

SEQ ID NO: 315859 - DNA, 4001 bp, Homo sapiens
aaaagtcctttttagtagtaacctgaagccagtgctcttcatacctttgcaacaacggtagaagagttttatgtaaaccccttgaaagtttaggaatacagtaaagaccccatcccatattttgtttaagtctctctttttttttgttttgtttttgagacggagtctcactctgtcacccatgttggagtgcagtggagcgatctctacttatgcaacctcagcctcccgagttcaagcgattctccagcctcagcctcccgagtagctgggacaacagagagacgccacgcccaggtaatttttgtatttttagtagagacggggtttcgcatgttggtcaggctggtctcaaactcccgacctcaggtgatccgctcgcctcggcctcccaaagtgctgggattacaggtgtaagcccctgtgccttaaatctctttcagtgcacaaccttcctgtttattcaaagaaaggtaatgcttcagaatagcatacaaaatgcttaactcccgatttttaaattaaacggactgccctgcttattctgcggcttctggagcctatgctaattcagaagcaaagccttaagcatttaacagctaacaccttaattattaggtttgcaggcacttcttaaaataaagaatgaaaaagagaaaacaaatgtacttaggagatgggcacttgaagtagggaaaagaggagcaccagtgaagctcaagataagacagacacatttaatacaacagcagcttcactaacagctgctgttgctctactactggaaatcatttttttcctgtaatattttacaaatttttggcacattagtcttttatcatagggttaatataatacaatatattttaaaattatgttcaattctaccttaacagaggaaagctgtgacacagagagttaaaataagccttaattgagctttaaaaaaattaaactgaggtcaatgttagtttgaattccgtaaatgcaaaacaaatgaaagcagaagattaagatcctaaaacaaacggaatcgtctggacacatatcactagaatagaaaaaaaggcaattcagcattctaagattaaaaaactgtaagcaatgtattttggtaaagaaaaaggattacgcttactaggaaggggaagtgcttcttaatgttgaaataatgtttttcaagtttgagttcaacccgagttcaagtaagagcagtaagcaacaaattcaattatagattaccgaagggcaaaaccaagttttaatcatgactttccgtcactgagaatagttgtgtattgagggcttggtttcgtagaaaaaccaaaactagaagcaaaggaaaagataaagttccgagctttttccgttacctactcgaaacaacctgaacttcccaaccttttgccccactcccgcttttcctagagccttcagtgagcgctcttgcctctcgctgcggccagcggaaccccgacactcactagcctttaccagtacgaaaagacaacagagggatcgaaggactgtcctttctttcccaggctggggccgccactcctcggcctcactgtgaaataagaattgctaggggaagccccatctgtcctctaccccagagcctctcacctccaagtgccgcaaaagctgagtggcgttcgcctctgacttcacggctttgtactgactgacagtcaggagcaaggacttcaagcaggcagtggagtccattgcaccggccgcggcccggcttagggaccaccaccgcccagcgtgcgccggcctttagctttcgccgcgctttttttgattttcggccccaccccctcgctctcagaagcttccggatccggtcgggctccggaagtccctaggcaccctaggggaccgttctcggtgacggccggggtgggccaggggtcgaggtgatttgtgggtccaggacgggggttgggagctgcccccgctaacccaccctcgtctgagaggccgcgaggtttcggcctgagatcccgtgaaggcgagaaatctcgcgatttctcgggagaggaatcggttaggagaagggggattcctcactcagctgtgcgctctgatttcgtgcgcttcctcgtccttcatgttggatggccagtttttcgtttgtgcgtcatcctctacctgagaaatggtcgcttgcccctagtctagacacggtgaggagctctgaggagaagaatcttgggccctagattttgaggcggcctgggaggggcctcgtttttaaatctctcctacacccgccccttctgcccggggatggtagtttctcagagtcaacctattggcattatgtggcaaattagtcatgccctgaccaaagtatttgtcacatttattcgagaagactacctcctgctgaccctgggccaggtattgctccggagggtgttactcgttagcgtcagtttttgtaagtgaaggtgtctgtttctctctggcatgattgattgttttataattctcgatgtctacgaaaatggcactattatttgcgttttttaaatcggagatagcttaatattattgcatgtgtatgtaatgaagcgagtcagttactggttttggagctttttgcttaatatttcctaacgtcgaataaagctttaaaaaccaggatgtagaaattgtaagaatagggtacatttccatttaattaaatcgtttatcagaaatcatgttttttcacttcaaaagaatttttttgaattactagatttttgaagacaggtttggtgttttggttttgttttttataaaagtttaaatctgaaagataaaaatgatttaaccagttgggacattcatgtaaaaatctttgggtagcttgtgtgttcatttatgctttcattcattccgtaaacaattatagagcgtgtaacatgggttagaaactgccagtcagggaacagagatgaagtagtatcccctgctgcgagggaactgtctagtaagggaaacatacaaaatagtacttttgaaattcaccacataaatgagaggcaccatgcagtaacatgcagcagtggtaaagagtagagagccaggttgcttacagattctagctccacctttgacgatgtgactctaggcaagttctcactgctgcagaatcttcattaggtaaaatctggccaagggagatacctggttcataggactgttcattcaataagtagttcattgagaatctacaatgtgctaagcacttttctagacacaatagactcagtgaaaaaaacaaaaatactactggcatgcaacttacattttggtagggaaccaaataataaacacaataaataagtaaggaaaatgatataaagagaaaaatagacgttattactctagaataatgttggtaattgataagggaaatgggaaggtgacctcattaagaaagcaacatttggggaaatgcttcaaggagttgagaaagggagccatattctatgggaaaaggtttttagatagaggaaatggcaaagaaagaccctaaagtgggatactgtatgccagaaacaaggatgccatgtggctagtgtagaaagaacgaggaggagaggagtagagatgaggtcctatacggtcttggagatggttaaaaaatgaattaatgtaaagtgtcagctgtcatctggcataattaagttctcagtgttacagtcagtgcctcattggcaaatgaagtgatcagagtttgatagtgttggacttttcatctgtgatgatgtgtcagcatcgtccccattcagaggcccagggtaatgcgcaaagctgcgtgctatcagtgccatctttgttggattttgacttaagcagtcatacaaattttgtattctcttctgtaattaatatcaaatgtctttctcaaaaaatcttcaccaaaattgatgttgtaagtttagtaagagggatcgtttctagctgtgataagtcttgacatttttaatcagagatac

SEQ ID NO: 315860 - DNA, 4001 bp, Homo sapiens
cttgggccacccatcaaatacactaacactaacgatagctgatgagcttaaataaataagtaaataaatatcacacacaaacatctcataatgttttaaaaagtttacaaatttgaggccgggcgcagcggctcatgcctgtaatcccagcactttcggaaacagaggcaggcggatcacctgaggtcaggagtgcaagaccagcctggccaacatggagaaaccctgtctctacttaaagaaataaaaattagctgggctggtggcatgcacctgtaatcccagctactcaggaggctgatgcaggagaattgcttgaacccaggaggcggaggttgcagtgaactgagataacaccactgcattccagcctgggcgacagagtgagactctgtctcaaaaaaaataaaagaaagtttacgaacttgtcttcttgtcttgggccgcattaaaagccgtccttggacgggggttggaaaagcttggcttaggctaaagcaaaactgctttaggattaagcattcattcttgcatggatacattacactacttctgctttcagaagtgcaattacaatgtattttacttcttttgtaacaaatactttgagtacttaaagagaaacaacacatgtatcccaaacagcaactctgtactatgttaaacaagagttctatgggagagaaaaaagtcatcaaggtgaatggagagtaggacagcctgttgatccttcaaaaggcaggtttgtctgtttggttttctttacaaaagagcaaacctgggaatatgtttcaggatccatgtaactcaccgtaagatttattcaagaaatctgtacgttgtttataggtaaggaaatgtcttctttgcctacacagttggccacgactgtcttgatctgtgtggtgttaggttactgtatctacttgatggtaaaaatgttacaagaacggaagttgaaattctgcactttggtttatgcagtctcatatttccagataaagttaataaacgcaaaggaccatatcccaatgtaacgaggagggttgggaggacaagcttcaagaacgagtggggtgaattcaactatcaaaattgtaaacatgaacaagagtccaggaatcttatatttcatccggatacatgaaagtagatttcaagagttggtcattcacttgcactgcttctactcagaaagcaaaagaacggcttctaaaaagaaaacacaagcctaacacttcgacagaggggtgagagggaaaaagcaagccacatgagtctgacgaacgggtacgaaagaaattcagagggcaaggaaagaaggggaatgaagaagacaggaaaaggtgaaggaggcgggcaaaggccatctggtgtgaacctggctgcccagctctttatgcacccagggcagcgtggggcccctctcgccccgcgcgcatctaggagctggggcgcagtgcgagccccccacgggcctggcagccggggacgcagggcgggcgggagatgaggggtgcgctcgccgcgggcgctgacgccccaccaggtgccgcacgcaagggtccccaggaaggaggcgcacttagcgcagccctggcctcccggagcaggaagggggtgggtggagctgagcccggggccgccctccggagccgcccccgcagccctggcccccgccccccgccccggctgtcagcggccccctcccgcagtcacttacccgccggctgcgcggtctcggccgcggtggcggcggcgacggcggcgacccccgcctgggtcatgatcccaggaggggaaggcaggagtgtctgaccgtctgggcgaatctctccgtccgcggccaccgcctgctcctccggggctgggggagcgcgggcccaggccctcctctccccccgcccccgccgcctctttttgcggccaccgcagccgctgcgagcccgagccctcaaggccggagacccggcggcagcgcggcctcaactttcccagcccccctccccccgcccctccccgcccctcccgcggccgcagctcagcaagcgaacagcctaccctgggcgcgccgcgttcccgcctctttcactcaacccgccaatcaggctgcgggaacgctgccgtggtagccaataagaagacagaatgccgttgcactacgctagagggcgggaggaggcggagaggaaaccaaggagtgaacggggatcgggcggcccaatgaggagggccggggggcggaggtgtgcaagttgggttgaagaaacaggaaatattcttaaaggtagagtgacggacaggaaggaaagccagtaggtgaatgggaaagaggtgggcctggttccttaaaggggacgccttgagaacctagaaaagaaggtgttttaagaaacttctttgtatcttcttctgtggtctcttttcttcgtctttcggtaggagtttggaagtggaaaaattgaaaaggaagagggcacggaagtctttcggaatagttagcccctcttaacgtggagggcaggaaggtgagaagatacgtcttagtaaatgtggagaagaaagaatcagacgtttccgacttctcgataactggaagattgttgctgacttgacgctgctcgcattcgtaggctgtggtctcttgtcatcctttatttgcaacaacacacagatttctgtgaattggagatggccatgttcagaaatgccctgggggcctcccagctgggacaagggagtttggcattgggggatggggtttgagatctcaagcctgggttactaaatacctggatctaggagaggtagggccaggggtcacgaaatggagacctgagtgccccttaactccaggatctgtgtggagcccttggaaccgtgatcacaactccctcttcctagtttcgcttcatattttataacctcctgctgaaacaggtgtcctccacctagttgcggttatagatttccaagcccttccacaaccagatttggaaatatcccagatcttagatgtccgtgggctaacttccagaaggtgcacacagggcatggcataatgggaattacttgagcctgtatacagaagcagcagacatcgcattgagcaaaagggtaaaggctaacagtaacggagtcttatgtttgtacagcagattgaaaagctatgatgaaacggaaggcctgtaatgttgcttataaactgtggtactaataaacaggctagaaattttctttaactcatccatctaggcacacgaagttctaattagcctttgaacagacttggcacatccaaatcaaaactgcagataagaaagattctacgagtcagagccataatagcaatgctaataacatcaccataaaattgtatagtattggtatgctcagccataggaaacaatttccagtgtgttcagaatacaaggtatttctcgttaacaaatatcatatccagggtgtgcatgatttcctaaacaactgcaatgcatcaattctaaagtaaaaacaaatagttttgatgattcatgaaacagaatttaaccattcctttagatcacctttaaaaaatacacattaatatatttctggcacgatatagacgtagaaaagaagaacaatttccgtttgataaagatcagaatattagctttttaaattaatccttattacctaagtgtagcctaaatcccaaacagggatttttctcttttcttttctttttcttttccttttcttccctttccctttcctttcctttcctttgttttcctttcctttcctttgttttctttcttttcttttttcctgcgacagggtctccctctgttgccaaggctgaaggtcagtggcactgtaacagctcactgcagcctccacctcccaaactcaagcgatcctcccacctcagcctcccaagtagctggaaccacatgcccggcaattatttttttcttttggatagagatgggggtcacattatgttgcccaggctg

SEQ ID NO: 315861 - DNA, 4001 bp, Homo sapiens
agcaacactgtctttaaaaaaaaaaaggggggaatcgtatatttcactttttcatttctctgatttcacagtcagcaactcatggtgtcaatgatgtcactagagatagccttcatggggccgggtgtggtggctcatgcctgtaatcccagcactttgggaggccaaggtgggcaaatcacgaggtcaggagatcgagaccatcctggccaacacagtgaaaccccggctttactaaaaataaaaaaattagctgggcatggtggcgcgtgcctgtaatcccagctacttgggagactcaggcaggagaatctcttgaacccgggaggcggaggttgcagtgagccaatatcgcaccactgcactccagcccggcaatagagcaagactctgtctcaaaaataaaaaagagagagagagatagccttcggggcacaaagtaaaagttgcaaagaccactgcacgggctctcttctcccatgtgttcccacttcatgctccaggcctctgggctgctgggaatgcaagaagcactttaactgggaagtcatcaacctcaattttgccaacaaacttaaaggagtggaaaagttccccatggcatcaccaccatcataaaggagagtgctcccaccactttagaaaggttctcaaatttggttttcagacaagagccctcagtcacatacatatatctcattaaataagcagatgttttacttatttaacaggcatcaaattttttgcttgagtccagatttagtgactgatccataaagtggaaacaaagaacaaacagtatgattgttcagaaagcaggatgaacatttctctccaataaggtaccattttgtgagctcatagtccttgaatactgaaaatgatgaaaggaaaaggaatattttatatgcaaaaaggtagcataaggaggtgttccgattaggtgtgatcgacctaaaagattaatgaaacaacaaacccatcaaaaacgactacaattgacagaaagctagaaacattaacggcgttggaaagctcaaatgacagaagttcacaaattcttaatcatctaatccaggcctctcctcattaccattcagaccactcacaaagatcccattaaatcagctcataatcaggtttacaaaaataagactccttaagagatgtggcaatgtgagaagtggagcacgtacacaggcacagcaaatgactacgttagtgaaaactgtagggtttatcataagcaaaatgacagtgctctcctccgtgaaaaagagaaagaaatcggacgggtctcctttaagtgaaaatagagactgtgagaacataaagacattgctgacatctgtgttttaacattccatttatttaaggaaagaggagaaagaaatgtttggaatataaataaacccttccctataggaaggtcagaaatgtagaaatacgcagaagctggtgggagcaaaagccgatcctgagacaaggatatctagagaggtagccctggtcgggatgtgggaagaggcctgcgaagaaacagcagaaccaagggaaagaaagggaagaacgtcaggtccactgctcatcccgagcgcctagaactgcgccagactcctggcatgcgcacaggacactgaaggaagggatgagcttttcggctagcgtattgtctttgagcgacagagcgggattcccaaacgtccccgccggtcactcagctcctgcagttcatgcctagcaagaaccttgcgggcggtccgaggctgccatcctttcacagctgtatttgggggcaaaaatagggtaacgaagccgggggcccagacttacttttgcagccgggtgccatagcgccctcacccctcgatcccgaaaacaatgcagccggtgcctccacctcccgactgcaccgcgcgcgactgaattccgcccgctcaagatggccgcaaatttgaatttggcgcttggatcggacgttgacgcccgcatggaggccgccatgttgcccggcctacgcatcgggggcgtggcccagtgacgtcacagctaagcgcctctgtatcgtcgcgaatccgtcgcggaacctgtcttctgtctttacccagagctaccatgagcaagcggaaccaggtatcgtacgtgcggccagccgagccggcgtttctggcccgcttcaaggaacgggtcggctacagggagggacccaccgtagagactaaggtgagccttcgccagtcgtgtttcttcggaagcgcagccagcccgccactttcaacttttgcctctacttggagggtgggtgctgtcgggtccctcttttcacccgcgctcgaacccaattccggtggaactcggacccccaggctggttcttttcaagcgaccacagccccctacgcccaggaagctctgtagttttcagagcgctgctgtgttcctgaaaatgaactgacgtgtaaaccacctggtccttggtagatggtaaagaaagatcactttattgtctcttctttctcacttgtttacctcaaaagctgtgagttcgcagggtgagttagagttacagcgtcgtcccgtattccagataaggacacaggccactcgatcaaatgacccccgccccaaccatgtcctaggactcgagtctggaacgtcttcggaggaatgtcctgaatctgtttctatgctttgttaattaaaaataaataaaaataatatagagaaggtcgggcacagtggctcacgcctgtaatcccagtactttgggaggcctaggtgggcggatcacctgaggtcaggagttcgagaccagcagagccaatagccaatatggtgaaaccccccgtctctgctaaaaatacaaaaattagccgggcatggtggcacatgcctgtagtcccagctactccggaggctgagacagaatcgctcgaacccgggaggtggacgttgcagtgagttgagatggcgcagctgcactccagcctggacaacagagcgagactccgtctcaaaaaaaaaaaaaaaaagccgggcctggtggctcacgcctgtaatcccagcgctctgggaggctgaggcggcagatcacgaggtcaggagatcgagaccatcctggctaaaacagtgaaaccgcgtctctactaaaaatacaaaaaattagccaggcatggtggcgggcgcctgtagtcccagctactcgggaggctgaggcaggagaatggcgtgaacccaggaggaggagcttgcagtgagccgagatcgcgccactgcactccagactgggcgacagagcgagactccgtctcaaaaaaaagaaaaaaaagaagagtaagcagaagccgtaaatatcctgggtctaaatagaagaagaggagcttcaggaaagagccacacctgactattgttgtctagggccggagggatcagtattgaacacatgaatgacaagaaagcaaaacagctacattgctgatacagagaaagttttagtggtctggatagaagagcaaaccagccacaacattccctttaaccaaagcctaatctagagcaaggccctaactcttaaatcctgtgaagtctgagacatgtgagaaagctgcagaagaaaagtgtgaagctaacagaggttggttcatgaggtttaaggaaagaagccatctccataacataaaagtatgagatgaagaagcaaattattcagatctagctaagatagttgatgaaggtggctacactaaacaggttttcaatgtagatgaaacagccttctattggaagaagatgccatctaggactttttttttttttttttttttgagatagggtctcactctgtcgcccaggctagagtgcagtggtgcaatcacagctcactgcagccttgacctcctgggctcaagtgatcctcctgcctcagcctctcaagcagctgggactacaggcatgaactaacgcatctggctaatttttgtatttttttgtagagacaggatt

SEQ ID NO: 315862 - DNA, 4001 bp, Homo sapiens
cacctgcaataaagtcttcctttgcacacccgtcttgtgagcctgctactcagcagccctttaacacccaaacatttagggaccccatgccatcttgcacttactgaaatactgcttgttaccattcttacgtcgcttcatttgagtgggtttcagttcccaaaattaaattacaagctgcttgaaggcaaggattgtgctttttatctcttttgaatcccctcacaatgtccagggcagagcccagcacagagtaggtattcaggaaatggcggtggttggtgatggtaatggctggaagtcagagggcagctgaatcttcatatgtgggtctatcttcagtcactactgagagagtcccaaggggcatatgatgtcactccccttccatgacaactccaaccaaagcccacagcccttccaggaggacacttggtttccaggtgcaaaaatccacatccagcacctcaccacacgctttttttgtttttgtttttgttttttgtttatttgtttttgtgacagggtctcactctgtcacctaggctggagtgcagtgaaacaatctcggttcaccgtagcctccacatcctgggttcaagcgatcctcccacctcagccccgcaagtagctaggactacaggcgtgcaccaccacgcccgggtaatttttgtatttttcgtagagacagggtttcgccatgttgcccaggctggtcttgaactcctgagctcaagcaatccgctcacctcagcctcccaaagtgctaggattacaggcgtgagccacggcgcccggccccctccctttctccctcaggaccttgtggggaatgtctctccttggggaaccaccctttgatatttctggtataacaaagcaagtctctgaatggccaccaggagacttctgtgttaaggcgctcgaggtttcctcatttgtctttagtgggaatgaacagaattggcaacaagcagccatgaagactagacaagaggaaagggagcgtttggtggggtggaaggcaccaggtgggtccctatcttccagtgctcccgtccagatgaggggctgtcatggggaaccctcatagctacccgtagcggcagcaccaacacccgaatccaaaacactgggtccaactgcacctggccttggctgaacaagactaggatgcaggcaaaactagactttctcctttttctcacccaatgtgccggacccccgcgtggagcctgggcggcagtgggctttggacccattccggtccctctctggagaggtttcctcacctgtaacacgaagggctccgactggtgatcccaaagccccctctagttcgaaaactgactagtacggaagagtccagacgacctctggctccctgcctcacggcctctatgtcctggacgcgacgtgggacccctttgtgggaccaatgaacattagctccgaagaccgtaagccgcggtcaggttgaaaggactcccgcgacgtcgagccctccttcgcctgggtttcagagatgagcgacccagctgggaacccccagataaagcggtttttggaccccagccactttcagcagtccgggcgcacacccttttcccgtctccccactcccaccggcgagcagcccctgctcaccgttcaccaggcagcgacgctcccgggacgcgactgccgcaaccgaaaccacctgcactccccacgcggggctgcctggctgtgtacatagtcgccatggcaacgggtcgcttccggggattccggaagtgtcggggtggcggaaatgaagtccgaggtcctacgtcgaggatacgggtgaggtcatggccgaatcgggaagacgagagatggggccgattgatctagaaagacttcggcggatgcacatgcgaagtcaaggtcgagatagcgagggaacgaaggccgcacatgaaccaggaagcggagtggcggggcttccggcgccgaggagattcaactacggcggccgcggaggcccgtccgattgctgctccgcgctccgagcggctgtcggcgtgcgctatcgccccgccctggttagtgtctagccggccggcgaggcctgcgcagttgcagcggccggggaagatggtggaggacggcgcggaggagctggaggatctggtgcacttctccgtgtctgagttgcctagtcgcggctacggcgtcatggaggagatccggcggcagggcaagctgtgcgacgtgaccctcaaggtaccgcggactgggcggcagcgggctgagggaaaaggggtcgagcggggagtaaaaaggggcgggggacagagaaagagaggtctagcagggagaggggtggggagaagaggtgtgaggggggccgagtagtggggagagaggtgccgagcaaaaggggatcggggccgagtggggagaggaagaggacaacctttcagcccttgaaaggaaaggttgagaggtgcgccgcttaggcccttggagtgggagacacgggtgacagcctcctttttctgtcatgcagacaagagaaaatggacttaccttctatggaggcaggggcggtggccggctccacatgctgatgggcaccactgaagaaccttctcttgtcactacagatatttctttgtgcctgtcgaacttggctgtgctgttctagaagagaaggcttctccttaggaatcattgcccttaattgttgaattactactttgtctcttaagagcttttaaaatcttctctggaaaatttttgaggtgggaagccaccctgccccatactggaaggcaccactcaccaccacaaaggtccccggggctgggcctgctggccgcgtggggagagggatgctgactgatattaagagggaaagatatcttaaccacctgttccccaccagcattctggtcgctagagccagcctccctcctgtgcctgggtcttttcatgaggaagaggcatgctgtgctgctgcctggccaagccaccgaaccatgtggagacgtccggttggggagatgatcagtggggctccctgttgggctttagctggaaagctctcagcatctgtgcgtgatccctgtttaaaaaacaaacagggcaggcatggtggctcacacctgtaatcccagcactttgagaggcgagaggatcacttgagtgggggaattggagaccagcctgggctatgtagggagaccctgtctctacaaataataaaaaattgtctgggcatggtagcctgtgcccgtagtcccagctactcaggagggtgaggtgggaggatcgcttgagcctaggaggtcaagcctgcagtgagttgtaatcacaccactgcactccagcctgggcaacacagcaagatcctatttctcctatttctctctgtctctctcacacacacacacacacacaaataaataaataaaagaaaaaataaaactatgcagagattcttttgctcttcttttcttttttctttttttttttttttttgagacggagtctcgttctgttgcccaggctggagtgcagtggcgctatcttggctcactgaaactctctctcctgggttcaagcgattctcctgcctcagcctccccagcagctgggactacaggcgcgcaccactacccctggctaattttttctatttttagtagagacagggtttcaccatgttgctcaggctggtctcgaactcctgagcttcagcagtctgcctgtctcggcctcccaaagtgctagaattacacgcgtgagtcaccgcgcccagcctgctcttcttattttctacatggttaaggaaacttttcttctgcaacatagttgagtcagacctctggagatggtagagtaggatggttgagtatggctttgaaagcagaaggatttggattaaaatcctagttgtaaccttgagcaagttacttaatctctgtaagcctcggtttttttgcttttatttttatttttttgagacagagtct

SEQ ID NO: 315863 - DNA, 4001 bp, Homo sapiens
tgcctctcttctagtccaggtgtgctcacttcacttcagcctcagcccggggccactgccctggctcttcccccagcactgcaggtgggagctgcttagttagatctcggctcagaagtcacccctgtgggggcctccaggcccactctgttacatcatcctatattatactcttccctgcagtttctactgtgggaaactatcttggtgatgtgtttgtgaactttcctccctgtctaccttcccatcagaatatcagctgtcctgactgttcactccaaggccatatcccagagtctaaaacaggaccgggcaaaatttgctgaatgagtgaatggaaggtgcgggggagagcgggggaggtcggagagtaggaatgggtggcccaggtcagccaacagggtcttaatgctgggctgaacgtcccaagggggaagcacccaggcactgacaacccagaaagggctctgggatgtcccagggcaccggcattaaagagaggacactctagggctggagctggctcggcccctgaaacacagcagcacgtggggcggccagaggcgcaggctgcgtgcagggggaggggacacgctgttccgggcacagtccccggctggccgccggactccgccccctcccctggcccggccaggcctgctgtttatcctcccggggacacagcggctgcaggaacaacatgtaattgataacaagcccagcgccggccaagggcttgccattgggtcagcgtgcaaatcacgggggtggcggcgggggctgtccttcaaaataagagtctccggtccctgagccgcccgcaggccccaaagtcgcagagtccgggcgtcctcacacctgtagggcggcagggtctccccaggggccacctggtccggggggacagggggaaggagatttgaggctctcaaacaattgttgattttgtcacctccgagggccgtgggagaaaacagcccctctgtgccctccgtgagaggggggttccatgagtaacaccaaggcggggagggaagagtgaaccggaccaccatatgggatggggacggcctctctgccccgccgccgccatccctcggtcaggccatggctttggtaatgttcggtctgagcggacggggactcagcgtggagtgagacgcgtgaacggtgcgggtgtgcgtgaaggggtgtgagttcctgtcgtgtgactgcgtgtgcggggcgtggtgcgcggcagccgctgtggctgtgcgggaggctgtccgcgaaggactcgcgcgtggagccgccgtgggtgccggcgggtgaggggaaacgtgcgtgggaaatgaagagagccggctcagaccccttctagagtcctggaccgctgcccgctgggcaccatgccctcgtcccacgccccccccttgcccccgacactgctgcggtgaccgacagtaacccctccgtctccagcccctccgccccccaaccccgggctggccagcgcgtccgctctccccctcctctcaccaggccgcgccggtgcccaccatatgggagggccggcccgcaaggcgcgccacggaatcgcccggccaggcaccgaggcggcggcgcgggcctcagcaaagtgctggtgggcgaccggggcggggggggtcacctcccccgggccagtccgacccctgcccacctccgcgggggcccatcccgctcctccgacattcctccagcactcgcgcggtgcctccgagagctgcgcgggagcacggccacgcgccccgaggccggccagccctctgatcacccggggccgcgtccacgcggccggccggccccgccgcgcctctcccacctgaacttggcgcacgccggaccggcggccaggccccggcggtcctgcggccgggcgggctgggctgggggcggcggctagactctcggtccggcggcggccgggggccgagccgcgggtcctgcgctggctcgatcgcccgccggcccgcgggtcgctgcggcggagcactagcccgcccgcagctcgctgggcactcactccccgccgctcacgtgacgcagcgggcgccgcgaaggctcgcaggaggctcggccccgggcgcgcgccccattggcccgcgctgcgcgtcacacgtcccgccccgccctggccccgccctggccccgccccggcccgcccgcgcggctcccggacttgagcggcggatgctcggggatcccggagctgccagacgcgcacgccccccaacacgctgcctggtccctggcccgcagccacctccttgcttcccacctctcgccgctgtctcgcggcgtccacgagggccggcttctaaagctcggttcccaaggtgagaacgtgagactggcctgaagacttaagaaaagctctgagatcgccccaaagtgcagtctgcgtgattgagcgggaagcgctggggagcctgtctggcccggtctggcccacgtccccaccttcatccccagcgcggtacaagcagctctgtcccccgctgagtgtcagataaatcacttgcctagaaggacgtatttttggataaatacggtattgggctttcagcaggacaatcagttaccctccggaaattgcgcgcgctctgcgctgccaccctgccctccaggactaaggaggtttgctgaccggccccccccccccccacctgaaaccaatgacaccttgtctctggggcacctttctgaagaccaaacaatgcttcgcagtctacaaaagcgttcgtagactgctttagtccgcagcaatcctggctcgcatttgggttcccgcttagagacaggaagagtaaggctcagagtggcttgcccaagaaaaacacgtgggctgacggtgctaggcaccctgctgtgccctttaatccacactccagctggatcctcagccaagcactttacagatgaagaaaccgactcagagagggcaccagccctccccagccccacagctgggaaggagcaggtagagaggtagagccaggtcatcttgcagacacccccaggccacctgtgcagagctgtcctactgagcttccttcctctcccctcctggcactgggaggtggggagcattttctcctgcttcttcttgaagacattgctagaacaggaatttttaaccataccctttccaggctctctggaatgctataggtctaggcttgcttgaccagggatctggggacactgtgcaccaggtcagtgccagggattcagctgctgctgccactaggagccaaaccaatgcgttgccagagggctttaaggacatttgtgttgaggatggtgagaggctttctagttcacagaagttggaatgaccactctggcattacagcagccctggctagcctgggcagaacagtggaatttgtccattttcataagagaagagatagaggcctgtattcctcattttgtctcagtgcaggtctggattgggcatagccacagcacttctccatctgccctgcccgccctcggtcttcactcctcacatactctcagtctagtgcctcccatctccttggtgaaagctgcagcaaaaggtcagaaaaagcttggaagcaaagacacatcgttagcaccttcagcacacagggaggaggccccactggctagaaactggagaacagccaagatggtcctgttaaaacctgagtcagatcaggtcccttctgggttcagaagcttccagcagctcccaactcactcagagtaagtaaagcccaagttttcaccacaatctttaatgccctacagctaggtacagcatttaccccaaaccatatctaaggagaaaagctccctcaatatagtggggagaatctatcattgagattccttggcagaaaggagagaacaaagtcaggtggtgctcttcaaaacagatgaccaaaaacagtaaagatttatcttcatagcagtgaaaatctctaagtttcttttcttccaaagcaatt

SEQ ID NO: 315864 - DNA, 4001 bp, Homo sapiens
tcccagatcagcttggcctttgtccatatcaggctccctggcgtgtgggaagggttgggggtggggcaggaagtctaagcacaggctctgagccaaggccctactcctctcccccaccccagactatttataaccctgggagtcattaggccatcccacccccatctcttagaaatgaggagtggggcaggaacatggctggggtctcccatcatcctgggatcggcttgggctctgcctcccaccttagccagaaaaggcagttaatagaaggcagcagctcaaatctaggttggaaaggatacaggggacaaggccacatcctgggcacccatgtaaaaattacagctcttgttcagtctctgagggtaagggactaagtcaggaaataataaaaggtgttagggtacctgaagtgccttccttgggaggccactcacctctctccacagttgcaacccccatggctgcttgagggagggtggcccgacgctcccagcggccctcatccatcaggaaggcctctacagcagctaccgggctctggacctcatccacaccacccaccactagcacctgcttgcccagaactaccgcagctgcaccagcccgggcagtgggcaggggtgccagtgccagccatgtgtgcgaggccatgtccagtgtctcagcagtgtccaggggcagtccagcccggccacaaccccccaacaccagcaggtgcccatcttggtgtgccactgtgccatagacccggcaagtgggcatgggggggaacacttgccaagcaaaggcccggccacctcctgcagacatggtgttcactgccagtggcaggccatgctgtctgctcagactgtaggcctcactggggaggcatgacagggcctcatcttgattctgccagggccacaagaggtatatgaccagtccagggaccttgccttcacctggaggaaagagggaaaacaggggtcagggcactgaccggcccctcaggaaacaaataagcagcctgtagctaagggcagggctggcccaaaatcactggtgggaaaggcagggggagaacccaacccctctggctagcacaccactgtggaggccctcctggagtgggaaggagggcaggccccaggtacccaggagcctttcccctttcccatggaggcatgaaggattctccttctcacccactacccaaaccactcagcaactgggtcaaatctgggtctaggagggcagtagtaaggtgactagaacaggactctccatccaggacccttcctttcccctcaacaagcctcacgctggtcctgcatgaggggagtccttactggcttccagggtgccctgggcagcctgggggtccccacgcctgctgtcaggggtcagactccagagtatccttacaacatcctgggggccattccacagggttaatttaaaccattcccactagtaaaagaccagagtcagggtgtgtttcagactagggggaggactaaacaccagggttccacactctcctctcgaggtcccccctcaggagtttgcccattccaaacccccccagaagccagattccctggtgtccagaagtggggttggggcggggggccgttggagaaatctcatgaccacaggactccagggtctgagtccagggcgtttccaccaggaatgggcagctggacttctgggttccctcgcaggagatccccaagttctccagccacccctttctcttggtggctacactcctggacccctggcaggagggcctcttggccccaaacttccagctcaaggatgtggggggcgggtctgggctaacgcgcttggggttctacaccccgcgccccaaacttcccctgagcgcggttcccgcgggactcacccgccggtgctccgatgctgccagggtacggggtccgccgttccgcctccgttgacgcgggatctggctggggctgaagtcgggctctggcggggctccggcactgctccggcgcggggcggggctgggccaggtccgcccctcgcccccctccccctccgactcagggaaacctcctctcgccttaaccctgcacatgccgcagctggagcagggcgtgccgatctacggtcatatgcaaacggacagataaacggacacttggacactgggcctgacagaatttagcgtccgacctcgggcaagagtagaaatgaggcagcggcgagcgacacaacacgtgtatggcaaggggcagttctgagcccgacccagcctgggtgcgcaggctgtgtcgagcaggccagccgaacccgagggcttgaggggccggcgcctgcccacctccgcggagctcccaggagcccaattacaggcttcccggcggcgccccctggaggccactggggacatggcctgggcctctgtcgtgtgggggcagcctggggcgcccttacctgggcataaagcaggaataggtcttacagtgtacactgaggctagcgggggtggaggaacagaaggcactggcccttctacaaacctgggtggggagaattcctggaaggagtgatactgagcagagaatgtgctggaagagtcagaggccaggggacctcccagtgggtcactctggcctcatcctgtagggcctgagagacctgggctactctgggacccaaggcacattataactatcaatttttagtatcctgagcttgcctctaaccaattctggggtcaagcaagagcaaactagtgtgacaggggcccacctacctcaggcccagaccttggccctgcctatcttctgagcattcagagtattagctaagtcttcaagctgagggcccatttgtacaggtcagtggtacctgtgggaagaggtccttgcagttgtctgtgtctgctcactgccttgtccccctttcatggacagtgcttatcttagtttcccccaaagcagacctggacaaagatatacatgcatatagttagtatgggaggtgaggccaagaaacaccagcagtggcaaggagacaaggaaagcagccaataaaggaagtgtcatcaagcaagctaccactgtgggccattgggaccaaatcctgctggggattctgggagccagcgtagaacataggccttacatcattgctgcccccaagaacaaggggagctgagatactcattctcaaatctccattagtcatgggttgagagctgtttgggggcattacctattaactccctggcctccctcacatctggccttcccagaagtctatgggtagaccctcccgcatgaccggagaagagagcctttgctcttttcagggactgtcagttggattcagtcggcctgcacagaaatggtggtgccaaggctggttacagactgcacagaccctgacttgaaggcctcaatcctccttgtcccacttcaccttggacttgctcctcagtgccctcacttggggcactgtttccaccctcttgtgattgccaataggcttccaagaggctcacactgctctgcagcccccttcacatttgctactgttccctttccaagctccctcctcctcctttccagcaattaaacacttacaagccacttgcctttagatacctcccaacaccccaagtctctctagtctccccttcctccactccagtcaaactcttgaagccatctgtcctcacaggctccacctccttgttacttgtcacctcaatgtgctgccactcctccccaaaaattgttcttggaaaagtcatcatgaaataccatatagctaaaactatatgtgcctgtggtccttaactaaatcttgctagcatcttcaaagttttgccccttgtgacctcaactccctcctgctgtttgtcctgcctctgagaatctttattttttatctatttattttttttttgagacggagtcttgctctgtcactcaggctggagtgcagtggtgccatctccactcactgcaagc

SEQ ID NO: 315865 - DNA, 4001 bp, Homo sapiens
tctcaaaaaaataaaaataaaagcaaaaaaaccgaggcttacagagattaagtaacttgctcaaggttacaactaggattttaatccaaatccttctgctttcaaagccatactcaaccatcctactctaccatctccagaggtctgactcaactatgttgcagaagaaaagtttccttaaccatgtagaaaataagaagagcaggctgggcgcggtgactcacgcgtgtaattctagcactttgggaggccgagacaggcagactgctgaagctcaggagttcgagaccagcctgagcaacatggtgaaaccctgtctctactaaaaatagaaaaaattagccaggggtagtggtgcgcgcctgtagtcccagctgctggggaggctgaggcaggagaatcgcttgaacccaggagagagagtttcagtgagccaagatagcgccactgcactccagcctgggcaacagaacgagactccgtctcaaaaaaaaaaaaaaaaagaaaaaagaaaagaagagcaaaagaatctctgcatagttttattttttcttttatttatttatttgtgtgtgtgtgtgtgtgtgagagagacagagagaaataggagaaataggatcttgctgtgttgcccaggctggagtgcagtggtgtgattacaactcactgcaggcttgacctcctaggctcaagcgatcctcccacctcaccctcctgagtagctgggactacgggcacaggctaccatgcccagacaattttttattatttgtagagacagggtctccctacatagcccaggctggtctccaattcccccactcaagtgatcctctcgcctctcaaagtgctgggattacaggtgtgagccaccatgcctgccctgtttgttttttaaacagggatcacgcacagatgctgagagctttccagctaaagcccaacagggagccccactgatcatctccccaaccggacgtctccacatggttcggtggcttggccaggcagcagcacagcatgcctcttcctcatgaaaagacccaggcacaggagggaggctggctctagcgaccagaatgctggtggggaacaggtggttaagatatctttccctcttaatatcagtcagcatccctctccccacgcggccagcaggcccagccccggggacctttgtggtggtgagtggtgccttccagtatggggcagggtggcttcccacctcaaaaattttccagagaagattttaaaagctcttaagagacaaagtagtaattcaacaattaagggcaatgattcctaaggagaagccttctcttctagaacagcacagccaagttcgacaggcacaaagaaatatctgtagtgacaagagaaggttcttcagtggtgcccatcagcatgtggagccggccaccgcccctgcctccatagaaggtaagtccattttctcttgtctgcatgacagaaaaaggaggctgtcacccgtgtctcccactccaagggcctaagcggcgcacctctcaacctttcctttcaagggctgaaaggttgtcctcttcctctccccactcggccccgatccccttttgctcggcacctctctccccactactcggcccccctcacacctcttctccccacccctctccctgctagacctctctttctctgtcccccgcccctttttactccccgctcgaccccttttccctcagcccgctgccgcccagtccgcggtaccttgagggtcacgtcgcacagcttgccctgccgccggatctcctccatgacgccgtagccgcgactaggcaactcagacacggagaagtgcaccagatcctccagctcctccgcgccgtcctccaccatcttccccggccgctgcaactgcgcaggcctcgccggccggctagacactaaccagggcggggcgatagcgcacgccgacagccgctcggagcgcggagcagcaatcggacgggcctccgcggccgccgtagttgaatctcctcggcgccggaagccccgccactccgcttcctggttcatgtgcggccttcgttccctcgctatctcgaccttgacttcgcatgtgcatccgccgaagtctttctagatcaatcggccccatctctcgtcttcccgattcggccatgacctcacccgtatcctcgacgtaggacctcggacttcatttccgccaccccgacacttccggaatccccggaagcgacccgttgccatggcgactatgtacacagccaggcagccccgcgtggggagtgcaggtggtttcggttgcggcagtcgcgtcccgggagcgtcgctgcctggtgaacggtgagcaggggctgctcgccggtgggagtggggagacgggaaaagggtgtgcgcccggactgctgaaagtggctggggtccaaaaaccgctttatctgggggttcccagctgggtcgctcatctctgaaacccaggcgaaggagggctcgacgtcgcgggagtcctttcaacctgaccgcggcttacggtcttcggagctaatgttcattggtcccacaaaggggtcccacgtcgcgtccaggacatagaggccgtgaggcagggagccagaggtcgtctggactcttccgtactagtcagttttcgaactagagggggctttgggatcaccagtcggagcccttcgtgttacaggtgaggaaacctctccagagagggaccggaatgggtccaaagcccactgccgcccaggctccacgcgggggtccggcacattgggtgagaaaaaggagaaagtctagttttgcctgcatcctagtcttgttcagccaaggccaggtgcagttggacccagtgttttggattcgggtgttggtgctgccgctacgggtagctatgagggttccccatgacagcccctcatctggacgggagcactggaagatagggacccacctggtgccttccaccccaccaaacgctccctttcctcttgtctagtcttcatggctgcttgttgccaattctgttcattcccactaaagacaaatgaggaaacctcgagcgccttaacacagaagtctcctggtggccattcagagacttgctttgttataccagaaatatcaaagggtggttccccaaggagagacattccccacaaggtcctgagggagaaagggagggggccgggcgccgtggctcacgcctgtaatcctagcactttgggaggctgaggtgagcggattgcttgagctcaggagttcaagaccagcctgggcaacatggcgaaaccctgtctctacgaaaaatacaaaaattacccgggcgtggtggtgcacgcctgtagtcctagctacttgcggggctgaggtgggaggatcgcttgaacccaggatgtggaggctacggtgaaccgagattgtttcactgcactccagcctaggtgacagagtgagaccctgtcacaaaaacaaataaacaaaaaacaaaaacaaaaacaaaaaaagcgtgtggtgaggtgctggatgtggatttttgcacctggaaaccaagtgtcctcctggaagggctgtgggctttggttggagttgtcatggaaggggagtgacatcatatgccccttgggactctctcagtagtgactgaagatagacccacatatgaagattcagctgccctctgacttccagccattaccatcaccaaccaccgccatttcctgaatacctactctgtgctgggctctgccctggacattgtgaggggattcaaaagagataaaaagcacaatccttgccttcaagcagcttgtaatttaattttgggaactgaaacccactcaaatgaagcgacgtaagaatggtaacaagcagtatttcagtaagtgcaagatggcatggggtccctaaatgtttgggtgttaaagggctgctgagtagcaggctcacaagacgggtgtgcaaaggaagactttattgcaggtggatatggc

SEQ ID NO: 315866 - DNA, 4001 bp, Homo sapiens
ttcctatatctgcagaagaaaatctgacaaaacgcaaataccctattaactcaagcgattagaaaaaccattttcaacacactatggctaaaaatgattggtcttgaagattttattaccgtcagcttaatgtacaattttaaaacgacacagtcgcaacccacttctcaaacattttgaattaccacgggaattaaaacatagaagtgtgtgacctagaatccctcaaacaaggaaaacaactcatccgagccgagtatggaagaatctttactttttaggggagtatcttcaaactatcttttttaaatagtagaaatctgcttttaaatctcagccaacaacaagcagattttaaatctattttacaaccctaataaaaaccaacctcttagctggtggacccagtctgtagctgcaaatacaaagacgtgatttttgaaaagctgcccacaagagcaagtgattaatcattaaaatccactaaaatcaattgtgaacagccactgcctcaggggtgaccgtggggccccctaagatgtggcactgtgatctatatttagctatctaaacacgtttacagaactggcaacaacgtgttcgcaggacttcctgcgaaccacccggcagataacgcgacactagttaaagggtgttaattttccggtcctcggagggcaggccacggtagccgatctctgcgtgcccagaactgcctgcaggatcaggcagcagcagcggcggcggcggccaccgaggctaccagccgcccgcagcaggggcgggagcgcgcgcctcccgcacccgcgccacccggctccactcgggccgcagctgcaaaagcagcgacagcgcgcgctcccgcgcgtcctccagatcaccttcaagggggcgggaagaatggcccagggcaggcccacctagtgacaataaaaactcgccaataaaaactcgaactctccctcgggtaccgcccacaagctgccgcaggcgcccaatccccgccgcgttaacagtcttcacccggggtgtccagaacttgagggcgggtccattaggaactaaattaagaaactgagtcctggagtggtaagaaggtggggaggttaggcggggactgcgccggcggaacgcccgctcccccgcccgccccggctccccggggacggccgcagcgggccgggtgtcgcgatcgtggtaaacaaaggctcgcaggggacgggggcgggggtaacggtcaggtgacagtgccgagtgcatttcgcaatcgctttaatggggcttcacgggcccgcggccctggggaccccaccttgaccccgtcattcctcccggacagaaccgacggtcgtcccaccaaacaagaaggctggatttgaggcggtcgcactcccccgggcttcctgaaataaaaagcagcgccccgttcgcagcccatcggcaacaagcagcacccgtctgcccagccgcctcccccggcggcgcccggccccgcggcgactagcctaccgcacctgcggctacccccagtcccggcaaccaccccgccctagccaggccgcaccagccgcgccgcggttccgggccgtagtgccaggaggcgcgcgcgccctccctcagggctgtagctaccaagcgggggaggaagaccccccaggtgaaccctggaggcccctcgcctcagaaaggggccctgtagcccagctgcagcctctccgcagaccgccagtctggctctgagaggccggccgccgctggctgccctcccgcagacaccccggtggtcaggaccgccgtcgcccctccgcccccgaggactcagactctgaccggttcctcgcctttcggccggtcccggagctgtcacccccggtacctctcggcgaacactggaagcagccagcagtggctaaccccgcggtccctcagcggcgggcggcgcagcgcactctccagcgccggcgtctcctccagccaccagtctctgccgcagctcacaacaaaggaaacatgtgaccgtccgggccaaaacactgagcgtcagcgaaccctggccaatccgggtgggcgtcctccgccccggggaaccctgggagatgtagttcacgcttcccggtggcctccggggccacctggggctcccgccgtggggtgggtgtcgggtgcccaagaggacgagacccacccaaagggctgctgactcaaaaacaccttgttttaagcagagacagttaaaaaaatgcctcttgtgtaaggagccgagtgagaagccagagtcgtttctttccttccctcaaaggcccctgccacgtcccaaggaaaaagcccgcgatcagcccttcgactttaaagcttgggtcgaagcttagagagctttttatttgaccctttgatagacaatcggaaatcaggcctgagggcctgcagggtggacgagactaaaaccccagtccttagaaggagcaaggaaaaccacctctttttttttgataaagctgttactgtccctggtatcaaatcctaggttacctttttattttaaacgcacatgcacgtcgaccaaagctgtcacaaatccctgttttccaaggtagatggagttcctaaaggacattgtgttgtcgttttgtgtctgcaagctttttgttttgtttcgttttgagacagagtttcgctctgccactcagggtggagtgcagtggcgcaatctcggcccactgcaacctctgcctcccgggttcaggcgattctcccgccttagcctcccgagtagctgagactacaggtgcccgccaccacgcccaggtaatgttttgtatttttagtagaggctgtgttagccaggctggtctcgaacttctggcctcaagtgatccgcctgccttggcctcccacagtgctaggattacaggcatgagccactgcgccccgcctgcaggtattcttttaaaggatgattgcaaccatttaactagtttttggtttctgataccaaatttaaaaatctctatcttctacatgtcatgaataccgtcatgcctctattaaattaggcgttgtgttctgatgaccagaggcggaaataatatggaaggcctatatacaggccttttaaacatactttttaggcctcttttccatctcttattcaattatttgagctatttcttctggtatttatatatttccaaataatgtatgactatttcctattaaggaagctatccttctcataatctggttaaatcattaatgtttacgctaatgagaccatgtatttattattcattgttgagacaaatcgtatacaatttcccatcttgtatggcttttggttttccttggagttttaataattatcctctttctttgcttattttattatggatctatcacaatgtcctcttagtttttctaaaacgataaaatgctttcaatacaactccatataatcaaacccatcagataatccatcgtgtgtgtatgtgtgtgtgtgtgtgtgtgtgtgtgtgtgtgtgtgtgtgtatctgtacttttttcttagagtcattggtccgcagttccaatgactgtttgggaagcttgcttctctgtcttgggtcttcccttctccagcatcctagcattttcttctgtgatttcgagcattgcctcatattttggtagagcacattcctcttaaatagcttcctaagaaaaggtccatgagaagtaaatatttttgaacttttcatgtctaaaaatatcatcactctattttacctttgaatgatgatgttgcctaatcatacaatctagattataaattatatttattcgggatttcgaagatactgctttattaacacctagattctggtattgctgtcgagaagtacaatgctgttcttacactgattttttatatttgttgatgtatgcttaataattcccgctcctcaggaggtagctgctgaataggttcacgtggtcttctcttagcagctccttatgagcacccc

SEQ ID NO: 315867 - DNA, 4001 bp, Homo sapiens
agtagctggtgaagctgccctcatcccccagtgcaaccgtaaggcctgtgagcttaaccctggcaccaagcgcctgtcacccctcttgctgatcaggcctccctgagcacaccactcaccaggctcagccccagttctatcccttgcttaccgttccttggccggaaacactgccatcttccccttcacatctccaaatcccaccccactggcaaggctcaaacttatatggccagtctccaggaaactgtctctgccctttgagatctcacagtcacaccccaactcagacctggcactccactctgctgatacctcctgggcctcagtttcctcatctgtacaatgggaggaccatacaggattgttcctttgtctgggacactgctgtgagctccgggcctggccttcacgcagaggccctgcccaggatcctcacaccgaccttgctgctccttactgtgccccaccccaacccctgtgcagggccagggcctccaacatatgccaacttggggctaccacacccctgaaattaagataccaaagttatgctgctttttggcagctgcctattgactgtcttcaaccttcaagtaggtggctatcagtcaacctccccagtctacatctcaccctagacccagtggcattcacttgtgtagacacaagccccttctgggccccaagactgtccacagtgcctagagcccagcattagctggcggctcccaaggctggtcaggcacctgcaggaagtatgcgctcatggggtcctctttgttgtcttcgttgtagaagaggcctccagccacgaagacctggttctccttggtaaccaggctgacgtggttcttggggacctggttggagagggaagcacagtagcactcgttggctgctggatcgtaggccacagcgccctcctcactgatcatgaagatgagatcctgcaggaacatgccgaagcgcagggtgtcattgaggatcccaggaaggatacgttcggcctcctcatcctcctctgctttggctttgcttgtgcccttatcagcctccttggccccggctccatccttccccttctttttcttccgcagcgtggtgatgcggccctcgtgtgcatccttcaccatctgcaccttgcgcagcaactcgggctgggcacgcacgagagggtggcgctccacgcggctttccagaaaggcgcgcggcagcaagcggcagcgcacgctctcgaagacggtgggcagcgcgcgctggcgctcagcctgcgcctcggcgtcgccgctacccgcccaccgcatcaccgcctcgaacactgcctcctccttctccacgttaaggccgtcgctggagatgatggcgatgagctcgtcggccgagagtccgaggaagtcagcgtcgcgcgccaccagcgtgaagtgagcgcagatgaagtcgcgggcagccacggcgagacgcgcgcagtcgagcaggaggccgagacggaagacggccaagcagttggagaggcacaggcgcttctgcaggaaggacacgcagatggtgaagatggaagggatctggaagcggtgtgccgcggcgaacaaatcctgcacgctcgcctcatccagcgcgatctctgatgtgtacaggtagtgcagcacctgggccaccacgtccggggacacctcctccaggtgcagctcgcccgcgcgctccggctcggctagaaagcgcgcccggaagtaggggctgcaggcggccagcaccaggcgatggcacgggaactcgcgctcgcccgcccgcaccacacagtcgaggaacttgccatggtccagcatgtctttgagcccgtcttgcaggagcgtctgctggtacaaccgctgctcctccgcctgctccaagcccagcgccatggtgggtggcctagggtgcggtggcggtgccaagggggctcctctctgtacccctgctttcctgctggggtttgcttagactgagcagctgtcttcgaggggctatatatagaggtggccgggtccctgtaaggcgagccgcctggcctcctgcacatgacgcacaggggacagctgggcagaggccccctcccagagaaagacttgactcagccccgggggcttatgggacgggggtggggtgtctgggcccttctgaaagatgagggcctggctgcctcatttctaaatggagcacggagaggtcttgactctggattctttggtcaggagatgcccctaggggagaaggtggcctaagctctgaccctcagtccagagacgggaaagcactggagcctctcttccagggtctcccttccttcatgctttctgggaacttctgtcctggtgcctccatcttcccccccggaatatgtctcactccagctacccctggatacagggtgcttgggttttctggtcagaagttggacatggtgttcactttttggcggccctgttgccctgcctttattttaagaggcagggtctcactatgttgtccagcctggacttgaactcctgggatcaagccattcttctgcctcagcctccctcgtagctgagattacagacataagacaccacccccgttgcctcacctttaaaatgggaagagcttttcctctttctgtccctcctccttgcaagaaagcaagaaggtaccttaggtaaacaaggttgccactttcctatgaggcctggggcagggcatgtcgctctgttaagccacagtttcccttcctacacaatgaggaggtggcaaagttagatgctaaggacctcagttcaactctgctggaagtttagaagcaccaaggtactgtgtcctgggagtacactattagttttaacacttctaaggtgtcagatgtgctagcaaattaatttcttaggattctactattctaggtttttaaacccccggggttttaacattctagggagtgacattctgaattctagtgttcaaaaagtaacactacaagtttaatatttcaggactttagctatctatactcactattcttggtgcatattaggccagacctgagactgcctggccatggggcccctgcaccttgtctatggtctgagggaccagggttgaagcccaggacagccagtcttgatgcctaccttgttctagactactgacacccctccccacaccctccccaccccgccccaccaccagacacacacacacacacacacacacacacatcagcctcagtcaccaagattaacttgttcccaaagtgccagaggctgcagctgtgtgttaaatttagcccccaggacattggaatgaactattatgagacacacccccatcattcctctgagtcacttgtttataacgtcaggcgggggagtgggggagggggtgggtataggagagatgacagcaggctgggctaggactgagtcacctcccttttgtgatctcagcaatatcactctctgtcccttttgtttttagacggagtttcgctcttgttgctcaggctggagtgcaatggcgcaatctcagctcactgcaacctccgcctccagggttcaagcaattctcctgcctaagccttcctagtagctaggattacaggcgctgaccaccactcccggctaattttttttttttttttttttttttggatttttagtagagacgaggtttcaccatgttggccaggctggtcttaaacttccgacctcaggtgatccgcccgcctcggcctcccaaagtgctgggattacaggcgtgagccaccgcgcctggcctctgtcccttttaaatggtgcatctgatcatcacttgctcaccccaccagcaggtcccagagggacacagcacctgagcaagctctggaggtggtcctgtccctcttgctgaaaaggcaagggctcactcagggagggcaggtggtgagcttccagcccagccctggactgcagggcattgctagcaagcacagccagtgaggagacgaggct

SEQ ID NO: 315868 - DNA, 4001 bp, Homo sapiens
agaacatacccagtccctgctccagcaatgaccagatatataatgctgagttttcatttcctcatctgtgaaatatcagccaccttcatcatgctgttacaaaaataaaatcagataactatgtctgtctggcacacagcagccactgcttccctcaaacccagatatccccttgtcttatcaacacaggagacctaatgagtcccacagcaacctgctgatcctgctctatgaattacaaagaaacgtttccccccaagcacctcaaaaaaaaaaaaaagaaagaaagaaaacgctttccataatactttcataggttaatcgttttcaatttcctcagccagaatcaagagttaagaagaatctcattaagaagaattctaagggtatttcttttcaagttcccaaatactttcttcattatccacattgcccttgcaggctggttcccccatgtccatgctgatatggagaacactggatcaggtgtattcactgggttcccagcgctataaaattcctaccccagggacgtgctcatgggaaacactcaataagtcatccttagctgaatcaagcagaatcagaaaaagaattccaagaaagatatattgagcatctacttactatatgctagacactgtgtaggacccttttcacgctcttgtttaattatgacagccctgaaaggtgatcatcattgtgctcaccttacagatgatgaaacagacattcagagcactttgtgacttgcctaaagtttcactgtcaagaaggaaccaagtctcctgacttcaggccttcccactatgagatcaccagtttatcgtaactagaggcctctcccatctaaagcatctttgtaactgctttccctttccccacactgcctacacataaagaagcccctaatttgtaacaagtcatttgacaactccagaagaggggccacatcctttttctctatgtctgttgattaacaaagacaacattatgtttccaacaccagtcagaccaagggggaaaaaagtccccatgacttcagtaattttccatcctttggaacaaggaaatatacacaaaaggtttactatagaatgtaagcattgcttttaaatgatgccaatctctcttttaatgtggcctaaatcctaaaatttaaagtgtgataagccgggcgcagcgtctcacacctgtaatgccagcactttgggaggcggaggcgggtggatcacctgaggtcgggagttcaagaccaacctgaccaacatggagaaaccccatctctattgaaaatacaaaattatccgggtgttgtggtgcatgcctgcaaatcccagctactcgggaggctgaggcaggagaatcgcttgaacccaggaggcagaggttgcggtgaaccgagattgcgccattgcactccagcctgggcaacaaaagcaaaactccgtctcaaaaataaataaataaataaataataaaataaagtgtgatagtgtcctttcttatattttaagtagacacacaagccttaatatatatgtaaaccataaatatcatggccaactgttcaagattgggctctcacactaacacacctcttccttgcaacttgcacccaatttgactctggtcctaggcatgctgacctgaaatagttgctggctgcggcaagcaccacgcggtggcaggagaattcctgaatgtccacacacaagatgacatctgtcagagcgttttccattcgcagggtttccaggccattctgaagaattaaggagagtcccgcgtcgtcaaatttgaccttttccccatttaagatctcgaccaagtctcctgttttctgggagggctcatctgtagaaggtgccaggggcccttccaaactcttctcgaccacatcacccatggtccaggcgcccctttgtcctgccatcaacatcgagactgaaggagcgcccaagtgtcaggcaggccccattgcaggagctgagcggatttcctgtgcagggccctccacttatcaccagctgtcacacacacataacaggaagtctcgcactttctcatcctgttactacaaatgccagcaacttctattcttcttctttctgtgagtaatcacagggttagaaattacttagaataggtgtgtgggagggggttctggaagaggagtgtcctctcagagtccactgtgagtgctgtgtgtttattttggtgcatctcccacctcatatccgtgagcaggaagcctccggtggtggctgttacatttgtactcctaatgctatcaataacccaagtcgtcaatgaggggatggacaggagacagtctataatcctcctgcttcacatttgtactcctagtggctcaataacccaagtcgtcagcgaggggatggacaggagacagtctatgatcctcccacttcctcctcccaggagtctgagaccccacaatgatccaacaaccgtgctttgtaaaccatggaaaccccacttatccctgacattctcatttctggcggcactgcagatcgtctatcttcatcctcctccctacccaggggaaaacaacgtcatggcaaactttcatgtcttcccccaccaaaaaaaatgtctattgtttcgaatatgctttgggggcacagaagaaatggtttccaaaactccatcaacagcatcttctcagaggatgagtcagggtgggtctacaccgaattgccatagcacgtctcagattagcccaacatctactgaccgtgcatctaacggtggatcctgaagtattttcattacctctgcatgtctcagttaagtagtaataactgtcattattaaaatcccatgatatcctggggaagttataggagcgtatcagttagcgttctctcacgcccaacagtaatgctttaccaggttgctaggtatttcttagcccagcaaacttgacatctaaaattaaccattacaattacagtcatacccagcataatgatatttcagtcgatgatggactccagagagacagaaccaaaaggatacctagagaggcatagcagagggaaattattaggggaattggctcacgtgattatggagactgagaagtcgcatgacagactgctgagagctcagttcaagtccaaaggcctcagaaccagagaagatggtataactctcagtccaaagccaaaggcctgagaatccagggggtggggagactggtgtaagtcctgaagtccaaaggcaggggatcctggagtcctgttgttcaaggcaggagatgactgtatcccagcctcaggagatagagacatcgacctttcttctgtttttgttttctctgggcccctggctgattggatggtgcccacccacactgagagtgtatcttctctaccgagtccactcagactcactaatctctcctggaaacaacctcacagacacgccccatggtaatgctttaacaggttgctaggtatttcttagcccagtaaacttgacatctaaaattaacggtcacaagtacagtcatgcccagcacaatgacatttcaatcgatgatggactgaatatacaattgtggtcccaaaagattataatggagcatataaagaaacctgacggccgggcgtggtggctcatgcctgtaatcccagcactttgggagaccaaggcagggggatcacaaggtcaggagctcaagaccagcctgagcaacatggtgaaacccccatctctactaaaaatacaaaaattagccagtcgcggtggcgtacacctgtaatcccagctacttgggaggctgaggaaggagaatcgcttgaacccgggaggtggaggttgcagtgagctgagattgtgccattgcactccagcctgggcaataagagcgaaactctgcctcaaaaaaaaaaaaaaagtcatggaaaaataatgccattcacaatggtaataaaacatatgtaaatgcctagcaataacagcaacca

SEQ ID NO: 315869 - DNA, 4001 bp, Homo sapiens
tggtttattttgtttcctactttttcttttttaaacagctttattgagatataatttacatgccataaaatttacccactaaaggcatacaatttaatgttttttagtatatttacaaccatacccacaatctattgggtaccacaccaccaataaactgttgcttgagatcaccatgaagcagaatttctcacatgactgtactagattatgaaagaaaatggctcgattttactttcagaaaaaataacatgtccactgtgtttattttcctttatccccatgttgtcacatggctagtttttttttttctgctaaagtaaccaattgcttgacattcccagagatatagtcttttatagtgaaatttgtttaaacatactcttgaaagattggtatttctttgaaccatgcatcctgccaggatttgtctcctgctggagtgcatcattgcaataatatcaaaaactaactaaaacgttgctgttaaacccagtacattcagccatacagacttctgtctaattccgtagaatcacattaacctcattcctcactcctcttagacatgccccatgaagtaccccctcccattaaaggtttggagttctatagtttttagcctagggccagagacccagtgaattcttttgctgcagtctaactaaattcctaaattctccctctctacttggtcctgttgagatttctccatctacttttgtttcatttcaccctagattctacttctctgatcatccaggaagccaacctgcctgaggacgagtcatactctgtcctcccaccccaggccagagagtggtatctgtctttccacaagttgtaagcttctacctttgatgatcacatatttggtagtgcgtgatggtggtgggtggtgggtggcggtggtggtgggtggtgaggggtggtagtggtggtgggtggtggtgggtggtggtggtggtgggtggtgggtggtggtgggtggtggtggtggtgggtggtgggtggtaggtggtgggtgatggtggtgggtggtgggtggtgggtggtggtgggtggtgggtgatggtggtgggtggtgggtggtggtggttgggtggtggtggtggatggtggtggtggtgggtgatggtggtgggtggtgggtggcggtggtggtgggtggtgaggggtggtagtggtggtgggtggtggttggtggtggtggatggtggtggttggtggtggtgggtggtgggtggtgggtgatggtggtgggtgatggtggcgagtggtggtgggtggtgggtgatggtggtgggtggtggtgggtgatgatggtgggtggtggtgggtggtgggtggtgggtgatggtggtgggtggtggtgggtggtgggtggtggtggatggtggtggtggtggtgggtggtggtggtggttgtggtggtggtggtgggtgatggtggtgggtggtgggtggtggtggtgggtgctggtggtggtatgtgtgtgtgtgtgtgaggcctggactcctagtgatagtacaaatcccaagtgacttcaaggttaaacacaattcactcaccgtcttagtggcttcagttatgcggtacaatacaaactggttgttactttggttttgactgttatatttcttcagagcagcatccacagctttaaataaatccttgtcattgcagtcaatttcctcggactgtgattcctgggttaaacttagtagcagcctggagcagaggaaaaggatggtaattagtttcatgatctaacaatctccctctaggagctgagggatggtttcaccaagaatcaagagccaactgggatactgaatttgacaatctccagcctcttgtttcttctgtcctcctctctgcctcagaactcagggcactggttggattcctgctgccagacgctagttgccttgttcccaaaggttaaatggctctgctgggttatccaaacatatttacagctagaacattgcaacactggggttgttaacctgctcatttgcatttgaaaatcacgtggcagcacagtgcatatttccaggtgattatacaactttatgtagcaaatcagagcagaatctgatgaaggaggggaaacaagtgcctactaactcggttattcccctgtgacttttgcaaagccatttttgaaggtcactacatgggtaaacaatgcaagaatgagtacaatgtgcagacacatttcatacaaagtttctttgcaggatacctacctgcatagaagcagactgctgttaattctattacatgcctaagaagctcatgcacaggggcatccagtgagttccaggagtcccatgcaggacattggcacaactgaaaataaaatatgggcgtcctatctgctctctggacaggccagcctttctctgctcagttgcattagttctgtaaaagaaaattgctcccagggtggagatagaggaaaagcataggaagggatgggttgagtgaagccctggattccctatgcttgcttctttctggtttggtgttgttggtttggcacagaaaaagatagccccaaatatggctctttggcatgccgagtactttgaactgaaagacattaaaaaggctgcaaaagcaaagtctctttcttgctttctcctgcccgtctttctcctgctccacttctctcaaggcaggccacagaagctagaatttctcttccccaaggcgggtcatagaacccttctccctcaaagccagcaataaaactttattattcttattttcctcacatcaacacagagtggggaaactatattacagaatggtccccacctgtagaccaacattggaaaactacagttgataatctcagcagaagtgtgaggcttgatggtatcaacatccttactccagtaaaaattggccaggcacggtggctcacacctgtaatcccagcactttgggaggctgagatgggtggatcacctgaggtcgggagttcgagaccagcctgaccaacatggagaaaccccatctccactaaaaatacaaaattagccgggcgtagtggcacatgcctgtaatcctagttgctcgggaagctgaggcaggagaattgctggaacccgggaggtggagattgcagtgagctgagattgcgccattgcaatccagcctgggcaacaagagcaaaactctgtccaaaaaaaaaaaaaaaaaaaaaaaattcggcctattcactctgctccttgttcagactttatttttttaaaaagtctgtagagccatgttcatgaggacaaacctaatttttctttttctttcttttttcctttttttttttttgacacaggacatagatgtttggactattttcaatctttttgtttctgataaaaaattatgtaaagaaaatctttgtgctcacctataaaatagaacaaagatttcttggagagatgtaaaacatggttttgcatcttattttatatacacttataaatttcaggttaaatttattcttagattctatgcctaatttttttttttttttttttttttgagacagagtcttgctctgtggcctaggctgcggtgcagtggtgcaatctcagctcattgcacttcccgggttaaagcaattcttctgcctcagcctcccaagtagctgggattacaggggactgccactacgcccagctaatttttgtatttttagaagagacgaggtttcaccatgttggccaggctggtctcgaactcctgacctctagtgatctgcctgccttggcttcccaaagtgctagaattacaggtgtgagccaccgcacccagatgctatgtctaatattaaaagctagcaatgactgagcctcagcactggcgtcctaactacaaggagcacctttaaattcattcaaggttgattgaattggatatgactttacttttctgccaaatcgtattcctccctaattcttggaaaagttttcatactttttat

SEQ ID NO: 315870 - DNA, 4001 bp, Homo sapiens
tgttatgcagtcaatatttgtaatattagctttccctgctacactataaattccatgagaacagggacagtgagttttgatcgcgactatatccccccaagtctagaagatcactctgtaagtattcgctgattgaacggattaaataaagaaaacaacgaaaaagtatgaaaggagagaaataatttaaatggcagtaactttgggttctaaggttgttctcaacaagaactggaagaccttaggtaagttacttaacatttgattgtcaatgctttcatctgtaaaatagaaaaattaacagatacttcagattcaaatgtttttaatatatgtaaagcatttaacacaatacctgaaaaaagaactcaataaatgttaattcctttactttctcttacgtctcatctatccataaaacagtgtcttccaagaatatttcagtaaaaatacaacagaactcattcttactttcctttgaaaaattaaattttcatctctttgatctttaaaaaggagggaaaaataacttgtgtactgctttcaaaatattacaaatgcaaaagctagttaagacaaaaacaatgtcgagaatgagccttgctggtggcatccgcctgtagttccagctagtagggaggatgccttgaggccaggagttccagatcagcccgggaaacaaagcaagactccatctcttaagaaaaaaaaaaacaaaacaggaggggggaaatcacttcatctactaatagagatttttaagcaaccgtttatttaagaaaaaagggtgaaattcaagttaatattacttgacagtacgtttcagaaaaaaaaatactctgcagagctgggtgtggttgcccaagactagtcccagctacttgggaagctgaggcaagaggacagtttgagctcaggagttggagtacagcctgggcaatatagcgagaccccatctctttaaaatacaaacaaaaactcggcaatcgtttgttctgagttgaaaccttaaaaatcaaatattttgaacgctttcatttaaaagtggaacacgacccaatcctaaaacattacttcatgacgacttccttgactccagtcatccttgtttcctcctcccgttttgagcttaatccgatacctcgctgcttccctcgcatcgcacacgcggcgtgcagaccaagttctgtcattgctataattaccacacccccgatcagccgctccaggcccatgttgttatgacatcggtaaactgcagccggccgtctccaccccccgcttcccccacctccctccgggccgccggctccgacccggtctgtaacttgtgaattcccaagacggtccctttttgccagggttagaatttttacacgccacccctgctccttcctgcctctgtcacagcgctctgcgcggcccacccccgcctcccgcccgccgcccggccgcggcgcaggctccgcgctcgcctcctctccgcccgctgcctcggcgccccgcagtccccggcgccgcttacagccccgccgccgcgccacgccgccccgccccgcctagcctcgaccggcgttcccgatggcgatcacaccagggctccccacccccaccctctcctccgccggccttgtggccgttaggacagccgggcccgtgacgcacggacgcggcgcgagcgtccggcccaggaaccccggctctaggccctgccggcacccgccctcgccccagggcctctcctgagtccctccgggactgcccggatctgccggcgggagggggaggggccggggccgcaaggccccagcactcaccaggctcaaggcaaccgatcccggtgccaccgctgaagttagcccctcgctcgcccgcccgccgtgccactcccgcgcacaacctcgaagagctggcccgcgcctcggcggtgctcaccaggcctcgctctccgccgcctcgcaccgagcagcgagactcagctcagccggcgttcgcagtgcgcctgcgtgcgggggccggcccgagcgcctacgcgcgcccctccggcgcttgtcgcagaggctgccgggagacgtagtcttgtaacgctctctcgccggacattcctaatggttagcgcccagcctgtgaagagtcgggggtcggggagggggtctcgctaagaaggaggtttgcagaccatggcaaaggttggagaaagttatatgtacaaacctgtctttgctaagctcttccagggcggatcgatgctcacctctgtatagcttctaagtacctaatacgcgttgatggaatgaatgatggaatgattgaaggctgagggagtattacaaaattagtaggtcagcgcctcgtgtctaaagggctcacatgcagcatgaatgcaggaagcttctggacattccttttttagttatctcccatcccctttgcttgataacgtatgcgtagtatcaaaaataattaagggccgggcgcggtggctcacacctgtaatcccagcaccttgggaggccgaggtgggtggatcacttgaggctaggagttttgagactagcctgggcaacatggcgaaaccccgtctctactaaaaacacaaaaattagcagggggtggtgacgggcgcctgaagtcccagctactcgggaggctgaggtgggagaatcacctgagcccggggttgacggtgagactgcagtgagccgagatcgcgccactacactccagcctgggcaaccggagtgagaccctgcctcaaaaataataataacaataataataataataataatgaaactacatgaaacacatactcgttttactctcaactgctctcaaacgaaaacttggagcaaatgattgctaatgttaaatttcatggaattctttgggggagcaaatggagtagtggcttcaaaagaagaaaaactgaagccagcctagcagggatcacggaatagtagacagatttaaaacacatgccaagaagcaaggtgaaagagatgaggtagattaatacatttataaatgtcccagggaagaggagaggagagaggaccactctacctgaatcctaggttatgcaatgttcatttgtcctggacttctctctgctgcatcagcattctcccgctgatgttgtgtttactaagatcagagttgagtttgagcaagggggctggggaaagggaaggtgtgttcaacaggagagacttaagggcaagtttgcctgaccacagctagactgaagacagatcaccttattccaataaggaactaagactgattattcagagccggtcttcagtctttgggaaagctaatttatttccggttcacccttattcctagctagtccttgatggtcccatccaaaagtctggggtatttactagggcctcttctctttggtgggccttctaagccccatgagacagccataagctcttctccctgtttcagccactgctttcagagtcagcaatcaccttagctttggaaaaatgatggcaaatatcaggctaacctctggtggcttcctttttcttccagaccttgcactcacaaattctcacttccttggtagctcttcagtacattaacgtttttatattttgttcagttgttctctgtagtggaaaggttgattgaaaacaacagtaggccattgctggaagttgaattcctatgtatgttacttttacaaaaatgttatcataccatacatggtgttttataagctactgtctctctgacaatatcattttatagtttgagaaatttgaaagtatagaacagtattttttactgtcacaaacaatgctgctgtgaacattcttgtacatctctactgtgtatagggaaactgctagatcctaggacattgcatctttaaccttactatatgtatcaggcagaaatctaagatggcccccataatctctggtccctggtgttgcctatataatctccaccccttgagtgtaggtgggacctttgac

SEQ ID NO: 315871 - DNA, 4001 bp, Homo sapiens
ctgtcaagcacctaattgctatttttctggattctgtaattttgtggtacttaccagtttttaagttttatcatttgtgattttttctcattctaagtattcatattagtaaaaaacattttcaccacattctttcataaacaagtaaatttactgaaaaatcattgttatttaagaagctcatttttatggcatgcaaattatctcaataaagatgtgacatctttgcattaaaaaaagggatcacaatggtaatatgttaaccttaaaagaaccacagaattaacatccctggacacttagtcgtccctcaaattatgaaacccactaaaacgcttgaactactttaaagataatattaacagctttgtaaaaagcccaaaaaatatctcagtcaagcagactctcaagttcagaaatgccatgggaagttgaagatttcattatgaaaacgtaccgagaacaacataaaaaatactgcttgaccactttccctaaaagctaaactcgtgattaagatgcagaagggaagtattaaatctatttatctaaactcttaaaagctgaagggaagaagtcttctatcaaaaatctcagtggggtgtgtgggtatgcgtgtgtgcatgtgtgtatttaacccatacaccttatgtagacaatctcgggagcagctgtatctaagacaatgaagctttttttttcctttttaaataatcaaacgtgatggtgccattccctagcccaccccatcccccactaccaccaccagcaggtggagggaaaggatactgtagactagaggatgacagctttgtataaccctttagactttatatgtaagaatgcagctggtggtctcctctcaggagggggtaaagagatttgtggacaagctgaaataaggggtatcctttgcctggaagagggcacaccgtgagccacatcttgaatcagctatatccagagtaaaacacaggccgctggaaggcactgttaggatcaccaggatggcctctcacgccgggggtgtttttttcaacggagaagttgtcctgtagtttggatattggggggaggcaggggtaaagcgggagtcgggaagaccagaaaaaatgcctttaagtggagacgcctcgggcctcgctgaggaagttcagagccccactcggtcgccacacgctcaccctcccattcccaccgccctccttcccgcggcgccagacgtcggtgcccgagcgagagccggaatctccgccactgccggggaaggggccgcggcccggccggggcagcaccggccgcacacgcacgcctcctccgcacgcgccgcgcccggcctccccgccgcgcggcccggcccctcgcacccgcgccgggccggctccgccgggcaggcctaggccgcgccggccgtacccgggcacctcgctccccggcggaggcggagcaggcccgacataaacttcccggcgcgctagcagaggcgtcacagacgggccggcccctagcgccattccccgaggcctggaggcggctcccgcccctaatccccacactcggggtcccggcggagaccggccccaggcccacagcccccacccctccggcgtcgtccccgagtttacctccaagtcgcggcctttgttcttgaaattcttgagccgttggttgtccagtttctcgttgtccgccatggccgggccggtgactccttcccccgcccgggccccgcgggatccgccccaaccaacgcgccgcaccgacactcccaggaaccgggccgccgcctgagctgctgtgcccgccgcgccgccgcttccttcctcctctcacctgcctccgccgcggccttctcctctccccgcccgcccccccgccctaaccccagcgcgactgcagctccggcaaagacaactgtggggccgggcggcggcaaggcgacggaatgtgctgccggctgagagggggaggcagcctcgatctgagggccccggcgctgcggccacgcccatcgcctccagcccggctcgcccattggctaaccaggctccggtgcgttcgaccaatcagaaggggcgatggagagccggggcggaaagagcgaacggaaaggggaagcgaacgacgctgggaggagccggctccgggcccggaggggtgcggcgggggcaggcggggaaggaccacgtgccttcggagagaggggttggaagcaatagagaagtagacttaaggggaaaccagcaaggggaaggagaggcccgggaacgcagcagggcgagttgttttgctccactcgtccaggaagccctagatgccgggggttcagggtcgaggctgcgttaaagtaacgttcttttctccccgggcgcgccctgtcttcctgggcattccttgcgctctccgttcgctttgcagagagatctgagcttcgctgtctcccggtcggacgctcgcagctgcgttcccgggctggggctccgtgccgtccagggccgggtctgggggccaggacctgctgggatgacgtgagttgaggaggctcagcggaaagcgacaggaaaggtgggtggaaaaggaaagggcccattagacgaatctgattcatcttctgtgactaagcacccgcaacagttaggaatttaggcagagctggtgatcctgggacaatagcacttcctaggtaattcgtcttaaaaagttaaagaagctgcttgaccacaaagtatgaacttctggagggcggggcccgtggcagctgacagggaatattgtgtgttgagaaaggaaatgagttccaaggataccaaggacaacgttaccagaggcagaaatgacacgagatacaaaagaacgtattcaaaaatttaacaaaacagaaatggaaaattattttaaaatatattgaaatatcaacgaataacacctcaaatgtacagggatatgtaaagcagcaactcgggtcggaagcaaggaatcgaggcgttgggtgtgtttaaacttgacgaggtagggagaagagaccctgatacaaactccttcagaatcgttgactctcggtcctttctagtatatttttttagtagaacaacgtgcagataagtgtttaaaatgcagatcttcctaaggaaacacttttaaaggcaacagaggggaatttttttttaagttaaaatggaagaagttagtgggtttaacagatatgaacaactgagtttcctttgggggagaggcaatgaaaagagccggagtactttagggatcactttggagaggatattgtagtgggggaaaggaaggtaaaaacttaggaagcagagtagtacctttaaagtcgtcagtactttatataccatcaactgggctatggacaacagaagctgtgcctggaaataactcacactgaaggttaacttgaatataaatttagaacagatcttaaatacaaatgatgatgttcattataaactgttattcttcaaagactcatttaactgaagtaacattgtatttgcataccagagcactggtgtttttcaaaatgagtttaggataagaaaattcacttgaaaagctggagtatgtatgtattttgcgccatcatggattttatcataagcagtgttcaagaaaacaaattaccagcgaattcccaccctatgagtaaaagttatcttgtcaacatatcaatagatgaacattttgtacttcttggaatacatttcatggtagctttcatgatgaagtttatagacgtgtctgttatatgtcttcatgtctccagctacaactgagtgtctctgatgattaaacaacaacccgagttttctctctgcagaagactcctaaaaaagagttgtaattagttaccagctgagaaagatgcaatacaaataggaaataaccgcaatttataattttatttatctaaaatctgtcttcctccctagacagtaagctctctgaagtcaagaaccatagttgttttgttcactactgta

SEQ ID NO: 315872 - DNA, 4001 bp, Homo sapiens
cagactttgaaaatagttatcagaaatattttgatgcctccctactactatttttcccctaaatacaagatactcattcagttttataaaggtgtttggagtgggtgatgagaaagaaaacattaccatattaaaagaatccatcaacttcataacatgtcccaaatacttcaagttccaaatgttatagtataaggaaacaaaacaatttcatttctaaactagttccaactctcattctgggtcatttaattagttcatcattaggaagtaagtcttttgcctttcaagagtgaatcatcaatatttatgcattaaagacaacacctgaaatacaaagagctgccaacagttggatcagagatattcaaaaagcatataaacaaacacataaaagtgcatatactcatagaccttaaaaacaacttccgttccaactccatatctgcagtttgctgtaagtcttagggtactgcaacagcatcagacaaaacactataaagccagtgcactgcccctccctccaatgactcttcttagtgaatccagaaagccattcaggaaggtagaggaagctgaaggtgtcagagaaacagctgtcaggagacgccagaaaaggcatcttggaagttaacagggagtccagtaaggagaaatatttatgagtgtaaagagaagtactttaaaagaaaacacaatgtaaacctacacaagtaatgctgctaaattcatggatggtttctgtccaagaaagggtaacaaaagcagtgattcatactaagtaaatagttaacccttgtaattgtggaatctaattctctaaaatcatgatactgtcattgtatcggcagtaaatgtcccttacagtggatacttaataggattagcgtatcaaacaaaaggacttaagcaaaaaggtctgatctgcacagctgacaatctgcgaaagggaaatcatctggaaatagaactacaacagaggtcaccctacaaaacacaaaacactccctatggaagtgtcttcctatggggaaagctaagtggagatgaaacataaataacaagccacattggagaacaaatcacactcccaacatagttgactaatggcagggacatcgaatgttatcctatgaaccttgacaattaaattatgacagtggagtaaaagttcagagaatctaaagaaaagaatataatgaacaatgttaagaggtcaagaaatctttcgacatctccaatcctgtacataggaaactatgttaaacactggacacacattaggtgcatgacggatacgatcagtctttttagatttaacattcttatgagccaatccagatcgcagggctccatattttccaaaatgggacatcctggggacgggtagggaatacaattcggtattctcaaatttttggttgctctacgacagtaacaagtttcaagactggtgtacactatggcaggcgaaaataactgatcaccaactgattttcagggaccaactgaaaacgtggaaactgacaagctgaggggtagggttggggtttccgcatccgggtcaaagacaagggggctggagcgaccgaggggcatgttctgttgatagaagattctggagtgtggacagttaaaactttttgtgggcttcgaagttaacatgcgaatgtgtgtcagtatccgactctgagtgggccacaggctgccctgggtacagggaaacgaggggggtgggagcctgcggccagcgttccaggcctctgccagcgccgcatctcgacgctacagagccaagctcggggatcggcatgaggaccccagtaccagcagtagccacacccgcctccctcggggctgtttcccgtcctcctcagacccgctcaccgtgggctcctggcggcctctgcagcttttcagcaagcagagatggtgggcgccactcgccgatcctcacaaaccaaaacctcgcgcgacaaaaacgaaggcggccccggaagtgcgtcatcacactgactggtgaacccatacactctctggatttctctctaggactcgtggaggaccccacatcttggtgcttccctcctaattcccgtgaggaaaagggcacgctggcgagataggctcttggcgttcctccagagcccagttctgagttgaggcaccttgctcatgacgctgcatcatcgtaccaaccttgaatactggcttccagtgcctttattactgtgctacaataactgcaactacaagtcttacccagaatatgcaagaaaatgtgaatggttatacgttttattgatcttgttaaatttagcatttggattgttatagcataatgaacgaatcacacattatacaaccaggacttctcttgaattgctgtaatgattgcactcctagaatgtgatgtctttcaatgttgctgacgcctctcacttccatacattaccactagcagagaggattagcaatggaccatgggcaaagtgagagcagtcagtttacccaagaaatattcatcccctgtccagcagagcttaacactgtcccaggaaaacagcatgactacatcaatcagaggtaagaaaggatacctatcatgatgaaaaacctgttgaaagcacttagaggaaataggtgtggccaccccagagaacttcctgacatgctgtgccaaagcctgtggagaaggtagagtaactgctttgatgccaacagcgaagggtgtgaagaataagggacatttgcccccacctccattgtccttgggtgttgtgtatcacatgcagtatcactgtaggaagacaaatgagcacaggctgacacaggggcccacacatgcagctcacatctgctgcaggggtttgcagtcgacccctcatagcccagagccctgaattcaccctgtgcctggcataagtgagagccacccaaagtcactgccgttctggtagctcagtctcttttctttatttttcagggtttttaaaagtgtgattctttttgaaaaatcaagaaattcaccttctcacgatgtagaaaactgaaaagtgcatggcctcacccttacaacaacaaaaaacagccagataatctaaaattttctcttgaacacatcagaaagctaagatctgggggcaaacgacttaatctaaaatctgatgtaagacaggcactttcaagaagagatggttgtaagcacttgtttacataggacagatgccattggatgccatgtaagctgttaaggagaaatcagctaaaatgtttaatgagttgctgaggtccaagtgttggctagcctgagaatatagagactacagaactcctgtgaaccacagacacaagcagaatttccacccacttgtatattcttctctatggacatcatcaaatgtgtgcacacacacatacacacatacaattgaaggtaaggcaagaagaatcttatgaaaaccttcccgctagaaaagacatgaatccccatccaggtccttctctcctatttcccctacagaacaaaagccctaagcctctgaggatgaaaaagcaaatcttgtcacccttagggactggttaagatccagtggaactgaagggaataaagagaacaaaaagctctccattcacgaaatagcggtagaattgcatcctggttccagaccatggaggtgtcctacagctgaggatagggcaacatcacttaatagaccccacccttaagtctcagagacacagtgcctacctaagattaaagctgaatcacaacagaaaatgccatcccttctaccaccaccaaaatatcaaatgctgagtcaataagaacagcaatctactgctaaaagaaggataaaaacatggagaaagacccctctctgaggtacaggaatgaagggaaggcctaaaggtaagagtggtgcaaacattgagaaaatctcctttagcaaaccatcccacacactaaacttaaggtaatactagaagaatttgaagcc

SEQ ID NO: 315873 - DNA, 4001 bp, Homo sapiens
ctgcaggctggctttgcctggggtctcctgaatatcatctctgcccaccaggcatcaaaagccatgcacttttcctcttctctgctctggttgtgaataagtgacacagatctctacactgtcattcatagcatcggtgagaaacggccatcagaaaaatatttggagaaaaagttcagcagaaagggcccagccattaggggtctttttttctctgtcatagtcactagtgtgcatacatgagtctggagccatggcgagtttgtgctaggtgttgggcacctctcagggcagtcctgatgcctggtgtttcctgggcttctctgcattctttgccctttctagtgtcagagcctttagaagtgatgtgatcagagaggattgggagtaggggactcgtgggctgacctggaactaggcctcgccacacactggagaaggcattctggactgtggtacatgtattcagagcagtctcatttctatcaagaagttgatgccctctgttgactttctaactacaaataccctgggcaggccatttccccttctcccaagagtaggtctgataactaaagagccaacgaatccaaacaactcctgcttcagtcaggaatcagccctgagactagagcgcctgtcaacatactcagccctctagattctgtttctttcccctgcctgccttcccaagaggttcccagggctctggaggcagctccagcctatgtggctggtagtggcaaggccatccacagcagcattacttaagcaaggcaggtggaaggtggatgttcaatgagcacagaggctctggggacagaagaaccaagggcagagcagcagcaggaattccaaggagctccagagctggaggggaggagagaggcagaagtcattctcctgcatgggctgtcaggcctaactcctaaagaactggcccgcagtccgcctagtgcatcctcacaccagcctcggagacagcttgccatccaggaccctgaggttctctggcttttcaggggcttatttaacctccattatcatccctctgtactccattcacattgtgttctgtcgtctggagaacagagaggcccggatcctgctttccacaatcactctataaacagtcactttattttaccaatctacaacttacaaatttacccagaaagtgtgtaggacaagtaaaattgatggataagttcaagtggagacagcaggtttcaaatcttaccctatccaaacctgcgttccttttacgcctttcatgccttccatctataggaggctgggagaaagtctcaagaaaggagaaactgaggctgtaaattgtgcaaggccacacagggagctccccatctaaaagtctgactcagcccaaaggtttcccagcgtcccctgtgccctgcagtgtgctgtgggggggagcaggcctctgctacccatgagtcagccctgaggctctggccgccttcctccagggtatcttccaatcttgctctacacccgttagggagtggctgggaggaaaaagactcccaggggtgacggaagcacccacaggcctgcacagggagtgaaactggggcaatcacggggctgcgcgttgccacgggactgcgcgttgccacgggacgccggtgccactgcggggaagcgacggcagccatgggggagagggtcgggttcgctgacctcgttcgggggagcaatgggcgccccccggcgggcaggcccttgtggcaaggaggccaaggtgccgggggacccggggacccgggtcgggcgcgcgttacctcctccgcgctgcagcagcgagctcgggttcgcctgctggtctgagagcgtaccctgtgcggcgcgccgcttctccgagtgcacgatcagcagcatgtcgatagatacagcgttgatgtccttcttcagctccatgatgccgcctcctttccgacctgggcgccgcggccgcacgctaggctgcttgcgctgcaaatggccccgtgcgcgcagctgccccacacgggagagggcgagggcgcggaagagggcgctcccccgccgctggagccgcagggcgctgcttttcgctgactctgccaaacacgccattagggcccgcctgggagggcgctaccctaatgaagcggctctaagtcacctttgaaaggaaatccccgggcccaagccttgacctgcaccggggccatagtcagcaggggcggccggtccagagcctccctccctgcgcccctgcctcccgcccggtgcacttgaagcgctggtcctgggctccagggcttctctggctgagcgctgcctcatccccacggtctccggagggttctcgagagggctggagccgacctcccacgagaagcccctggcaaatacagaaatcgcacagtgctgtcaacattgagagtagattcaggaaaaggaaagacagcaaaggggctccagattgaattgcaagatgtgcagagattgtccaagttttggcctcgacctcactccttccctgggttggttttggaggttgacagctctctctccctaggagggagttgggtggggtgttggagtcaggagctccccccagttacggcccctgtagaacttggaacatgcccattgagtatcaagctaacgatcctctttgatctgaaacgaaagtcttaaagtctcggttcgttctagaagcctggctcctgccctgtggggaaggagggagggggagaggaggaggctggggcacagggagctggacctgagaagccttctatttttagcccggcctggcctgcccagccaacagcagcaggggtttggctgtaggtctcaggagtgtttacataggcttctgcctggtacccctgggcactacgggcccaccctgctgggggcgttcccctaattcgagtttctactgttaataaatgcacccccacatggaggcctttgctctgggagccctccccgcattggagtgtatggaccccaccttgtagcatggtcctgagagttcccagatcctccttggagcagcctgtgtcacacagactgcattccagtaccagctccatcacttcctggctgtgtgaccttggaccagccattttccctccaccttctcacccttatcactgggttgataaaaatttctcacatggctgttgtgagaatggcatgaatgtaaggcgcctggtgtatagaaagtggtcttcatatggtagctgtcattcttacttcattttaagggtgaggaaagggaaagatggagtgacaagtgactgatggagcagagaagcaggagagatgtcacagccacactctgagattctgaaggtcttcctccaataacagtggctcagagtttggttccgtgtaaaggctgttgtcttattgcattaccagcgcccccccccaccaccccaccccctgactcacccactgggcatctgatggaaggagaggttgttggcttccagtaatgttgaactggagtccctagagagctgaggccatagacaggcaagtggagatggctgacttccaaggcaggtttccttctgctaaagtgagtcttgtcctgtctgtatgtgtgcaggtacacacacacacacacacacgcgcgcgcgcacacctgggaggctggctaacacttactctctatgtggctggggaagtaagaactatgcattatgcaaagctcttggggtgttggagattgctgaggcagatctcaggtcccagagtccccccaactaccctgggccagtcagtgttgtctaactccttcaagtgtcaggttgtctgaagtgctgaaatcaactagaagcctgtgtacagcacccttggttgccggatgggtctgagtgttggtgatggtggggggagctgaagtcccctttccttacacttgcattcccatctcccaacccttgctctcctgctggaaagtgtcattgctaggaactcgcaaactctggtgcccc

SEQ ID NO: 315874 - DNA, 4001 bp, Homo sapiens
ggggggccaactgaccaggcaggcccttgctgccccatgtccacccaggggctcagctgccaaggtcaccttgaaagacctcctatacactgccacccgagctaaactgggcttggcacctgccctaggaagcacccaaaatagttactgaggccccaaatagtccctagccggacacggactgtgccagactcaaagggtggagcactcactctgaatccgtgagctgtaggggtctgggatagggatggcagggtccagcacacgatagatgacctggagaagcagggagttcatagtcacactggaccttgcctcaggcccatcatccccagcttccagcccccagcccagatgccagccctcacctcgccttcagtggatggctcaatctctgagtagcgggactcacagactacatcatcccagtgccgtgggggtgctagtgggactcctgggaagtcagccccacagtcataggagaaatatcggtacacatgccaggtgcggccaaagtctgctgagcgttccaccagcatggcagcagggcgaaatgtctgggtaggggggcatagctgatcagcaggcaccaggacccaagcccaacccagagccatcaagagccctgctcagcccaagactgccctcaaatagctcacagagagtgggggtgactggtggaagccagataatgaccagcaaaggtagccacctctaatggggagactcagggttcatggggctcagggagacagcgcctgacccagcctgggattggaaaggcagaagagcatgtgcaaaggcctggaggcaaatggaaggtgtgaagggatgaaggagcctcctgcatccatgctcaaggaggctgtgttaaggagctgaggctctgtccaggggcaatggagagccaagcagggtgattcgggcaggctcccagatatgcaggcaccttgaaggtcataatgaggtgtgtgaaatgaaactcagcctccaggtccagctggatggtgaccgcagggatacctgggacaggaatcggaagtcaaggactcaaagctactggtgggcagccctgctcacttttgccccacccatggcctcaccattctctgactgccaccaggctgcccgccgctgtggtgcaaagctggtgactacattctggatgcgatggctgtgtgggttgtctctagcagagaaggggcgccgggagtcacaaaggaagcacttcttttcgtcctgggttggatggggattagaatcagtgcctcaggcagtgccagccccaccctgactcggcgtcacaccctgtccccagccacacctgcaggtgactgacgatgcagtagggctgggggccattcaggccacaagtggatgaggcagtcagtctgtcagctcggcccaccagcaggtcgcccgtggcggggtagcagcttcccctggaacagccaggcacatccggggcaggggcctgtgccagtgtggcagccagcactggggacagtagctcagtcagttccgctgagttcctatccagtggctccacctcatgtgccccaagggcaactaccaggacctaccatcacattccacaacccccagcccccaccaggccctctcaccgcttagcagtaggcccagtcgaagttcccagggcagaggctgtcccctccctctttcccttgaggtcagctccatcctgaagaggggaacagggataaggggaggtgaacggtctcgggcccgagccctcctccttgctttggggttccgtgtcaactctgcctgtgggtctttggcctgtttccctccaggccctctgtcagttcccaggtctgtccagcggtccctccgacagcttagagtccagcgactttgagcaaagttgggaatcgcggcaggaaggaaaggccggagcggattctgggaaggagcgcaacaccgggcggagagcgcccccaccccaaccctaccccttccctccggaaactgccttcgccccaggaaccagagacagaccacttcacccacaaatctttattgtgcccccaagcccacacctatacgagggccaggggaaggtaaggggtttggtgctttaaactatccttggaagagggctcacgaagttgggggcatggcaggagcaaatgagagatcttcgggatctccaactctggaccaaggagaccgtagccttttcccctcagcgtcatgggcgccgtggaaattaccatcaactcagccgtttgatcccagggctccagcatcaacagagaggctggagggcacaagcaggagcaacacatgcccctattcagggctgtggggggctctcgggtagtcctagggactggacagaatggggctgggggagagatggggaaagtgcacacccagcccgaagcacagctccaggggggtcactgcctcccccactagtcactacggtaagtaggcacgagaagtgctgcgggtttccctgtatggaaataggctctgggtggtggaccagagctacggcgagcgactccggatcttgtggctatttatccgctccagactttttggcctgccgggatcgcaggagcctggggttggaatgtgcgcggcggcgtggagggggagagaaggaggaaagtgggtgggggatatggggcgcgccccacccagggccctgggaacgggaagctgggggaaacatggggtcctccggtctttagggctgggtctggcctgccgcctccacagtcccggcagggagtgccctgagctgccatccagggaagaaagctgatgatagttcctcaggggaatcaccccacttcacaaaggagcatgggggcggcgggggtgggggttgggtgagggttgggtgggggtcagtcaatccgttggactttaggcatcgctgggagttattctggatatccggagtagaggtctccagtcaccctgaggatcatgtagtcaacctgggggatcagggatactagaaattactgagaattttaattttttttttttttttgagacagagtgtcgctctgtcacccaggctggagtgcagtggcgagatctccgcttactgcaacctctgcctcccaggttcaagcgattctcctgcctcagcttcccaagtagctaggattacaggcgcccaccaccacgcccagctaatgtttctatttttagtagacatggggtttcaccatgttggcttggctggtcttgaactcctgatctcaggtgatcctcccgcctctgcctccgaaagcgctgggattacaggcatgagccagtaaatagtgccaggccccatctatttattttgagtggagaatgccagcactgtagtctcacagttttagatcactcagagataaaggtgtatcaaggtctgggacactagatggcctcagggagttacatgatctgtctgctttctcaaggtcagagggccactgggggacatcgtggggccacatgggggggtcactcagggtcagtgggcactcagtaggatctttggtctcccaaggccaggagattcctggatcactctagggccactttgagttacccaggtgatcccacagtccttcttaatggcttccatagacagtaattagcaggtggcatacttattggtggcaaagcacatcatgtgcccaagcagctcagctgcctgctgctccagggcctgcagggtggctgccttcttgcccagtgcctgtgcattctgtgtcaggcggcactccaaccctggggtcaggtcatctgagccaggctctgacccctggctctaacctctgatcctggtcccagtctctatcacaaccctgaccctgacccagccctaaccttaaataaaccctgaacctaatcaacacttgatccctggtctaaaccttgaccctagccctgatccctacatgagtcaagatctgatctggacccagccttaacccttccacaacatccctattctggccctg

SEQ ID NO: 315875 - DNA, 4001 bp, Homo sapiens
actgcgaacagtgcctggcatgcagagagtgccaggaagccatgtccatcattgttaattaccatgtgctgatgagccctgtactgagtgaagaaggggctcaaggtcaggttgtgaggtgaatgggagagggactggagggacaaacaggagatacgagttaacatcactgagcaaaatcactgcagtaattgctgtccaggtgctacctcatttgtttccccagtactcctagcagaggatattattctccccatttttcagtgagggaactgagcacccgaaaggttgggtgatgtgaacaaggcctccctgctgggaagggtcagggcaagggtttgaatccagttccgtgccacccctcaaaggcctccacctctgaggaagaaacctctgatgcatccttcacctagctcacctctgagaatttgtagctcagaaaggaaccggtaatgtgggcattttctctccacttgcccttgcatttgtcaatactcactgtatttttatttttatttatttattttttttgagacagagtctcactgttacctaggttggagtgcagtggcatgatcttggcttactgcaacctccgcctcttgggttcaagtgattctcctgcctcagtctcccgagtacctgggattacaggcgcccacaaccatgcccggctaatttctgtatttttagtagaggcggggtttcaccggtggccaggctagtctcgaactcctgacctcaagtgatccgccggcctcagcctcccaaagtgctgggattgcaggtgtgagccaccacgcctggcctgtcaataccattgtgtttctgagcctatccatccattcaaggagcgctcacatacaggtcactgtgggttaccgctaggctgagattgttttgcttttttaatagcttgccctgtggagcgtgatgatgacttcctcttctgtcccctaaaagaacctgaaactgtaagtgtgaaagtgtggcgcaggggagaactgcctaggcaagggcagctggcacgacccttctcacctcttccctaacattcctagcattcatgttacaagcaagggccaccgcgccccctgcttgagcatgttagccgggcggtagggacggagacagttctctcatgacgttcgagtaaccaggaaacttcatcacagggacaacaccacagcacccgaggactcaatgtctagggggaaaagctctggagaaagcggagggtcggatcataaaataatcataaactcagcgtcccagacggcatctgggatgggaagtacaatgatcatttaaaaaaaaaaaagtctttgacactcttcctacacctttctgaaatggcacaatctgtcagaccacatctgatgcaaggaaaagcaagacaggagcgcttttcccggataacaaagccaagactcccattcctaaaccctagctcaggtctccatctcttaaatccgagtgacctctacaaactctccctgagaaggtgtccagaacccttttggaagcgagggacagtgtcactgtctttggggttgacacctgctctgagtaactcacggaaaacaagttccagctgggaagcccttggacgcgccacacctccctacccgcagcccgtcctgtggcgcccgggactccagagtgcgtttagatgaaaggggaccgacacgtcagggccaccgcgggaagcgctgagggccactcaccggccagggacgcgaagagcgcggccgccgcgctgagctgccggggcatggtgggcgctgggcgaggttctgcagcgtgcggcgaagtccgggcaggccccgaatcggtgccagagaaacctacctgtgccggagaaacgaaaccacctgcttatgagaagcagccgaaaagcccgcccagggccgctgggcggggagggaaactccgccggccccctcctacccctacggagcagggaggggcggggactcggcgcagccgccggggcccgggcctctgggaccgtttaccgcacgcgcgtggtcccggcagcgccggcctcctccgctcataccctgggtctcctcctttctttttcttttctttttgagacgaagtctcgctctgtcgcccagggtggagtgcagtggcgcgatctcggctcactacaacctctgcctcccgggttcaagcgattcttctgcctcagcctcccgagtagctgggattacaggcatgcaccaccacacccggctaatttttgtatttttagtagagacggggtgtcaccatattggccaggctggtctcgagctcctgacctcgtgattcgcccgcctcgacctcccaaagtgctgggattatagacgtgagccaccgagcccggccagggtctcctcttttatttcttttctttttatttcttttgttttgttttgttttgttttgttttttgagacaaagtctcgctctgtcgccaggctggagtgcagtggcgggatctcggctcactgccctggttcaagcgattctcctgccgcagcctcccgagtagctggggttacaggcgcccgccaccacgcccagctaatttttgtattttagtagagacggggtttcaccctgttggccaggctggtctcgatctcctgaccttgtgatccgcccgcctcggcctcccaaagtgttgggattacaggcgtgagccactgcgcccggcccagggtctcctcttttctaacagctcgggtacctttctgggaacccagagacgcttctcagccgggagaaagccagccactaggcgagcaggagcctaaaaacccctaagcaccctgactccatgtcttcccagggagtctgcggcagccgcgctccacgcccaggcctcgccaggaccgcggtttgcgggaagcaacaggagcacagcccagaggcgctaggtctggctgggagctcgcgctgccgactccccggcgtgcggcgtcggggaacctctaggagccttggattcttcagctgtaaaacggacataataatgcccactcccagtgtgtttttttattttcttttttctttttctttctttgtttttgtttgtttgtttttgtttttgtttttgagacagggtctcactctgtcgcccaggctggagggcaatggcgtgatctcggctcactgcaaacttgggttcaggcgattctcctgcctcagcctccacagtagctgggattacagatgtgcgccaccacgtccggctaattttttgtatttttagtagagaccaggtttcaccgtgttggccaagctggtctcaaactcctgaccccaggtgatccgcccgcctcggccttccaaagatctgggattacaagcgtgagccactgtgcctggccccaggtggttttacagaccagaaaatcctggaacaaaaaacacacaatatcgttttttttttttttttggagtcagggtctcgctctatcacccaggctggagtgcagtggcgtgatctcggctcactgcaacttcgacctcctggcctcaagtgagtctcccaccttagcctcctgagtagctgggaccaaaggcgcgtgccaccacgcccagctattttattttattttatgtagagaggaggtctcgctgtgttgcccaggctggtctcgagttcctggcctcaaatgatcctcctgcgttagccaaccattgggattacaggcgtaagccacggcccacggctcaacaacgctgacaggcaaccttttaatgtcttatctccttcctctattaattggattgtctgtcaaaacaacgatgttttgacagggcttgagtcccagtggggaatacacatttaagcagtatattaggagaccctccttatcactagattgagggctttcagcctagcctcaaattattttctgaaaaataactttggctacaactattttgtcttactatgttgctccaaacactaatcaagtaaacttaaccaaagcttgcagtgt

SEQ ID NO: 315876 - DNA, 4001 bp, Homo sapiens
tcccagcactttcggaggctgaggcgggcagatcacgaggtcaggagattgagaccatcctggctaacacggtgaaaccctgtctctactaaatatacaaaaaattagccaggcgtggtggcgggcgcctgtagtcccagctactcggaaggctgaggcaggagaatggcgtgaacccaggaggcggagcttgcagtgagcagaggctgcaccactgcactccagcctgggcgacggggcaagactccgtctcaaaaaaaataaataaataaaaataaaaataaaaatgggcaaaggaaaacagcaaagatgacatataaatggttaataaagaggacatatagttaatatgaaaaagatcaactttacaactaatcaaataaatgcaaattaaaacaatgaaagtttagtttccagattggcaaatgaaaagaaatatgcattttttaaacaactgctggtgggaatgtaaactgattccacctttttttggggggtggggggcaatctgataacctgtgttaggacctttttaagaatagttcatatcctttgaagttaggagtccctaagaccccactcaggttctaattccataaggggactcataagaatcaacatatagtcagtattcatggctatgattcattacacaacttcctagggttcagccctattcctttcccttacttcccaggccttgttcttggccactccaagtacccctccaccaaagccctgatggactgcctcttattgacagcgaggagcagccattttattagacggctgtgagaataagacgatgtgaaaggtgtggctcatgtcttatatttatgatcaacttggccctttacttccttagctcgggctcctccagttccgtccttagatgctcagaatcttcttctaagataagaagactcttctcttcttccacaaccttccaaagaatcaattcccactactccacccctctttagaatcaaccctgacctcaatctcagttggagcttaaggtgaaggtttttgagaataggaagggccctgcacaggcaggagggagtgccctggccgccctctaggccgtggtcccaagaccgccttccttcttgtgcatcatgcagtcacaggggcttccctttcacggaagaggcgctgggacgcagagctgacgggctgctgaatgctggagccgtcagagcccacagtgatgccttgagaagggagtcattcatttccctgcgtgtgtgggatgatctaagttttgacccgtgagacaaaacccaccttccttttctgttctcctgagtaggaggcagaaaaaaaaaaacaggacacaggggagaagcacacgaggacatctgtgtacaacactcaaaagaaagtgcaagaatgcacctggaaaaattcatcttaaagaaaccaagttttgtgaaaacaaaaaaaatcttggattttgcagctactaatttacctgtgacctcaggcggatttctcgtctggaacctcatctttctgaggacctccgagccctaacgtgaaaacgacctgtgggccccagagaggcaagggatgaccttcaactgggtccaaacccctagtccggggagcaaagatctggggtaggggagtagtggagaggggagcttgagtacaaaactacgtgtatatgtgcatttttctgggaaagagtccagagctatcaatggggtcggtggctcaaaggtcctgaagacctagatctcagatattttcagtttcgaaactgcaaggttccaggaccacctaacccagcccgcaccttcccttcctgccctcagcaagtcagaatctcccgagccggaggaagaggagactgggcctcgtctctcatctcgctgcgcccggtccgggggtttacctgctcacaggctctggcctgcggctcctctactcctcgttctccacctttaggcgagcactgccgggccacggaccatgggcgccgccatgttgtcaaaacagcaactttatcgatagcgtccgcagtcgacacagacagacgggggcgggaccggggaagggaggagagcaacccagtcctcgactcccagcagcccgccgggcggggcggggcgtctgcgcggcggcccggggctccgcctctcggcctctggcacgccctttaactgctctggtgtcggcaaagctctagacgtctgggactcaaattattacagttatagcagacggatgaaagtcgttgatttagtggcctcagaataaactaggcggcagctggtgaaaagagccctgggatatagcccagaccccagggttcgaatcccagcgtagcaacaactgcctcctgggcttgggcaggtctcgacctcttgattcctaattgactgcatgatgagtgaggcaccttcttccaccatattgcgtaatcctctagccctggggcggggggtggaattacctggccaagaataggtttggggtaaggtacttttctcacctggcaagtgtgctgggagtcaggaaagcatgatgccttccctttcctcgaggagtttgtatatcccatgcccccactgccacacacccggcaagtgtttcatgcttgtaataaatcaacaaatcaaagaattgcaaagaaccagtggtgttaaagcataattttcaaaaaggtaaaaccgatttaaaggagaacttgaagaactcatatatgtgggcagtcaagaatactgaaatgaatttgccaattgtgcaaaattggttaatatcctataggacaggaaaaagtaatgtttgggagccatttctttcctacaggcttgaaatcgtatctctaccaaacaaaattcgtcccatgattacagtagtccctcctattctcacgagacatgttccaagaccttcagtggatgcctgaaactgcggcggtactgaaccctatgtatactgtttttcttgcctatgcatacatacctatgataaggtttaatttgtaaattagacacagtaagatattaacaacaatacccaataataaaatagaacaattataacaatatgctgtaataaaagttatatgactgtggtctctcttgaaacagcttattgtactgtcctcacccttattgtgatctgtcgatctgatagccacgatggctactaagttgggtagctatatagcgtggatatgctggacaaagggatgattcacaatggttcacatcccaggcaggaggtagcaagatttcatcactctactcagaatggcatgcaacttaaaacttatgaattatttattgctgaaatttttcatttaatatttttggaccttggttgactgcaggtaactgaaacctcagaaagtgaaactgaagataagggggactactgtatccatattctacatttttatttatttatttatttatctgggacagggtctcactctgttacccaggctggagtgcggtggcacgatcttggctcactgcaacctccacctcctgggttcaagcaattctcctgcctcagcctcctaaatagctgggactacaggtgcacaccaccatgcccggctaatttttgtatttttagtagagaaggagttccccatgttgaccaggctgctcttgaactcctgacctcaagtaatccgcctgccttggcctcccaaagtgctgggattacaggcatgagccaccacacccggcctcatattccatattttagcttctattcttacgaagatgaacaatagctagttaacagagaggcaggcaaatgtatgcactcctatagcatcagataatcccccaatactccacccaagcgacatacagtattctcttttgcccatttccatgtctttaacaaggtttcctaatagttcaacatccaaataccttgttattcaaggtgtggtctccagcatcagcctcacctgggaatttgctggaaatgagaaactcagtctctgccctagacctgctgaatcagac

SEQ ID NO: 315877 - DNA, 4001 bp, Homo sapiens
ggccatacagcaaggtagcagggaaaccgtagttgtcaaaaagtcctatagtggcattatctttgtaaatggtgcaaccactagtggaagagaagattccttgttccctgtgttagcacaaagactcatttcagtgagttgctgtttaaaaccaaaaactaatgagctttatgtcttcccacataaaacataatatgacatgtgtggtaaagttaactgaggtctgcaatggaggtaccattaaccatgtcaacataagcccaaacataatctgatgtttggcagattgtcataatcatgtggcaagagcccagaaggctcattattctcatttctgtcatttaatggtggatttgccatcagtaaaatgaaatagtaacttcaactctattgggagaattttccaaaaaattaccatctaaacatccttttaaaatttcacccataaagttatctgagagcacggatctaaatgacagtataaacaaagcaccagtagaacagtttttgtgtagtgccttcattgtctgtgaatctattccaactttatggccttagcataagaaggggaggaattggcaggttctgattatcggggggaaactaaaaattaaaagtcctgccaacccagaaaatgctccacaatgcagaaagacaacaattttattaggcattcaactagactttgatgcacatcacggctaatctgctaatgaggttacaaagagagaaggaaatccctcttttatacagccaaggagacacaatccattacacattctcaaggaaactggtaacgtgtcctcatgtaagagggcttaacatagtgttctatacattcttttatatttcctctttaattcatctggtaattggggtaaccacctgtgttagctaacggctttcctcctaagtaatgcacagctccataacgaaacaggtgtttacaattaggaataacgcacctaggttaaactcccaaagtgacaaggagactggggccctatcttccttgatgtttacattttaaagaaatggcttccaggtcctcaagaaaagcattcctaggtctttaaaaacatttgcatacatattaaatagaggaagcattcacaaatactaagtttctcaagaaaaaagaagggtctttcccttttggcaacagggaaaatctgtaattttttaaatttagtcttacatagttttgcgtgtgttatcaaacaagtccctttaatcctttctcattgcacgtatgtggaccgcactttggcaagaggtgcagtgataagtggctgcagctacgtgggtgtttgtgaacctcctctctaacaagatcaccgaaaagacattttttaaaatgcagacacgtccttgttcgtttccaattccgtttctcacactagtgtcacgtcaggccattaactcacgttcagctttcaagcccttacgtaaagaaccattcccatggcgtgaatcacccacaacgagcaggtcaggggcaggtgaaggcgggagttcacatcctaagactttcctgaagcggcaggctcttccacacagaaaccaaccgcaaggccagacaaaactgctggaatggctttcaaatctgtccctttctaaccccgttccccctggacctgcagtggccggaagaggaggaggaggagggtgcgggggtgaggaagcagagccgcgcgttccccggggctgggaggaaggcggaccgcgcctgggccccgcgggctggcagacaccaggaaggggccgcagaggagcgtggtggcggagtccagacccggggcctcgtgctctcgctggggcgccgcggctcagctttctggctctctccccgggtgcgagcacgcctccactccggaactgcatttggaggaccgggtcatcccaggctgaggaaagccatcgtccctcacctcgacttcgactaggacgggtgtgaaacggctttcccggtctcccgggcgaccgcgccgccagtcggctggacgtcagggcgcggcgacgtcacggcccacgtctgtcgtcaacgctcccctgcaccgcccagggtctcacgcgccgggcggaagtgggaaaactggtggtggggctcggaaggctgggctagtcttacgcggaatgctgtgagagggagggaaggggatcgagggatgaggtgggcgagagtgggtcgggtgcttggtagcgactgctgagatggagggagctgtcccagcctcgtggggggttggagagaggcactgccgggagtcgggagtcgggagcctatagccctacctatcaccccttgctctggggcctatgtggtagacacagcagtgagcagttactgttcttgagcagaggaaaaagagatgcctgtagaggtcatgggtgtaaagggaagttctggtttcagtcattacagccaggacaaattaattgggaaggcgttggtgacatttccattctagtccaaagtagtgaagattaagggcttagttcaaaaagtattttgagacctcctagtctacactttatttatcgcaggctacccacccttacacgtgactaacttccctttgttcatacattcattcataaaacaagtatttatagacctactacgcgacaagcagagcagcataccgagatagggtgatactctgtgactggtcaaggcaggagcagccattggtgtaattagcaggtgactcattcgtagtccagatcttgcctttctgaggattatataaggtcgaagtacagttcttccaagaaccaaagaaaacatcgatggctctgtagcaggcaaagagactggtttgctattgaataaaataagattaagtaaatacaaagaaaattaattgaacctatagatttagagaagtgattaaatgacgcagagcagtatcggtacaccaaactgcttattgataactactaattaatgacaccaggaagtactgaacactagtgccttgttccttggcactaaaaagtctagtagatgtggctgggcgcggtggctcgggcctgtaattccagcactttgggaggccaaggcgggcagatcacaaggtcaggagatcgagatcatcctggctaacacggtgaaaccccgtctctactaaaaatacaaaaaagtagccgggcgtggtggcgggcgcctgtagtcccagctacttgggctactcgggaggctgaggcaggagaatggcgtgaacctgggaggcagagcttaccctgagccgagataatgccactgcactccagcctgggcgacagaccaagactcagtctcaaaaaaaaaaaaaaaaaaaaaagtctagtagatgtatcttgtacatttaacctgactgatatttttgccccaatgcctacccttgattttctgtttccactccctcaaagaagaaaggattaagaggcctagaggacagtcaaccaagtggtcaactataacatgcttatgagaagcccaaataactttcagagctattcatcctcgtcatatttatctgagagatagtgagggtaggactgctctcattttgtgataatggaagtttagatacagggcaccaaaactggtacctatctgggacaggaatttgcacacctaatgcaagatcactctgttctgaggctagttttctttattgagtactttgtttataggataaggaaaggcaacactttaaggatgggagaaaatccagctcaaaggctgcagttcactccttggtttaatttcatctgtgtttatttgtctgcatattgcctttgagaccaatttcctttccactgtaaatttcccttagacctgcactgtccagtaaggtggcctcatgtaactaatttcactaaaatgaagtatgtttaaaaattccattgctatattgcattagccatattttaagtactcagtagtcatgtaggtaatgtatgatacaccatagatactgaacattttcattatcatagaaagttgggctggg

SEQ ID NO: 315878 - DNA, 4001 bp, Homo sapiens
attttgacaagagactggagaagcaaagtactctatcagagagagcaaccccggccatacagcaaggtagcagggaaaccgtagttgtcaaaaagtcctatagtggcattatctttgtaaatggtgcaaccactagtggaagagaagattccttgttccctgtgttagcacaaagactcatttcagtgagttgctgtttaaaaccaaaaactaatgagctttatgtcttcccacataaaacataatatgacatgtgtggtaaagttaactgaggtctgcaatggaggtaccattaaccatgtcaacataagcccaaacataatctgatgtttggcagattgtcataatcatgtggcaagagcccagaaggctcattattctcatttctgtcatttaatggtggatttgccatcagtaaaatgaaatagtaacttcaactctattgggagaattttccaaaaaattaccatctaaacatccttttaaaatttcacccataaagttatctgagagcacggatctaaatgacagtataaacaaagcaccagtagaacagtttttgtgtagtgccttcattgtctgtgaatctattccaactttatggccttagcataagaaggggaggaattggcaggttctgattatcggggggaaactaaaaattaaaagtcctgccaacccagaaaatgctccacaatgcagaaagacaacaattttattaggcattcaactagactttgatgcacatcacggctaatctgctaatgaggttacaaagagagaaggaaatccctcttttatacagccaaggagacacaatccattacacattctcaaggaaactggtaacgtgtcctcatgtaagagggcttaacatagtgttctatacattcttttatatttcctctttaattcatctggtaattggggtaaccacctgtgttagctaacggctttcctcctaagtaatgcacagctccataacgaaacaggtgtttacaattaggaataacgcacctaggttaaactcccaaagtgacaaggagactggggccctatcttccttgatgtttacattttaaagaaatggcttccaggtcctcaagaaaagcattcctaggtctttaaaaacatttgcatacatattaaatagaggaagcattcacaaatactaagtttctcaagaaaaaagaagggtctttcccttttggcaacagggaaaatctgtaattttttaaatttagtcttacatagttttgcgtgtgttatcaaacaagtccctttaatcctttctcattgcacgtatgtggaccgcactttggcaagaggtgcagtgataagtggctgcagctacgtgggtgtttgtgaacctcctctctaacaagatcaccgaaaagacattttttaaaatgcagacacgtccttgttcgtttccaattccgtttctcacactagtgtcacgtcaggccattaactcacgttcagctttcaagcccttacgtaaagaaccattcccatggcgtgaatcacccacaacgagcaggtcaggggcaggtgaaggcgggagttcacatcctaagactttcctgaagcggcaggctcttccacacagaaaccaaccgcaaggccagacaaaactgctggaatggctttcaaatctgtccctttctaaccccgttccccctggacctgcagtggccggaagaggaggaggaggagggtgcgggggtgaggaagcagagccgcgcgttccccggggctgggaggaaggcggaccgcgcctgggccccgcgggctggcagacaccaggaaggggccgcagaggagcgtggtggcggagtccagacccggggcctcgtgctctcgctggggcgccgcggctcagctttctggctctctccccgggtgcgagcacgcctccactccggaactgcatttggaggaccgggtcatcccaggctgaggaaagccatcgtccctcacctcgacttcgactaggacgggtgtgaaacggctttcccggtctcccgggcgaccgcgccgccagtcggctggacgtcagggcgcggcgacgtcacggcccacgtctgtcgtcaacgctcccctgcaccgcccagggtctcacgcgccgggcggaagtgggaaaactggtggtggggctcggaaggctgggctagtcttacgcggaatgctgtgagagggagggaaggggatcgagggatgaggtgggcgagagtgggtcgggtgcttggtagcgactgctgagatggagggagctgtcccagcctcgtggggggttggagagaggcactgccgggagtcgggagtcgggagcctatagccctacctatcaccccttgctctggggcctatgtggtagacacagcagtgagcagttactgttcttgagcagaggaaaaagagatgcctgtagaggtcatgggtgtaaagggaagttctggtttcagtcattacagccaggacaaattaattgggaaggcgttggtgacatttccattctagtccaaagtagtgaagattaagggcttagttcaaaaagtattttgagacctcctagtctacactttatttatcgcaggctacccacccttacacgtgactaacttccctttgttcatacattcattcataaaacaagtatttatagacctactacgcgacaagcagagcagcataccgagatagggtgatactctgtgactggtcaaggcaggagcagccattggtgtaattagcaggtgactcattcgtagtccagatcttgcctttctgaggattatataaggtcgaagtacagttcttccaagaaccaaagaaaacatcgatggctctgtagcaggcaaagagactggtttgctattgaataaaataagattaagtaaatacaaagaaaattaattgaacctatagatttagagaagtgattaaatgacgcagagcagtatcggtacaccaaactgcttattgataactactaattaatgacaccaggaagtactgaacactagtgccttgttccttggcactaaaaagtctagtagatgtggctgggcgcggtggctcgggcctgtaattccagcactttgggaggccaaggcgggcagatcacaaggtcaggagatcgagatcatcctggctaacacggtgaaaccccgtctctactaaaaatacaaaaaagtagccgggcgtggtggcgggcgcctgtagtcccagctacttgggctactcgggaggctgaggcaggagaatggcgtgaacctgggaggcagagcttaccctgagccgagataatgccactgcactccagcctgggcgacagaccaagactcagtctcaaaaaaaaaaaaaaaaaaaaaagtctagtagatgtatcttgtacatttaacctgactgatatttttgccccaatgcctacccttgattttctgtttccactccctcaaagaagaaaggattaagaggcctagaggacagtcaaccaagtggtcaactataacatgcttatgagaagcccaaataactttcagagctattcatcctcgtcatatttatctgagagatagtgagggtaggactgctctcattttgtgataatggaagtttagatacagggcaccaaaactggtacctatctgggacaggaatttgcacacctaatgcaagatcactctgttctgaggctagttttctttattgagtactttgtttataggataaggaaaggcaacactttaaggatgggagaaaatccagctcaaaggctgcagttcactccttggtttaatttcatctgtgtttatttgtctgcatattgcctttgagaccaatttcctttccactgtaaatttcccttagacctgcactgtccagtaaggtggcctcatgtaactaatttcactaaaatgaagtatgtttaaaaattccattgctatattgcattagccatattttaagtactcagtagtcatgtaggtaatgta

SEQ ID NO: 315879 - DNA, 4001 bp, Homo sapiens
gggcgggggcgggagcgggtggcgcgccgcgcagtggcgggcacagcgcgtgcggatttcccgcaggcgccggtggctgcgcagcgccgcttccaagtcgcgcaccgctcgctcgtagtctccgctgtagtaggcggccgcgccgctggcgtagagcaggtcgaagggctgcagaggcccgggctccagctccagctcccggcgtgggctgtccggggggccgccccacagtggcggcggcagtagcagcggcagcagcagcagcagcggcggcgcccagatgcgctcccgcatcctccgcctcagagaggcgcgggacggttacgctcgagagggcttcggggcacctcgcgtccgggtcccctctcccaccttccctcggggaagcgcgccgactccgccgcgatctggccgctccgcgagccccaggtgaccgccggcgctccgcgtactgagaggcggaggccgtgcctggccagccgctcttaaagggacgcccacagctcacacgctcctcctgctgcctgagactccgagagccgctctcccaggctccccgctgcagcggcggggctgccaggggcggcacactccagcgccagccagagagctagcgccgcttgaggccggccggggacgaggcgctttacacgtgagctcccttctggttgtacaagtggatagtattagtcttctttttgggaaataaagaaaatccagcttagcaaggttagggccttaatcatattctggaatctctgtatggcctcgcagtttgcagagtgcttcaccttctaaatgaagcctggagcgccatttcagactgaatcaaaccgtagatgccatgtgtacctacgcaacaaatctgcgcattctgcacgtgtatcccggaacgtaaagttaaaaaaaaaaagaataaataaataaataaatagaaaaaaaacccatagaggccctgtaggcccagatgcggaggtttaagaagataagtgatttgcctaaatgcatagagctgagaagtggcaaaggacggacccaacccagggcctttagaaccaaagcttaccgcttcttctcttggggaaggtttctcccttaccttttcgtccaacttggtgtggatgtgtgtccgggcattggatcagggcgctgggccaggggaagaacaatatatagcctgcctttcctgtgcagcccgtggttttacagggcccagagaacctttggaggcaggaggagctgtactcgcattctggctccgtccgtttaccagctgtgtgaccttggcaactgagggcctcagtttcctcatctcctaaacagccagacgcctaacacgtaaaatgctattcagaaaaaaattcttgctgtgggccaggtgcagtggctcacccctgtaatcccagcactttgggaggccaaggcgggtggatcacctgaggtcaggagttcgagaccagcctggccaccatggcaaaaccccgtctctactaaaaatacaaaaattagctgggcgtggtggcacgtgcctgcagacccagctactcaggaggctgaggcaggataattgcttgaacctgggaggtgaaggttgcagtgagctgagatcatgcagcctgggtgacagagtgagactccgtctcaaaaacaaaaaaaacaaagaaaaagaaaagagaggagaggaggggaggggaggggacgggagaggagagggaaattcttattctaagagttgaacaaagaggcaatttagtatatcccttacctcaaggaattaagcaatctgcatcaatctaggaatgagaaagctgacagaaatggttgccagattccaaacgactagctggaggcttcctgttcctccccttctcctctgtcacgaatacattcttagccaaggtgttcccctctttcgtgttccttggcttcacactctcacaagaatattggttggaccctggatcccagcctgcctcctggaggcatttctgtggtcttctagtgcctgtgagaatctcatcagtctttcagcccctgcaatggtgagcagagggacaggcaatgggaaaaagactcacgcatgtatctagttgctatgatttttccgaagaaggcttttatgtggaatcaccactacgctgaggggcttgccagagattcatgctgattccttcattcattttgttaggtttgaccactcaggccatgaacagccctggctgtgtaattccaagagacactgatgaatcatgctctttttttttcccaccaaacgttactaattcggctcatatcactgatgaaaaagctccagtttggagctgaatgtatattgaatgccttggatggtcagtgttccagaattagcacatcagtcatctgcccagactttttctctagagattgtctgttttcagataaagattttggagtctagtccagggttatcagtccacttgtggaaggttttgaagcacatcaggataggaactcctgctgtgggactgagggcaaagtgccaggataccttgctacattctatttgtacatttggtgacatttctacatcatttaatatatttcaattaaattaacaatttttgatgcctactcttaaagtaaatattctaggtgaaagagaagataagtcaggattcttacctttgggaagctcacagtactgtataggaaacaaatttgatatatataatgtatacagctataatacaaggtagaatgtggtacgtgttagattagattgaaagtgttggccgggcgcagtggctcacacttgtgatcccagcactttgggaggccgaggcaggtggatcacctgagctcaggagttggagaccagcttggccaacatggtgaaattccgtctctactgaaaatacaaaaatcaactgggcgtggtggcaggcacatttaatcccagctactcaggaggctgaggcaggagaatcacttgaacccgggatgcagaggttgcagtcagccaagatcgcgccattgtactccagcctgagccacagagtgagactcagtctcaaaaaacaaaaagaaaaaaaaaaaagaagaagaaagaaaaaagagctctgggaacacagaggttacaaagatagcttctggctagaaggatctaaaaagacttagggaaataattggcattagcacacagtcaatagcctatagaatgcaaccacatcctactgattgccaaattggccaggttctttcaagcctcttgtatgtcctactaccttatttcttatatcttactacaagtagtaagtaagtaatatgccttgtattactaccttacgtacaatctctgcctgacttgagagaaactattcattgacaactcaaatttgcttgaacattagaatcacctaagaagtgtctggcttctgctctgaaagattctgatttattggtctgggatatgacctgagcgatgggatttttagaagtttcccaggtgattataatacgaagccaaggttgagaaccacaggtctacagctaatgccacagcccaaagaataagtctatgagttggggttccaggtgctgtgtagaattcatgagtaggtagggtttggagaataggtagggttttgtgtaatcccccagatattccctcccaggaaagccaatctgatctgctttttaaggctggatcaggacaaaaagttcatgaccttatggtaataagagccatgcagtgccaagaagctgattccaggtcatgctgtcccagtggtacttactcaatgttggaacagacagtcatccacgagtctcttatactcctgaacttctcacagagtgtgccaagaatgtactttttccttaaataattaactgacttccatctcagagttccggattcactaaacctggggtggagctttcaaatttgcatttctaacttgttccttgatgatgtgctgcccatactttattatctgatttcttaggaacaatggttctaa

SEQ ID NO: 315880 - DNA, 4001 bp, Homo sapiens
aggaagagaggagaggagaggggaggggaggggaggggaggggaggggaggggagaggagaggagaggagaggaggggagaggagaggagaaaagaaagcaaagcagagcacagcagagcagagcagagcagagcagcctggtccattggctagcatgaacaaccaaccccaaagcttccacttttccggtagctgtagaagatacattgatatattaacacagaaaacgagaaagaagggttaagagtgtcaatttgaaggaaaattgggtgagtggcagtggaggttgaagaactcattcaaattccctctgctgaagcatccagagagatcttcaaagttatggatgtgaacaatatgtcaatatgcatactatacctcctgacgctaactttaggcaagttaggcatacaaaaataaaactagaaagagaggactgatgcctagtaacccagtccaatgcataccaccagaaaacgtaagccctctatcaaaggagaaaaagtcaacacttagggtggatactttgactgagactgcctcaaacagcttcgcctcctccaagcataccttctctttaacctttgatctttacttttttgtaggtgaaggggagaagagagagaaatttgttttggaacaggtctttcaacttcactattttgaagattcttttaaacttcagagaaaaggtgcagactacagtataggaaggataagagagaggagacaaaagaaatgggaagtgagaagggagaagagaaatgggaagtgagaagggagaagagaaatgggaagtgagaagggagaagataaattgtactagattcagctttgtcaatgcctcatgaattagtgctgaatgggtactttaaacatcaccttatcaggacagtcctctttttgagagagaagctggctctgagaaagagagaaaaagacttgtccaagttaatcaattgttgcatacagagatagggccaccagatatctggattcacaaactgagacacatatttaaggagacccaattcgaaagactgaacagagatgacgggggcagcagggagggctcaagagagcgtgtgagagccgcaggggctttgcagtggaggagcgctctgtgggtaccttgatgtaggcccgctgcaggtagttgtagggcactctgcgctggaagtcgctgcgcacatcctcgctgacgcggtggcgggatgcggggcccccgaggcgctgggtctcacagctgcgataacagcgcgcccgccccaacaaggagcggaaaaggggcagctcagcgccggggccctcgccggggggcgggggcgggagcgggtggcgcgccgcgcagtggcgggcacagcgcgtgcggatttcccgcaggcgccggtggctgcgcagcgccgcttccaagtcgcgcaccgctcgctcgtagtctccgctgtagtaggcggccgcgccgctggcgtagagcaggtcgaagggctgcagaggcccgggctccagctccagctcccggcgtgggctgtccggggggccgccccacagtggcggcggcagtagcagcggcagcagcagcagcagcggcggcgcccagatgcgctcccgcatcctccgcctcagagaggcgcgggacggttacgctcgagagggcttcggggcacctcgcgtccgggtcccctctcccaccttccctcggggaagcgcgccgactccgccgcgatctggccgctccgcgagccccaggtgaccgccggcgctccgcgtactgagaggcggaggccgtgcctggccagccgctcttaaagggacgcccacagctcacacgctcctcctgctgcctgagactccgagagccgctctcccaggctccccgctgcagcggcggggctgccaggggcggcacactccagcgccagccagagagctagcgccgcttgaggccggccggggacgaggcgctttacacgtgagctcccttctggttgtacaagtggatagtattagtcttctttttgggaaataaagaaaatccagcttagcaaggttagggccttaatcatattctggaatctctgtatggcctcgcagtttgcagagtgcttcaccttctaaatgaagcctggagcgccatttcagactgaatcaaaccgtagatgccatgtgtacctacgcaacaaatctgcgcattctgcacgtgtatcccggaacgtaaagttaaaaaaaaaaagaataaataaataaataaatagaaaaaaaacccatagaggccctgtaggcccagatgcggaggtttaagaagataagtgatttgcctaaatgcatagagctgagaagtggcaaaggacggacccaacccagggcctttagaaccaaagcttaccgcttcttctcttggggaaggtttctcccttaccttttcgtccaacttggtgtggatgtgtgtccgggcattggatcagggcgctgggccaggggaagaacaatatatagcctgcctttcctgtgcagcccgtggttttacagggcccagagaacctttggaggcaggaggagctgtactcgcattctggctccgtccgtttaccagctgtgtgaccttggcaactgagggcctcagtttcctcatctcctaaacagccagacgcctaacacgtaaaatgctattcagaaaaaaattcttgctgtgggccaggtgcagtggctcacccctgtaatcccagcactttgggaggccaaggcgggtggatcacctgaggtcaggagttcgagaccagcctggccaccatggcaaaaccccgtctctactaaaaatacaaaaattagctgggcgtggtggcacgtgcctgcagacccagctactcaggaggctgaggcaggataattgcttgaacctgggaggtgaaggttgcagtgagctgagatcatgcagcctgggtgacagagtgagactccgtctcaaaaacaaaaaaaacaaagaaaaagaaaagagaggagaggaggggaggggaggggacgggagaggagagggaaattcttattctaagagttgaacaaagaggcaatttagtatatcccttacctcaaggaattaagcaatctgcatcaatctaggaatgagaaagctgacagaaatggttgccagattccaaacgactagctggaggcttcctgttcctccccttctcctctgtcacgaatacattcttagccaaggtgttcccctctttcgtgttccttggcttcacactctcacaagaatattggttggaccctggatcccagcctgcctcctggaggcatttctgtggtcttctagtgcctgtgagaatctcatcagtctttcagcccctgcaatggtgagcagagggacaggcaatgggaaaaagactcacgcatgtatctagttgctatgatttttccgaagaaggcttttatgtggaatcaccactacgctgaggggcttgccagagattcatgctgattccttcattcattttgttaggtttgaccactcaggccatgaacagccctggctgtgtaattccaagagacactgatgaatcatgctctttttttttcccaccaaacgttactaattcggctcatatcactgatgaaaaagctccagtttggagctgaatgtatattgaatgccttggatggtcagtgttccagaattagcacatcagtcatctgcccagactttttctctagagattgtctgttttcagataaagattttggagtctagtccagggttatcagtccacttgtggaaggttttgaagcacatcaggataggaactcctgctgtgggactgagggcaaagtgccaggataccttgctacattctatttgtacatttggtgacatttctacatcatttaatatatttcaattaaattaacaatttttgatgcctactcttaaagtaaatattctaggtgaaagagaagataagtcaggattcttacctttgggaagctcacagtactg

SEQ ID NO: 315881 - DNA, 4001 bp, Homo sapiens
gatgaggaaaccgagcctcagagaagtaaagtgaaacacccaagttgatagtgtcaacaaattaaaagtccaagccagatctcttgattcaccatttcatgctttttttcaacataacagaaattgatcatacctacagtaacccctcactcagataaatatttcccccaagacagccaacagagacccttagagacactaacttaatgctaaccgagcaataaatgcagcgtacccatacccaagcatacagacccacccacccagtcccaaggctctgtcccctgccctaaggtgtctctctgcagcgtaccccctccccaatacccactgagggtccgtcagccaaagaggtgagtgtcttaacacagagaagcagaatctatccgactccttcaggaaggggacctggcaggaaggagccccgtccctggcgcttgttctgggagttccgtccaccccctcccctacctgccaagagctgcatccaggcgcagatcttgtagaccgtagccgtgttgcagaagaagaaaagcgaaaagcaggtgatgcagccgaggatcagcaccatggagagcagcacgaagaaggcggccgccttgaaggcgctggacgggatggtgctgaagtcggtgaaggagccccggcaggtgagctcgcggcccgccagcccgctgcccacgcagtagtggaagaggccgaagtagccaggcttgggggtgctcacgctgtcgcccacccagtagggctggatgaagaccaccacgttgatgatggcgaagcagatggtgaagatggcccacagcacgccgatggcccgcgagttccgcatgtagtgctcgtggtagagcttggaggcctcctgcgagggcagcatggtgcccggaggcggggccggcggcggcggcggctggcgggggccgccggcccgggacggagcgccgggctgccgggcgggagctggggacgcacgcgagaagcggccctgagtcaaggaacccgcgagggcggggcctggggcagagctgggggcgtctgggagctgctaagggagagaggaaggggtcatgagagtgttgaggccgtgtctagggggactggcaaaggtctcctactggggggcctaggagggggccatgagaaagttggggggcgcctaggatggggatatgagacctggaagtgcggggggaggtgcttgaaagtggccatgggggagttggggagggggtttgagagctggtattacgggagtaggaggggacaaggggaggtggaatggaggctggagactggtgttggaggactagcagaggggctgaatttagggagctcagaagggaatttggggactggtattaaggggtagaaggaggtctggtattgggtgtctagcaagggactatgaggcggtggtgggcgcttctaggatgggggaagagggaatttaagaggctgggactgggtggttgggaaggtaatatgggggctgggacggggaatgggggctggtatgagggtctaagagggcaaagtggcagaattaggatacagctagagcgggatcgggggctgggactgctggacacggggcgaggaagggggggctgtcctcagaagccagggctggaggtaggctggagggagcctaggattggcgggccagggttggagagagggggtttccaggccaaaggaacgaaagaccggggccggtgagcagcggggcccgcgaggagcaggcggtgggcaggggctgtccccggggggctggggagcggccgggcccgagtagggccggggttgggggggcggctgccccgcgcccaggccggacgcgcgcgaggctgcggccgcggggaaagggtgcggggagaccaacctgggcacggccggaggcagcggatccgggactggcacggcctaggcgccgcggctcggcgctcccagcagcggctgcctcggcccaggcggcggcctctgcgcggcctccatcttgctcgggttctccccggggcgcgctcccgcgccgaggcgcgcgctctcgtgcaccggcgcggcccggcggaggcgcgctcccgagcgggcgtgcgggacggggcggggcggaaccggggaagggtgctcctggttctggcagttggggggaagggtggccacgatacctggggtcccccagccggggcagcaagcacacctccacagtagggcccccgatgtaggggactcccttcttccagcctgagctaaggggctgtgaggccccacaaagcctatgggagtggggaaggagctggagggggtattatttgacaggatttgaacggatctcttactcccaattacctcccctggaacctatcacagtgcctgaagttgcaccattacgctttcagtcctttgggtcttggaggcgttgaaggttcccagagtctcctaggaaactgccaacacccctgggagagggaaccccttaaactggtagcagcccacgcctgcgatggggattcgttggctgccagggcaaggagcgaggcctggggaaccagacccggagtgagtactaggggacaggagagaaaggggctgggacatttttggtttccctccctacactctcccctgcccccagctcagcgcctggcatgaagtaggcacaccataaagatgtgttaaggaaaaagcatcaaaggccaggcacagggttaggtcacagaacaccccaggcgcaccccaagggggagccggcgtggttcatttctttccctgctggaaaatagcctttggcttaggatctgtcaagatgatgtgggtttgaacccagacaaactgagtctaaaactgtctctgtgaccttgcactaccactctgtctaaacctctgtttcctcatctgtaaagtgggcagcttaagtcacacttcacaggcatgtaagtggggtggggtggcaaaaagcaatccatgttagcaggtctcaaatactggaccccatacacgggtcaatctcaaaatgtgtatctggagctgggcacagtgtcttgtgcctgtcatcccagctactagggagggtaaggtggggggaccatttgaggccaggagttcaaggctgctgtgggctatgatcgtgccactgcactccagcctgcgctacagagacagacctcgtctctaaaagaaatttcaacaagaaatgcaattttatctgcaaaaaaaaaaaaaaaaaaaaatcatgtaagattgccaactgtcttttttccagtggggaagtcggactgctctttttgttttgagattatgtatttcctacttgcttcttgcaaaaaaaaaattcacttcttttaagaaatagtggtgatagttaacgggaggttttttaaatgtctttatttgccaaaataaaaagtagatagcctatttcaatcccaaattttattaaagttatggatccataaaatcccacaatttggagacctgggaaccacgtgaattagtctcattcagcgcttgaacatgaggtgctcaataaatttgatttccccttccatttggcttcttgagacgcatcttggctgtttcctgagaaccctgtgatcctggaatcatgagctgcagggtctgtggagagtgtttctttctataccttctcccactttacagatggggaacagaggtcaaagaagggggttgacttatccagagaggtagatagatcctgccagtcagactgatcaacctggttcattaatttattcaatcatcctataaatgtgtgaggcccctgtcatgtgccaggcacagttaccaggctaagcactggggagaaggtggtcagtaaaacagacgtggtccctgccggtgagctctcatggagctcacagcttcacagggagatggaagatgctgagggcagggagcagggaggtggccatcatcaaagagcatctcagagtcccctctggggctgctcctggtttgggtcctgccctgaacataccaggtta

SEQ ID NO: 315882 - DNA, 4001 bp, Homo sapiens
gtttgacctgcctcaactgcacataagtacccatctacacacagacacacacacagacacacacacacggcagtcaagagcccctgcctcaatcactggtccctcaaacagccagatcaaccagatctgcccaaccaactacagactgaacgctcaggggtagctgcccctgagaaagctggtcccactgaagtcctatatgagcctgtcactgcaagaggctctaaagtcacacccaaaacccttgaaatccaaagtcacagcatttctcttttctgagagcagtcatgagcaatcccaccctgctgcacccttcacacatgggtaaccccagctgcaaggtccgctttctgccccaggatgctttcaagtttctgaatcagaaaaagcagctgaaagaggaagcccaaaacaaaaaaataaaaaaacaggccactcaaagagaggtaactacagcccacagcatccctggtagggggcatgttccccaatctcaagaaccccatcgccccaccataggcaactccaccagcctctcactcaccaaagtaatcagccttcgggtgagcatccatctctcgctccagacgttgggtgagggcttctaatttcaactcagcagcagagggtctcagctcaggacctgggacgaggggctggcagggcagccttaccctaggggagctggggctgtccaggagcacagatcccaggctaccatcagaagaccagcccaggggaccctctttacaagataactcaggcagggtggacatcactggatggacaagactggtggggctgagcttgggaccagtgccaaggtctgtgcagccaggcttcggccccagcccagggaccgcaccctgctgtgaaccgtccagaccagctggcgaggatgacggggcagaactggaaaggtaagatttgggcccatcctggaaccagggttgggggtccacattgggtttggacatcacacctgaaacctcaccccccagccccgagtttgatcttggaagacctccttgcctggggcagctcagggccaagggtgctgacacagaaggggtcctgggctgaacaggccccacagctggtgctccgttctccaagtttggggaaggcaggccagggctcacccgctgggaggaggcagtggaccaaaggcctgttggcttctcgctgctgcggccaccaatgccactattctgaccaccgaggctaccctcagaagacctgctggagctcagggagagctgtcggtgatttaggggatggtccccgcagggtttgggcagtggtgggtcactccccggggagctaggccacccactccctacactcaggccgatgctgggggacactcctggtttgtcaccccactttgggcttgccaaggagaggttgtcataatagtctccatgagtgaggcaggaaggatcctcacaggggcctggctggtggaaagcagacatctcagaagtcgccaggctctccctggaaccacagtcctggctgccatgcctcgtgccatgcaggtatggcctggatctctgctcctgcggtgggtacgggggctgcccagcagcgagggtggtgactgccccaggtgcccctgtcgaggcagcaagaggaggcttggcagcaccatccacagtcagcttgctgcccacaacttcccaacgggcctgtgggcccaggcggccccctccattgacagggcctctactccccctgggcagagtctcctcctgcaggagctgctgctgctgctgctggaggtggattttggccatcttggtggcgaacaccctgcgagtttcctcaaactcggggttgttgcctgcacccttgtccactcggaagagcccatccttagaggcctcatacatgttcaggtcctcgatgaatttactggcctccaggcccaggtcgtcatacttatccatgctgcagacaggtgtccgggcctagcccaggtgccgtgtgtgtgtgtgtgtgtgtgtgtgtgtgtgtgtgtgtgtgtgtgtgtgtgtgtgtgtgtgtgtgttgagggcagcggggagatgctggcgaagggtcggggctcaagtccggcccagtacaagtaaagacttccacctgcctagcgtgaagggcatgaccccaggatttaagagtccagccgaagttgagacctcaacgccagctggaccaagtttgcttccaactccctttcccctggagacgtccttgttggggtagctggtggcacttcgccgtcccgggcctgctcagcggagttcttttctcctcttcaaattataaaaggaaaaagaaaacagcaaaaaagtaaaatcacatcctccttaggcaaccaaacacggaaactcacagcaaggcagcagccgactgggccgggtgaagctgaatcggccgggagggcgccgaggccgcgagtcgggccggagcaaacgcgcggcggctgaggcgcaggtacgttccaggcgctgggtcctccgctgcttccccggagctgcgatcccggccggcgcctggcaggaacgccgtccgggacgcacgggcggccgagcagcggcaggaagttcacggcagctggggctggcggcccattgtccgatggcggcggcggatcggcgcgcgcgggccggagggcggcgggacgcggaagtgagtgcgccaggcgcagtccctgctgctcgctcgccggctctgcacgtcccgagcccgcgccggggcggagggggcggccgaggggcggggacggcgcgcgggcgggcgcccaggggcaggcctgcacccggcagcgtggctgggcctcctgcccccaggcctggctggagaacaccgaggggtgccccacaagtccgtcccacgctctagcactgggactgcacgggacttcgccgccgccactgccgccccctgcgagtcctggaccgaattgggtgctccgacctcccttccagcctcgggtcctcagcccggccccgcccctggcagcgctgggcggggtcctccgctcggagacgggcggcctgggtagcctgcatgggcccaacacaggcgctgggagtttgcgaggactttcgaggacgccgctcctcgctccactgcctcagtttccccggtggaaagccagccctttgtgcctctcgaggccggcaccgtccaggctgtgcccgccgcccggcttgcccgaggtgcactattggagaggcgcacgggcgtgtcacccatggctggcccaccgtcctctttgacaggtcgggagactgaggcagagagggggaaatgcccaacatgccaacgtaaccagcaaagcgtagatgggagcccgggccctctgaaagagcgaaaaagaagaaagtctcgttgtgcctgcgcgcatttcacgtcctcagtgcagcagtaaaagcacgtgccctagtaggctcgttattcgtagagggacccatctgcaagtggatccgcgcggctgcagggacaccaggcctgactccttggcgcccccgcatggcccgggactccctataccagttcccaggcgatcctggagaggtttcatttcccacactacagccatcgtgatcctaaggcaaatactagaacagacacttctctacctaaatcctcagtgcttaccccagaattaaattgaaatcggccccttgccgcagccttctgggccagatctagggatcttccctccctccctgcactctagctgcaggagcttcctggtgtctgcccagagcttgcccctaaactgagtggctcatctttcccatccctgctgaagtcacctcctcttagaggcctcctcagagtggttcctgttgttctttttcagcaccctctttacttcctgctcagttctgataactatttataattatttatttgttggttaacatgcgtttttttttgtttggttgggtggtaggtttcccactccatttgaccatatctgtatgccaagtgcctggtatatatta

SEQ ID NO: 315883 - DNA, 4001 bp, Homo sapiens
ttttttgagatggagtctcactttgttgcccaggctggaatgcagaggcacgatcttggctcactgcaacctctgcctcccaggttcaagagattctcctgtctcagcctcccgagtagctgggataacaggtgcatgccaccaggcctggctaattttgtattttcagtagagatggggttcaccatgttggccaggctggtcttgaactcctgacctcaggtgatccacgcgccttggcctttcagagtgctgggattataggcatgagccactgcgcctgaccatttatcttaatttttttaatttaaaaatgataataggccgggcgcggtggctcacacctgtaatcccagactttggaaggccaaggcgggtggatcacaggattgagaccatcctggccaacgtggtgaaacctcatctctactaaaaatacaaaattagccaggcgcagtggcgcactcctgtagtcccagctatttgggaggctgaggcaggagaatcgcgtgaaccagggagggggaggttgtagtgagccgagatcacgccactgcactccagcctggatgacagagcaagactccatctcaaaaacaaacaaaaaaaataataaacatatactttaaaatatcgagttctcagttaaaaatatcatcattggtatgattttaacttactagaaaatcaacttcaaaaccatatataaagaaaaatttataggccagaaatcctaatactatttttccatttcccttctaaacttcattcacatatgcatacatacatgattttaacatagttgtaattatagtttaccaacaaatttaagttctactttttctactttgcattactttaaaaatgtttgcttatttctgcatatcatcagaatcagttgaaaggctactttaaaaaaattaagttgatatactgtcttttatccattcctgtatgtagaaacattttggttatatctagtttcaagttattgcaagtaatatagttagacttatctctgcataggaggcttttttcttttaaaagttatgcatttagaataaattcccagcaatggttttactagcttaaagtatatgaacatttttacaagtcttaatatataacatatttaccctttgcccttcaaaaaaattatatcaaccttcattaccacagctatctgaaacaaaactgaatacctaaaaaggttgcaaagtgttgaattttatttttttaagcatttcactttatttttgttacattatctggtacattagggttttaattttgatttcttcattatgattaataatttttaagttataagaatgccaggaaccattccaaggagtttatctatataaaattatgttttctctaagaataatttaaataaactctcaatgcatgaaaatataaaaaccaacccttgatatattaaatataagatagatttttatatttccagaaaataaatcatctcatttcacagaactagaaaggcacagataaataggctaagaaagaaaataagacttctagatttttcagcatatttgattgttgtaaataagaagaaattaattcaaagacataatagcttcttttattattgagaaatttttttcaggatgagaaagttcatctaacctgtatcttttttttttttttttaaggaaatgttaaggaaatgatacaggcttcctatatctttttccttaaaaacgactctatggacttaagttcaccgaaggaagtggaatgatgacatgcaaaatgacaacacaactaattctattttttaagcagttaagaaaaccagtttgtaaataacctacctgatcttgacaagcacaacaaactgatgaataagtagaatctcaacatatggaaactggagagatcgtgtgtcacattcacaagaatgatttacttcgcagaggcttaagagtttccactgtgggattttgctcacagtgagctcagacgactcagaggtgtggtgacaacaggaagttccctagggactgactgcaggcagtcccaaccctttcaggatctttgactcctcctcttttcaataaaaggtcactcattgtctactttatacaattttgtgcatatcttaatattataatctgcatctgcagaatgacgagttcagaatagtttcattcttcgtgggcggtttattagttgtttggcttggtgtgttgaaaccaagtgtgacttgagatcttttccccttggttcttgtgaatgaaataacaaatccagtttgtatctgttggcctgtatatacaaaaccagtttttatgttaattcatacactcattcatcatagggcagtctttagattttaagaacatttcattaggtccaattatacatctacatttgccaaaatatatgtatgcttcagattaaaagaaactttttttggtattatatatctttatttgtatttcttcctaccgagaatttctacagctctaataggtcttttttaaaaaagaaaaacaggccggcacggtggctcacgcctgtaatcccaacactttgggaggctgaggcgggtggactgcttgaggtcaggagtttgagaccagcctggccaacatggcgaaaccgtctctactaaaattacaaaaattagccgggtgtggtgacacgcacctgtaatcccagctacctcaggaggctgaggcacaagaattgcttgaacccgggaggcagaggttgcaatgagtccaggtcacatcactgcacttcagcctgggcgacagagtgactgtctcaaacaataaatacataaataaaaaggaaaaataaatgaaaaactttcaaatagaaccccatgccagaatctatgtatctcagggatagaggtaactaaacttgtgcttcatagctccaaggtaatttaattccctttctggcgagagtgcttgcaacactaactcaggcttctagtggtctgatgagcttaaaaatcaattaataagccgggcgcggtggctcaaacctgtaatcccagcactttgggaggccgaggcgggcggatcacgaggtcaggagatcgagaccatcctggctaacacggtgaaaccccctctctactaaaaatacaattagccgggcgtggtggcgggcgcctgccagctactcgggaggctgaagcgggagaatggcgtgaacctgggaggcggagcttgcagtgagccaagatcgctccactgcactccagcctgtgcaaccgagcgagactccgtctcaaaaaaaataaataaataaaaaataataaaaaacattaatatgctgggcgcggtggctcatgcctgtaatctcagcactttgggaggctgaagggggtggatcgcttgagcccaggagttccagtccagcttgggcaacatggcaaaaacccatctctgaaaaaaaatacagacattctttagtgcacctgtggtcccagctactaaggaggctgaagtgggaggatcacctgagcccaggaagcaggaagttgccatgagccaaaatcataccactgcactccagcctgggtgacagagtgagaccccgtctctaaataaataaataaataaataataaagacgcaacttaagaaaacatttcatccaaagcatcaggcaaaagcaattagtcatttagcattgtctacctgaagtatgggtttgtgaagtaatagtaccgctcatataagtttatctattagttctcttcatgttcccaccccatttgagtagcaggagattcctttgcaggaagtagattctagcaatgcttcccaagaagtcagtaagtcagaatcacctgggggcttttaaaagtactgtgtgcagatttctgtgtcacacatcagacctaatgaataccaagactgcctagggctgacttattatactaacctgagttcaaatcccttgtcttccactagcttagttgtgtagacttaggcaaaacatttaagttct

SEQ ID NO: 315884 - DNA, 4001 bp, Homo sapiens
ggacaatggaactctgccacctttagccgtgaactattctgtgtctgaacttggggaggcagttcagacacacaaatatcaatgctacaagttaaaaaataatgcataaaatgaagcctatgcaaacagtgtggtcttagctggacagatattctcatgagtcacccacaggtttttgagtcctgctgtgtggcatggtgtgctatgttcaaacagggatgaacaagacaggtttgccctcaaggagtccagaaaaatgtatagagaaataagagcattgcatgcataactcactactaggtagcaattaataggtatcttctaagagtctaaaatgttatggtaatttctgtaggaggggaaatgacttgattctgcaaatagcttggcaaatgcagtgaggcatgatacattccagacaaatgcccagattcaatgtgacttggtacccacatttagaaggatccactggactctgtgacagggtctgggcaggtggtctacagaagagcacagctacaaattagacagtgcatgctgtgcctctgagtggctgtttgtgtctttagtttgattctcacgtcttttgtttttccccctctcattctaccctgcaggttaatggcagatatttaaggaagactttgcccttcaagactaaaccctgtgaaatcagagtttaacaatgactgctttgggaaattaactcacagtgtcagtatccctgctaccactgccatgagggaggttaggcctatcctccccacatcagagacaaggaaactgaggctcagaaaagtgacctggtgaatcatgtgcagttaaaaagtggcagggactgagtctggatgcctagggcttgccttacagtcagctgcctgttagaaccaactctctgtgaccccgggcctcagtttcccgatctgtaaagcctaggttgtctctctgttcccttcccgttcacatgttctctaagtctccagcctgtgccttctcccagctgcattcaggtaggcaacaagtggtattggagctataggcacagccgcaggctcctgtgcaggagtttacccatgaccttctgggctccgggccagcccttcttgtaagggaaacgtgcagaccctggggacagaaatcagttcccttatgctggaactgctgccactgccaacatcaccaactaaagaaactgcgtgcgtgtgtgtgtgtgtgtgtgtgtgtgtgtgtgtgtgtgtattgggggaaacacacaaaacactgggataatagcaaaagggagactgtgagtaaatattacatgctctcaacccttacttcagccacctgaggacagggagtgaggaagctaggggtttttcctttacagaccataagatttcatatatatatattatatattatatatattttatatataatatatattatatatattttatataatatatattatatattttatatataatatatattatatataatatatattttatatattatatataatatatattatatatattttatatatatattttatatacattttatatatattgtatatatatgtaaaaccttaattaaactttaactagcatcaccaaagacataagaccctttgcaaatattttacacaacattgggtttggggtgtgtgtgcctgttagctcaaacatgtattcccaactatttgttttccatgcagttttggaatttaaagagttcccttctcattaccttttgggaagtttccgcgaacagatgggaaggggaacaagaaaaagtaagaatctgggtaaatacaaacagctttccactcacctttttaactcctgggttgaggtccttagccacctttgccatcctcttctggggtgggggaacagcgcctggcttctcaggcagaggcgcgagggcgcgcagcggggacagcggcggctgaatggccaagttcgcgggcctgggagggagctctgtgcgcagccaggcgcagctgggccgctttaattggagagcgggactccctctaaaacctcgccagccactccgcgccggcgctcgcgcgaggccagccaatcccagcgcgaggctgtccccctccctcagggaggtctctgcactgtggcagcgagcggagctgagcgccggctgccctgacgtcagcatggccgcggcccctgactacccagctcccttctatccctcgagcggcaggaatccgtccccacgcccttttcctttaaagggcaacgggccgaaggtggggcgggcggcgcggctcccgcgatccattcaggtcaaaagggagagtgatcaaacaggagagccgaggtatttttagtgagctggatccagaaataaatgctgagctgtgctccccttcccaccctttctgcctggtcgtagggggcgcggggagggctgagggaggaggtgttttgcaggagctggctaacgtttcccaaacctgggcgagttctccaatatccagagaggagaaaagattccagcgagttatgatttttttaaacttaacgttcgtaaagtattaaactgctttcttataacttgctttaacataaatccttcttattccatgagcaagaaatcactgtcctgatcttagagatgctcctgtggacatactgtcttgttgtatgctcatattatctcagatattattattattatgactgtaagacgatagatgaggaaataatcagaataactggtccacagctgaattactgagcaaggctttaacctgagagactgagagtaatagagagaaagctcatgggggcgtggcggggggggggagggaggcggcgggcacaggattgtaaactataaactaggaagttagtaatttttagataaatggggtcatgcaggcctggacaaacaagattccatctgagttcacaaatccatggaatgtggagtccttgcaacgcataacataactactcttataagacagaattggccaggttcctctctctatgccacgttgtttgcctataaagccacatctctctgctgagccggttccacagacttggattccagaggcatttcccccctgccctgacagaggattaaacacaagccctttttatcctagagagaatactgctgtctctgttgtgaggtgttcggcctgtaacccgtctttgcagtgccccctgccagaaaaaccagggtcccgtgggctaaaataaaactcggttgcacagagactgaagagtggtcccgaagtacaccattcgggagggatttggtgagaaggggaggctgcagttcccactgtggggctgtctcttgctggaggctttttcctcttgaaagcctcctccaatttagttcttatcatcatctccagtcatcccaaatctcagccagggatcctgaattgtgactttttattacatattcctggaaagggctttttgtggcttatcttttccaagatgagggatgacctatttcttttttcacagatttctgctataattgatttttgccttgtttgctcccagctatgtcctcaaacacctagcatgtggtataggcacagtacacatttggcaaatgaatagaggttgggttctggcttttattttttttattgatacatcatgattgtacatgtggtattttgatatatgcttacaatgtgtaatgatcaaatcagggtgtttaggatttccatcaccttgaacatttataatttctttgtactgggaacatgtcaaatcacttttagcttttcttttttttttttttttttttttgagacagagtctcgcgctgttgcccaggctggaatgcagtggcgcgatctcggctcactgtgacctctgcctcccaggttcaagtgagtctcccacctcggcttcccaagaagctgggactacaggcatgagccaccatacctggctcatttttgtatttttagtagagacagagtttcaccatattggccaggctgg
